United States Patent Application Publication US 2024/0000971 A1 - sequence listing, part 2

SEQ ID NO: 2098 - DNA, 168 bp, Artificial Sequence
  Description of Artificial Sequence: Synthetic polynucleotide
tctgcatataaattgtaactgatgtaagaggtttcatattgctaatagcagctacaatccagctaccattctgcttttattttatggttgggataaggctggattattctgagtccaagctaggcccttttgctaatcatgttcatacctcttatcttcctcccacag

SEQ ID NO: 2099 - DNA, 73 bp, Artificial Sequence
  Description of Artificial Sequence: Synthetic oligonucleotide
aaaaaatgctttcttcttttaatatacttttcttttgctaatcatgttcatacctcttatcttcctcccacag

SEQ ID NO: 2100 - DNA, 73 bp, Artificial Sequence
  Description of Artificial Sequence: Synthetic oligonucleotide
aggctggattattctgagtccaagctaggcccttttgctaatcatgttcatacctcttatcttcctcccacag

SEQ ID NO: 2101 - DNA, 73 bp, Artificial Sequence
  Description of Artificial Sequence: Synthetic oligonucleotide
aaaaaatgctttcttcttttcaagctaggcccttttgctaatcatgttcatacctcttatcttcctcccacag

SEQ ID NO: 2102 - DNA, 53 bp, Artificial Sequence
  Description of Artificial Sequence: Synthetic oligonucleotide
caagctaggcccttttgctaatcatgttcatacctcttatcttcctcccacag

SEQ ID NO: 2103 - DNA, 172 bp, Artificial Sequence
  Description of Artificial Sequence: Synthetic polynucleotide
gaactgaaaaaccagaaagttaactggtaagtttagtctttttgtcttttatttcaggtcccggatccggtggtggtgcaaatcaaagaactgctcctcagtggatgttgcctttacttctaggcctgtacggaagtgttacttctgctctaaaagctgcggaattgtaccc

SEQ ID NO: 2104 - DNA, 1074 bp, Artificial Sequence
  Description of Artificial Sequence: Synthetic polynucleotide
ggagtcgctgcgcgctgccttcgccccgtgccccgctccgccgccgcctcgcgccgcccgccccggctctgactgaccgcgttactcccacaggtgagcgggcgggacggcccttctcctccgggctgtaattagcgcttggtttaatgacggcttgtttcttttctgtggctgcgtgaaagccttgaggggctccgggagggccctttgtgcggggggagcggctcggggggtgcgtgcgtgtgtgtgtgcgtggggagcgccgcgtgcggctccgcgctgcccggcggctgtgagcgctgcgggcgcggcgcggggctttgtgcgctccgcagtgtgcgcgaggggagcgcggccgggggcggtgccccgcggtgcggggggggctgcgaggggaacaaaggctgcgtgcggggtgtgtgcgtgggggggtgagcagggggtgtgggcgcgtcggtcgggctgcaaccccccctgcacccccctccccgagttgctgagcacggcccggcttcgggtgcggggctccgtacggggcgtggcgcggggctcgccgtgccgggcggggggtggcggcaggtgggggtgccgggcggggcggggccgcctcgggccggggagggctcgggggaggggcgcggcggcccccggagcgccggcggctgtcgaggcgcggcgagccgcagccattgccttttatggtaatcgtgcgagagggcgcagggacttcctttgtcccaaatctgtgcggagccgaaatctgggaggcgccgccgcaccccctctagcgggcgcggggcgaagcggtgcggcgccggcaggaaggaaatgggcggggagggccttcgtgcgtcgccgcgccgccgtccccttctccctctccagcctcggggctgtccgcggggggacggctgccttcgggggggacggggcagggcggggttcggcttctggcgtgtgaccggcggctctagagcctctgctaaccatgttcatgccttcttctttttcctacagctcctgggcaacgtgctggttattgtgctgtctcatcattttggcaaagaattcgag

SEQ ID NO: 2105 - DNA, 41 bp, Artificial Sequence
  Description of Artificial Sequence: Synthetic oligonucleotide
cctctgctaaccatgttcatgccttcttctttttcctacag

SEQ ID NO: 2106 - DNA, 84 bp, Artificial Sequence
  Description of Artificial Sequence: Synthetic oligonucleotide
atggcgacgggttcaagaacttccctacttcttgcatttggcctgctttgtttgccgtggttacaggagggctcggcagctgcc

SEQ ID NO: 2107 - DNA, 93 bp, Artificial Sequence
  Description of Artificial Sequence: Synthetic oligonucleotide
gccgccaccatggcgacgggttcaagaacttccctacttcttgcatttggcctgctttgtttgccgtggttacaggagggctcggcagctgcc

SEQ ID NO: 2108 - DNA, 96 bp, Artificial Sequence
  Description of Artificial Sequence: Synthetic oligonucleotide
gccgccaccatgggggtgcacgaatgtcctgcctggctgtggcttctcctgtccctgctgtcgctccctctgggcctcccagtcctgggcgctgcc

SEQ ID NO: 2109 - DNA, 66 bp, Artificial Sequence
  Description of Artificial Sequence: Synthetic oligonucleotide
gccgccaccatgggagtcaaagttctgtttgccctgatctgcatcgctgtggccgaggccgctgcc

SEQ ID NO: 2110 - DNA, 72 bp, Artificial Sequence
  Description of Artificial Sequence: Synthetic oligonucleotide
gccgccaccatgaaacacctgtggttcttcctcctgctggtggcagctcccagatgggtcctgtccgctgcc

SEQ ID NO: 2111 - DNA, 93 bp, Artificial Sequence
  Description of Artificial Sequence: Synthetic oligonucleotide
gccgccaccatggacctcctgcacaagaacatgaaacacctgtggttcttcctcctcctggtggcagctcccagatgggtgctgtccgctgcc

SEQ ID NO: 2112 - DNA, 69 bp, Artificial Sequence
  Description of Artificial Sequence: Synthetic oligonucleotide
gccgccaccatggctttcctctggctcctctcctgctgggccctcctgggtaccaccttcggcgctgcc

SEQ ID NO: 2113 - DNA, 81 bp, Artificial Sequence
  Description of Artificial Sequence: Synthetic oligonucleotide
gccgccaccatgccccccaagaagtgcctgctgctgctgctgaccctgctgctgctgatctccaccaccttcggcgctgcc

SEQ ID NO: 2114 - DNA, 12 bp, Artificial Sequence
  Description of Artificial Sequence: Synthetic oligonucleotide
gccgccaccatg

SEQ ID NO: 2115 - DNA, 81 bp, Artificial Sequence
  Description of Artificial Sequence: Synthetic oligonucleotide
gccgccaccatggacatgagggtccctgctcagctcctggggctcctgctgctctggctctcaggtgccagatgtgctgcc

SEQ ID NO: 2116 - DNA, 66 bp, Artificial Sequence
  Description of Artificial Sequence: Synthetic oligonucleotide
gccgccaccatggaaatcaaggtgctgtttgccctcatctgtattgctgttgctgaggcagctgcc

SEQ ID NO: 2117 - DNA, 78 bp, Artificial Sequence
  Description of Artificial Sequence: Synthetic oligonucleotide
gccgccaccatggagacagacacactcctgctatgggtactgctgctctgggttccaggttccactggtgacgctgcc

SEQ ID NO: 2118 - DNA, 27 bp, Artificial Sequence
  Description of Artificial Sequence: Synthetic oligonucleotide
tacccatacgatgttccagattacgct

SEQ ID NO: 2119 - DNA, 21 bp, Artificial Sequence
  Description of Artificial Sequence: Synthetic oligonucleotide
agcgagaaggacgagctgtag

SEQ ID NO: 2120 - DNA, 18 bp, Artificial Sequence
  Description of Artificial Sequence: Synthetic oligonucleotide
agcgagaaggacgagctg

SEQ ID NO: 2121 - DNA, 18 bp, Artificial Sequence
  Description of Artificial Sequence: Synthetic oligonucleotide
catcaccatcaccatcac

SEQ ID NO: 2122 - DNA, 127 bp, Artificial Sequence
  Description of Artificial Sequence: Synthetic polynucleotide
gatctttttccctctgccaaaaattatggggacatcatgaagccccttgagcatctgacttctggctaataaaggaaatttattttcattgcaatagtgtgttggaattttttgtgtctctcactcg

SEQ ID NO: 2123 - DNA, 477 bp, Artificial Sequence
  Description of Artificial Sequence: Synthetic polynucleotide
gggtggcatccctgtgacccctccccagtgcctctcctggccctggaagttgccactccagtgcccaccagccttgtcctaataaaattaagttgcatcattttgtctgactaggtgtccttctataatattatggggtggaggggggtggtatggagcaaggggcaagttgggaagacaacctgtagggcctgcggggtctattgggaaccaagctggagtgcagtggcacaatcttggctcactgcaatctccgcctcctgggttcaagcgattctcctgcctcagcctcccgagttgttgggattccaggcatgcatgaccaggctcagctaatttttgtttttttggtagagacggggtttcaccatattggccaggctggtctccaactcctaatctcaggtgatctacccaccttggcctcccaaattgctgggattacaggcgtgaaccactgctcccttccctgtcctt

SEQ ID NO: 2124 - DNA, 552 bp, Artificial Sequence
  Description of Artificial Sequence: Synthetic polynucleotide
gaattcactcctcaggtgcaggctgcctatcagaaggtggtggctggtgtggccaatgccctggctcacaaataccactgagatctttttccctctgccaaaaattatggggacatcatgaagccccttgagcatctgacttctggctaataaaggaaatttattttcattgcaatagtgtgttggaattttttgtgtctctcactcggaaggacatatgggagggcaaatcatttaaaacatcagaatgagtatttggtttagagtttggcaacatatgcccatatgctggctgccatgaacaaaggttggctataaagaggtcatcagtatatgaaacagccccctgctgtccattccttattccatagaaaagccttgacttgaggttagattttttttatattttgttttgtgttatttttttctttaacatccctaaaattttccttacatgttttactagccagatttttcctcctctcctgactactcccagtcatagctgtccctcttctcttatggagatccctcgacctgcagcccaagctt

SEQ ID NO: 2125 - DNA, 1153 bp, Artificial Sequence
  Description of Artificial Sequence: Synthetic polynucleotide
cctaggtttcttgagacctctacaagagttggagttgacacttggggtactttcttggtgtaacgaactaatagcctgaaaaaaagaagtcatgtgttttcagcaaggcaagaaactgtctaacatagtagataaaacagagaacacttggccggaatcaactaagatgttgctatgttccattcatcatattatctccatctgcagagtagtgggttagtggagggtagaaaacattctcctgaacaactagttaaacttggctttgagttccacctgtaccacttgcataatcttgggaaagtgagttgcctaattcagtgacattaataaatttattaatttcttctttcaataaaacctggagagagcttcatatgtatcagcatatgctaaacttgaaagatacaagtagaaaatggaaggaaatatatctgactcaatagggatagttcaagggttaaattaaaagtagtaaagtattataattaatctgacatggtacctaatatataataatcatgtattaagaatgccagtcaccattaaaagtcaatgtatgactttaatctactcgaggaaagaaactatgtcttgttcactgttattatctctaaaatccataatcagaagagcaccatgtgtatgagccacacaataaatatctactgtataatatgtctcttcttgtttttaaccttcatagataagactctattgaattgggacattagtccagcaagccattctgtctctgtctcttctatggagggaaaggtttaaccatcaaagactaggtgcatctcccaaacaacctgaatttaatattcaaatatgtatctaaattcatttgttacatttttgtgttcagcttacatattactttttgagcgacatctattcaaggcctactacttgctgctctacaaaatattgccatgctctatttgcccattaactatttcttaaccttcaagggacatgctcagttctgatataccaagatttggtatttaccctcccagcctacatacttccaatcttaagagaacaatttttagactacattcaaatatagacctctccaccccatcaactattttatctctcctctcctatctttcttgacaaagagtgattagaaatatgcaat

SEQ ID NO: 2126 - DNA, 1240 bp, Artificial Sequence
  Description of Artificial Sequence: Synthetic polynucleotide
attatatttttttaaagactcacatagtcttctgcacagggcattctttttgcttcaggatgtttacaacatttgctgcccacttttcctaggtttcttgagacctctacaagagttggagttgacacttggggtactttcttggtgtaacgaactaatagcctgaaaaaaagaagtcatgtgttttcagcaaggcaagaaactgtctaacatagtagataaaacagagaacacttggccggaatcaactaagatgttgctatgttccattcatcatattatctccatctgcagagtagtgggttagtggagggtagaaaacattctcctgaacaactagttaaacttggctttgagttccacctgtaccacttgcataatcttgggaaagtgagttgcctaattcagtgacattaataaatttattaatttcttctttcaataaaacctggagagagcttcatatgtatcagcatatgctaaacttgaaagatacaagtagaaaatggaaggaaatatatctgactcaatagggatagttcaagggttaaattaaaagtagtaaagtattataattaatctgacatggtacctaatatataataatcatgtattaagaatgccagtcaccattaaaagtcaatgtatgactttaatctactcgaggaaagaaactatgtcttgttcactgttattatctctaaaatccataatcagaagagcaccatgtgtatgagccacacaataaatatctactgtataatatgtctcttcttgtttttaaccttcatagataagactctattgaattgggacattagtccagcaagccattctgtctctgtctcttctatggagggaaaggtttaaccatcaaagactaggtgcatctcccaaacaacctgaatttaatattcaaatatgtatctaaattcatttgttacatttttgtgttcagcttacatattactttttgagcgacatctattcaaggcctactacttgctgctctacaaaatattgccatgctctatttgcccattaactatttcttaaccttcaagggacatgctcagttctgatataccaagatttggtatttaccctcccagcctacatacttccaatcttaagagaacaatttttagactacattcaaatatagacctctccaccccatcaactattttatctctcctctcctatctttcttgacaaagagtgattagaaatatgcaat

SEQ ID NO: 2127 - protein, 441 aa, Homo sapiens
MAEPRQEFEVMEDHAGTYGLGDRKDQGGYTMHQDQEGDTDAGLKESPLQTPTEDGSEEPGSETSDAKSTPTAEDVTAPLVDEGAPGKQAAAQPHTEIPEGTTAEEAGIGDTPSLEDEAAGHVTQARMVSKSKDGTGSDDKKAKGADGKTKIATPRGAAPPGQKGQANATRIPAKTPPAPKTPPSSGEPPKSGDRSGYSSPGSPGTPGSRSRTPSLPTPPTREPKKVAVVRTPPKSPSSAKSRLQTAPVPMPDLKNVKSKIGSTENLKHQPGGGKVQIINKKLDLSNVQSKCGSKDNIKHVPGGGSVQIVYKPVDLSKVTSKCGSLGNIHHKPGGGQVEVKSEKLDFKDRVQSKIGSLDNITHVPGGGNKKIETHKLTFRENAKAKTDHGAEIVYKSPVVSGDTSPRHLSNVSSTGSIDMVDSPQLATLADEVSASLAKQGL

SEQ ID NO: 2128 - protein, 18 aa, Artificial Sequence
  Description of Artificial Sequence: Synthetic peptide
  MOD_RES (11)..(11): phosphoThr
SPGTPGSRSRTPSLPTPP

SEQ ID NO: 2129 - protein, 15 aa, Artificial Sequence
  Description of Artificial Sequence: Synthetic peptide
  MOD_RES (8)..(8): phosphoThr
SRTPSLPTPPTREPK

SEQ ID NO: 2130 - protein, 15 aa, Artificial Sequence
  Description of Artificial Sequence: Synthetic peptide
  MOD_RES (8)..(8): phosphoThr
KKVAVVRTPPKSPSS

SEQ ID NO: 2131 - protein, 20 aa, Artificial Sequence
  Description of Artificial Sequence: Synthetic peptide
  MOD_RES (8)..(8): phosphoThr
  MOD_RES (13)..(13): phosphoThr
TPGSRSRTPSLPTPPTREPK

SEQ ID NO: 2132 - protein, 29 aa, Artificial Sequence
  Description of Artificial Sequence: Synthetic peptide
  MOD_RES (8)..(8): phosphoThr
  MOD_RES (22)..(22): phosphoThr
SRTPSLPTPPTREPKKVAVVRTPPKSPSS

SEQ ID NO: 2133 - protein, 34 aa, Artificial Sequence
  Description of Artificial Sequence: Synthetic polypeptide
  MOD_RES (8)..(8): phosphoThr
  MOD_RES (13)..(13): phosphoThr
  MOD_RES (27)..(27): phosphoThr
TPGSRSRTPSLPTPPTREPKKVAVVRTPPKSPSS

SEQ ID NO: 2134 - protein, 34 aa, Artificial Sequence; identical to SEQ ID NO: 2133
  Description of Artificial Sequence: Synthetic polypeptide

SEQ ID NO: 2135 - protein, 34 aa, Artificial Sequence; identical to SEQ ID NO: 2133
  Description of Artificial Sequence: Synthetic polypeptide
  MOD_RES (8)..(8): phosphoThr
  MOD_RES (27)..(27): phosphoThr

SEQ ID NO: 2136 - protein, 49 aa, Artificial Sequence
  Description of Artificial Sequence: Synthetic polypeptide
TPPSSGEPPKSGDRSGYSSPGSPGTPGSRSRTPSLPTPPTREPKKVAVV

SEQ ID NO: 2137 - DNA, 3950 bp, Artificial Sequence
  Description of Artificial Sequence: Synthetic polynucleotide
ctgcgcgctcgctcgctcactgaggccgcccgggcaaagcccgggcgtcgggcgacctttggtcgcccggcctcagtgagcgagcgagcgcgcagagagggagtggccaactccatcactaggggttccttgtagttaatgattaacccgccatgctacttatctaccagggtaatggggatcctctagaactatagctagtcgacattgattattgactagttattaatagtaatcaattacggggtcattagttcatagcccatatatggagttccgcgttacataacttacggtaaatggcccgcctggctgaccgcccaacgacccccgcccattgacgtcaataatgacgtatgttcccatagtaacgccaatagggactttccattgacgtcaatgggtggagtatttacggtaaactgcccacttggcagtacatcaagtgtatcatatgccaagtacgccccctattgacgtcaatgacggtaaatggcccgcctggcattatgcccagtacatgaccttatgggactttcctacttggcagtacatctacgtattagtcatcgctattaccatgtcgaggccacgttctgcttcactctccccatctcccccccctccccacccccaattttgtatttatttattttttaattattttgtgcagcgatgggggcggggggggggggcgcgcgccaggcggggcggggcggggcgaggggcggggcggggcgaggcggagaggtgcggcggcagccaatcagagcggcgcgctccgaaagtttccttttatggcgaggcggcggcggcggcggccctataaaaagcgaagcgcgcggcgggcgggagcaagcttcgtttagtgaaccgtcagatcgcctggagacgccatccacgctgttttgacctccatagaagacaccgggaccgatccagcctccgcggattcgaatcccggccgggaacggtgcattggaacgcggattccccgtgccaagagtgacgtaagtaccgcctatagagtctataggcccacaaaaaatgctttcttcttttaatatacttttttgtttatcttatttctaatactttccctaatctctttctttcagggcaataatgatacaatgtatcatgcctctttgcaccattctaaagaataacagtgataatttctgggttaaggcaatagcaatatttctgcatataaatatttctgcatataaattgtaactgatgtaagaggtttcatattgctaatagcagctacaatccagctaccattctgcttttattttatggttgggataaggctggattattctgagtccaagctaggcccttttgctaatcatgttcatacctcttatcttcctcccacagctcctgggcaacgtgctggtctgtgtgctggcccatcactttggcaaagaattgggattcgaaccggtgccgccaccatgaagttgcctgttaggctgttggtgctgatgttctggattcctgcttccagcagtgatgttttgatgacccaaactccactctccctgcctgtcagtcttggagatcaagcctccatctcttgcaaatctagtcagagcattgtacatagtaatggaaacacctatttagaatggtacctgcagaaaccaggccagtctccaaagctcctggtctacaaagtttccaatcgattttctggggtcccagacaggttcagtggcagtggatcagggacagatttcacactcaagatcagcagagtggaggctgaggatctgggaacttattactgctttcaaggttcacttgttccttgggcgttcggtggaggcaccaagctggaaatcaaacgggctgatgctgcaccaactgtatccatcttcccaccatccagtgagcagttaacatctggaggtgcctcagtcgtgtgcttcttgaacaacttctaccccaaagacatcaatgtcaagtggaagattgatggcagtgaacgacaaaatggcgtcctgaacagttggactgatcaggacagcaaagacagcacctacagcatgagcagcaccctcacgttgaccaaggacgagtatgaacgacataacagctatacctgtgaggccactcacaagacatcaacttcacccattgtcaagagcttcaacaggaatgagtgtgagggcagaggaagtcttctaacatgcggtgacgtggaggagaatcccggccctatgaacttcgggctcagcttgattttccttgtccttgttttaaaaggtgtccagtgtgaggttcatctggtggagtctgggggagccttagtgaagcctggagggtccctgaaactctcctgtgcagcctctggattcagtttcagtaaatatggcatgtcttgggttcgccagactccagacaagaggctggagtgggtcgcaaccattagtagtagtgggagtcgcacctactatccagacagtgtgaagggccaattcaccatctccagagacaatgccaagaacaccctgtacctgcaaatgagcagtctgaagtctgaggacacagccatgtattactgttcaattagctgggacggtgctatggactactggggtcaagggacctcagtcaccgtctcctcagccaaaacgacacccccatctgtctatccactggcccctggatctgctgcccaaactaactccatggtgaccctgggatgcctggtcaagggctatttccctgagccagtgacagtgacctggaactctggatccctgtccagcggtgtgcacaccttcccagctgtcctgcagtctgacctctacactctgagcagctcagtgactgtcccctccagcacctggcccagcgagaccgtcacctgcaacgttgcccacccggccagcagcaccaaggtggacaagaaaattgtgcccagggattgtggttgtaagccttgcatatgtacagtcccagaagtatcatctgtcttcatcttccccccaaagcccaaggatgtgctcaccattactctgactcctaaggtcacgtgtgttgtggtagacatcagcaaggatgatcccgaggtccagttcagctggtttgtagatgatgtggaggtgcacacagctcagacgcaaccccgggaggagcagttcaacagcactttccgctcagtcagtgaacttcccatcatgcaccaggactggctcaatggcaaggagttcaaatgcagggtcaacagtgcagctttccctgcccccatcgagaaaaccatctccaaaaccaaaggcagaccgaaggctccacaggtgtacaccattccacctcccaaggagcagatggccaaggataaagtcagtctgacctgcatgataacagacttcttccctgaagacattactgtggagtggcagtggaatgggcagccagcggagaactacaagaacactcagcccatcatggacacagatggctcttacttcgtctacagcaagctcaatgtgcagaagagcaactgggaggcaggaaatactttcacctgctctgtgttacatgagggcctgcacaaccaccatactgagaagagcctctcccactctcctggttagtaactcgaggacggggtgaactacgcctgaggatccgatctttttccctctgccaaaaattatggggacatcatgaagccccttgagcatctgacttctggctaataaaggaaatttattttcattgcaatagtgtgttggaattttttgtgtctctcactcggcctaggtagataagtagcatggcgggttaatcattaactacaaggaacccctagtgatggagttggccactccctctctgcgcgctcgctcgctcactgaggccgggcgaccaaaggtcgcccgacgcccgggctttgcccgggcggcctcagtgagcgagcgagcgcgcag

SEQ ID NO: 2138 - DNA, 3962 bp, Artificial Sequence
  Description of Artificial Sequence: Synthetic polynucleotide
ctgcgcgctcgctcgctcactgaggccgcccgggcaaagcccgggcgtcgggcgacctttggtcgcccggcctcagtgagcgagcgagcgcgcagagagggagtggccaactccatcactaggggttccttgtagttaatgattaacccgccatgctacttatctaccagggtaatggggatcctctagaactatagctagtcgacattgattattgactagttattaatagtaatcaattacggggtcattagttcatagcccatatatggagttccgcgttacataacttacggtaaatggcccgcctggctgaccgcccaacgacccccgcccattgacgtcaataatgacgtatgttcccatagtaacgccaatagggactttccattgacgtcaatgggtggagtatttacggtaaactgcccacttggcagtacatcaagtgtatcatatgccaagtacgccccctattgacgtcaatgacggtaaatggcccgcctggcattatgcccagtacatgaccttatgggactttcctacttggcagtacatctacgtattagtcatcgctattaccatgtcgaggccacgttctgcttcactctccccatctcccccccctccccacccccaattttgtatttatttattttttaattattttgtgcagcgatgggggcggggggggggggcgcgcgccaggcggggcggggcggggcgaggggcggggcggggcgaggcggagaggtgcggcggcagccaatcagagcggcgcgctccgaaagtttccttttatggcgaggcggcggcggcggcggccctataaaaagcgaagcgcgcggcgggcgggagcaagcttcgtttagtgaaccgtcagatcgcctggagacgccatccacgctgttttgacctccatagaagacaccgggaccgatccagcctccgcggattcgaatcccggccgggaacggtgcattggaacgcggattccccgtgccaagagtgacgtaagtaccgcctatagagtctataggcccacaaaaaatgctttcttcttttaatatacttttttgtttatcttatttctaatactttccctaatctctttctttcagggcaataatgatacaatgtatcatgcctctttgcaccattctaaagaataacagtgataatttctgggttaaggcaatagcaatatttctgcatataaatatttctgcatataaattgtaactgatgtaagaggtttcatattgctaatagcagctacaatccagctaccattctgcttttattttatggttgggataaggctggattattctgagtccaagctaggcccttttgctaatcatgttcatacctcttatcttcctcccacagctcctgggcaacgtgctggtctgtgtgctggcccatcactttggcaaagaattgggattcgaaccggtgccgccaccatgaacttcgggctcagcttgattttccttgtccttgttttaaaaggtgtccagtgtcaggtgcagctgcagcagagcgacgccgagctggtgaaacctggggccagcgtcaagatcagctgcaaggcctccggctacaccttcaccgaccgcaccatccactgggtgaagcagcggcccgagcaggggctggagtggatcgggtacatctaccccggggacggctccaccaagtacaacgagaacttcaagggcaaagccaccctgacggccgacaagtccagcagcaccgcctacatgcagctgaacagcctgaccagcgaggacagcgccgtgtacttctgcgcccggcggggggctatggactactggggccagggcacctccgtgaccgtgtcctccgccaaaacgacacccccatctgtctatccactggcccctggatctgctgcccaaactaactccatggtgaccctgggatgcctggtcaagggctatttccctgagccagtgacagtgacctggaactctggatccctgtccagcggtgtgcacaccttcccagctgtcctgcagtctgacctctacactctgagcagctcagtgactgtcccctccagcacctggcccagcgagaccgtcacctgcaacgttgcccacccggccagcagcaccaaggtggacaagaaaattgtgcccagggattgtggttgtaagccttgcatatgtacagtcccagaagtatcatctgtcttcatcttccccccaaagcccaaggatgtgctcaccattactctgactcctaaggtcacgtgtgttgtggtagacatcagcaaggatgatcccgaggtccagttcagctggtttgtagatgatgtggaggtgcacacagctcagacgcaaccccgggaggagcagttcaacagcactttccgctcagtcagtgaacttcccatcatgcaccaggactggctcaatggcaaggagttcaaatgcagggtcaacagtgcagctttccctgcccccatcgagaaaaccatctccaaaaccaaaggcagaccgaaggctccacaggtgtacaccattccacctcccaaggagcagatggccaaggataaagtcagtctgacctgcatgataacagacttcttccctgaagacattactgtggagtggcagtggaatgggcagccagcggagaactacaagaacactcagcccatcatggacacagatggctcttacttcgtctacagcaagctcaatgtgcagaagagcaactgggaggcaggaaatactttcacctgctctgtgttacatgagggcctgcacaaccaccatactgagaagagcctctcccactctcctggtcgggccaagcggggaagcggagtgaaacagactttgaattttgaccttctcaagttggcgggagacgtggagtccaaccctggacctatgaagttgcctgttaggctgttggtgctgatgttctggattcctgcttccagcagtgacgtgcagatgatccagagccccagcagcctgagcgcctcgctgggggacatcgtgaccatgacctgccaggcctcccagggcaccagcatcaacctcaactggttccagcagaagcccggcaaggcccccaagctcctcatctacggggccagcaacctggaggacggcgtgccctcccgcttcagcggctcccgctacggcacggacttcacgctgaccatctcctccctggaggacgaggacatggccacctacttctgcctgcagcacacctacctgcccttcaccttcggcagcgggaccaagctggagatcaagcgggctgatgctgcaccaactgtatccatcttcccaccatccagtgagcagttaacatctggaggtgcctcagtcgtgtgcttcttgaacaacttctaccccaaagacatcaatgtcaagtggaagattgatggcagtgaacgacaaaatggcgtcctgaacagttggactgatcaggacagcaaagacagcacctacagcatgagcagcaccctcacgttgaccaaggacgagtatgaacgacataacagctatacctgtgaggccactcacaagacatcaacttcacccattgtcaagagcttcaacaggaatgagtgttagtaactcgaggacggggtgaactacgcctgaggatccgatctttttccctctgccaaaaattatggggacatcatgaagccccttgagcatctgacttctggctaataaaggaaatttattttcattgcaatagtgtgttggaattttttgtgtctctcactcggcctaggtagataagtagcatggcgggttaatcattaactacaaggaacccctagtgatggagttggccactccctctctgcgcgctcgctcgctcactgaggccgggcgaccaaaggtcgcccgacgcccgggctttgcccgggcggcctcagtgagcgagcgagcgcgcag

SEQ ID NO: 2139 - DNA, 4450 bp, Artificial Sequence
  Description of Artificial Sequence: Synthetic polynucleotide
ctgcgcgctcgctcgctcactgaggccgcccgggcaaagcccgggcgtcgggcgacctttggtcgcccggcctcagtgagcgagcgagcgcgcagagagggagtggccaactccatcactaggggttccttgtagttaatgattaacccgccatgctacttatctaccagggtaatggggatcctctagaactatagctagtcgacataacgcgtctagttattaatagtaatcaattacggggtcattagttcatagcccatatatggagttccgcgttacataacttacggtaaatggcccgcctggctgaccgcccaacgacccccgcccattgacgtcaataatgacgtatgttcccatagtaacgccaatagggactttccattgacgtcaatgggtggagtatttacggtaaactgcccacttggcagtacatcaagtgtatcatatgccaagtacgccccctattgacgtcaatgacggtaaatggcccgcctggcattatgcccagtacatgaccttatgggactttcctacttggcagtacatctacgtattagtcatcgctattaccatggtcgaggtgagccccacgttctgcttcactctccccatctcccccccctccccacccccaattttgtatttatttattttttaattattttgtgcagcgatgggggcggggggggggggggggcgcgcgccaggcggggcggggcggggcgaggggcggggcggggcgaggcggagaggtgcggcggcagccaatcagagcggcgcgctccgaaagtttccttttatggcgaggcggcggcggcggcggccctataaaaagcgaagcgcgcggcgggcgggagtcgctgcgcgctgccttcgccccgtgccccgctccgccgccgcctcgcgccgcccgccccggctctgactgaccgcgttactcccacaggtgagcgggcgggacggcccttctcctccgggctgtaattagcgcttggtttaatgacggcttgtttcttttctgtggctgcgtgaaagccttgaggggctccgggagggccctttgtgcggggggagcggctcggggggtgcgtgcgtgtgtgtgtgcgtggggagcgccgcgtgcggctccgcgctgcccggcggctgtgagcgctgcgggcgcggcgcggggctttgtgcgctccgcagtgtgcgcgaggggagcgcggccgggggcggtgccccgcggtgcggggggggctgcgaggggaacaaaggctgcgtgcggggtgtgtgcgtgggggggtgagcagggggtgtgggcgcgtcggtcgggctgcaaccccccctgcacccccctccccgagttgctgagcacggcccggcttcgggtgcggggctccgtacggggcgtggcgcggggctcgccgtgccgggcggggggtggcggcaggtgggggtgccgggcggggcggggccgcctcgggccggggagggctcgggggaggggcgcggcggcccccggagcgccggcggctgtcgaggcgcggcgagccgcagccattgccttttatggtaatcgtgcgagagggcgcagggacttcctttgtcccaaatctgtgcggagccgaaatctgggaggcgccgccgcaccccctctagcgggcgcggggcgaagcggtgcggcgccggcaggaaggaaatgggcggggagggccttcgtgcgtcgccgcgccgccgtccccttctccctctccagcctcggggctgtccgcggggggacggctgccttcgggggggacggggcagggcggggttcggcttctggcgtgtgaccggcggctctagagcctctgctaaccatgttcatgccttcttctttttcctacagctcctgggcaacgtgctggttattgtgctgtctcatcattttggcaaagaattcgggattcgaaccggtgccgccaccatgaacttcgggctcagcttgattttccttgtccttgttttaaaaggtgtccagtgtcaggtgcagctgcagcagagcgacgccgagctggtgaaacctggggccagcgtcaagatcagctgcaaggcctccggctacaccttcaccgaccgcaccatccactgggtgaagcagcggcccgagcaggggctggagtggatcgggtacatctaccccggggacggctccaccaagtacaacgagaacttcaagggcaaagccaccctgacggccgacaagtccagcagcaccgcctacatgcagctgaacagcctgaccagcgaggacagcgccgtgtacttctgcgcccggcggggggctatggactactggggccagggcacctccgtgaccgtgtcctccgccaaaacgacacccccatctgtctatccactggcccctggatctgctgcccaaactaactccatggtgaccctgggatgcctggtcaagggctatttccctgagccagtgacagtgacctggaactctggatccctgtccagcggtgtgcacaccttcccagctgtcctgcagtctgacctctacactctgagcagctcagtgactgtcccctccagcacctggcccagcgagaccgtcacctgcaacgttgcccacccggccagcagcaccaaggtggacaagaaaattgtgcccagggattgtggttgtaagccttgcatatgtacagtcccagaagtatcatctgtcttcatcttccccccaaagcccaaggatgtgctcaccattactctgactcctaaggtcacgtgtgttgtggtagacatcagcaaggatgatcccgaggtccagttcagctggtttgtagatgatgtggaggtgcacacagctcagacgcaaccccgggaggagcagttcaacagcactttccgctcagtcagtgaacttcccatcatgcaccaggactggctcaatggcaaggagttcaaatgcagggtcaacagtgcagctttccctgcccccatcgagaaaaccatctccaaaaccaaaggcagaccgaaggctccacaggtgtacaccattccacctcccaaggagcagatggccaaggataaagtcagtctgacctgcatgataacagacttcttccctgaagacattactgtggagtggcagtggaatgggcagccagcggagaactacaagaacactcagcccatcatggacacagatggctcttacttcgtctacagcaagctcaatgtgcagaagagcaactgggaggcaggaaatactttcacctgctctgtgttacatgagggcctgcacaaccaccatactgagaagagcctctcccactctcctggtcgggccaagcggggaagcggagtgaaacagactttgaattttgaccttctcaagttggcgggagacgtggagtccaaccctggacctatgaagttgcctgttaggctgttggtgctgatgttctggattcctgcttccagcagtgacgtgcagatgatccagagccccagcagcctgagcgcctcgctgggggacatcgtgaccatgacctgccaggcctcccagggcaccagcatcaacctcaactggttccagcagaagcccggcaaggcccccaagctcctcatctacggggccagcaacctggaggacggcgtgccctcccgcttcagcggctcccgctacggcacggacttcacgctgaccatctcctccctggaggacgaggacatggccacctacttctgcctgcagcacacctacctgcccttcaccttcggcagcgggaccaagctggagatcaagcgggctgatgctgcaccaactgtatccatcttcccaccatccagtgagcagttaacatctggaggtgcctcagtcgtgtgcttcttgaacaacttctaccccaaagacatcaatgtcaagtggaagattgatggcagtgaacgacaaaatggcgtcctgaacagttggactgatcaggacagcaaagacagcacctacagcatgagcagcaccctcacgttgaccaaggacgagtatgaacgacataacagctatacctgtgaggccactcacaagacatcaacttcacccattgtcaagagcttcaacaggaatgagtgttagtaactcgaggacggggtgaactacgcctgaggatccgatctttttccctctgccaaaaattatggggacatcatgaagccccttgagcatctgacttctggctaataaaggaaatttattttcattgcaatagtgtgttggaattttttgtgtctctcactcggcctaggtagataagtagcatggcgggttaatcattaactacaaggaacccctagtgatggagttggccactccctctctgcgcgctcgctcgctcactgaggccgggcgaccaaaggtcgcccgacgcccgggctttgcccgggcggcctcagtgagcgagcgagcgcgcag

SEQ ID NO: 2140 - DNA, 4020 bp, Artificial Sequence
  Description of Artificial Sequence: Synthetic polynucleotide
ctgcgcgctcgctcgctcactgaggccgcccgggcaaagcccgggcgtcgggcgacctttggtcgcccggcctcagtgagcgagcgagcgcgcagagagggagtggccaactccatcactaggggttccttgtagttaatgattaacccgccatgctacttatctaccagggtaatggggatcctctagaactatagctagtcgacataacgcgtgatctaacatatcctggtgtggagtagcggacgctgctatgacagaggctcgggggcctgagctggctctgtgagctggggaggaggcagacagccaggccttgtctgcaagcagacctggcagcattgggctggccgccccccagggcctcctcttcatgcccagtgaatgactcaccttggcacagacacaatgttcggggtgggcacagtgcctgcttcccgccgcaccccagcccccctcaaatgccttccgagaagcccattgagcagggggcttgcattgcaccccagcctgacagcctggcatcttgggataaaagcagcacagccccctaggggctgcccttgctgtgtggcgccaccggcggtggagaacaaggctctattcagcctgtgcccaggaaaggggatcaggggatgcccaggcatggacagtgggtggcagggggggagaggagggctgtctgcttcccagaagtccaaggacacaaatgggtgaggggagagctctccccatagctgggctgcggcccaaccccaccccctcaggctatgccagggggtgttgccaggggcacccgggcatcgccagtctagcccactccttcataaagccctcgcatcccaggagcgagcagagccagagcaggttggagaggagacgcatcacctccgctgctcgcggggatcctctagaagcttcgtttagtgaaccgtcagatcgcctggagacgccatccacgctgttttgacctccatagaagacaccgggaccgatccagcctccgcggattcgaatcccggccgggaacggtgcattggaacgcggattccccgtgccaagagtgacgtaagtaccgcctatagagtctataggcccacaaaaaatgctttcttcttttaatatacttttttgtttatcttatttctaatactttccctaatctctttctttcagggcaataatgatacaatgtatcatgcctctttgcaccattctaaagaataacagtgataatttctgggttaaggcaatagcaatatttctgcatataaatatttctgcatataaattgtaactgatgtaagaggtttcatattgctaatagcagctacaatccagctaccattctgcttttattttatggttgggataaggctggattattctgagtccaagctaggcccttttgctaatcatgttcatacctcttatcttcctcccacagctcctgggcaacgtgctggtctgtgtgctggcccatcactttggcaaagaattgggattcgaaccggtgccgccaccatgaacttcgggctcagcttgattttccttgtccttgttttaaaaggtgtccagtgtcaggtgcagctgcagcagagcgacgccgagctggtgaaacctggggccagcgtcaagatcagctgcaaggcctccggctacaccttcaccgaccgcaccatccactgggtgaagcagcggcccgagcaggggctggagtggatcgggtacatctaccccggggacggctccaccaagtacaacgagaacttcaagggcaaagccaccctgacggccgacaagtccagcagcaccgcctacatgcagctgaacagcctgaccagcgaggacagcgccgtgtacttctgcgcccggcggggggctatggactactggggccagggcacctccgtgaccgtgtcctccgccaaaacgacacccccatctgtctatccactggcccctggatctgctgcccaaactaactccatggtgaccctgggatgcctggtcaagggctatttccctgagccagtgacagtgacctggaactctggatccctgtccagcggtgtgcacaccttcccagctgtcctgcagtctgacctctacactctgagcagctcagtgactgtcccctccagcacctggcccagcgagaccgtcacctgcaacgttgcccacccggccagcagcaccaaggtggacaagaaaattgtgcccagggattgtggttgtaagccttgcatatgtacagtcccagaagtatcatctgtcttcatcttccccccaaagcccaaggatgtgctcaccattactctgactcctaaggtcacgtgtgttgtggtagacatcagcaaggatgatcccgaggtccagttcagctggtttgtagatgatgtggaggtgcacacagctcagacgcaaccccgggaggagcagttcaacagcactttccgctcagtcagtgaacttcccatcatgcaccaggactggctcaatggcaaggagttcaaatgcagggtcaacagtgcagctttccctgcccccatcgagaaaaccatctccaaaaccaaaggcagaccgaaggctccacaggtgtacaccattccacctcccaaggagcagatggccaaggataaagtcagtctgacctgcatgataacagacttcttccctgaagacattactgtggagtggcagtggaatgggcagccagcggagaactacaagaacactcagcccatcatggacacagatggctcttacttcgtctacagcaagctcaatgtgcagaagagcaactgggaggcaggaaatactttcacctgctctgtgttacatgagggcctgcacaaccaccatactgagaagagcctctcccactctcctggtcgggccaagcggggaagcggagtgaaacagactttgaattttgaccttctcaagttggcgggagacgtggagtccaaccctggacctatgaagttgcctgttaggctgttggtgctgatgttctggattcctgcttccagcagtgacgtgcagatgatccagagccccagcagcctgagcgcctcgctgggggacatcgtgaccatgacctgccaggcctcccagggcaccagcatcaacctcaactggttccagcagaagcccggcaaggcccccaagctcctcatctacggggccagcaacctggaggacggcgtgccctcccgcttcagcggctcccgctacggcacggacttcacgctgaccatctcctccctggaggacgaggacatggccacctacttctgcctgcagcacacctacctgcccttcaccttcggcagcgggaccaagctggagatcaagcgggctgatgctgcaccaactgtatccatcttcccaccatccagtgagcagttaacatctggaggtgcctcagtcgtgtgcttcttgaacaacttctaccccaaagacatcaatgtcaagtggaagattgatggcagtgaacgacaaaatggcgtcctgaacagttggactgatcaggacagcaaagacagcacctacagcatgagcagcaccctcacgttgaccaaggacgagtatgaacgacataacagctatacctgtgaggccactcacaagacatcaacttcacccattgtcaagagcttcaacaggaatgagtgttagtaactcgaggacggggtgaactacgcctgaggatccgatctttttccctctgccaaaaattatggggacatcatgaagccccttgagcatctgacttctggctaataaaggaaatttattttcattgcaatagtgtgttggaattttttgtgtctctcactcggcctaggtagataagtagcatggcgggttaatcattaactacaaggaacccctagtgatggagttggccactccctctctgcgcgctcgctcgctcactgaggccgggcgaccaaaggtcgcccgacgcccgggctttgcccgggcggcctcagtgagcgagcgagcgcgcag

SEQ ID NO: 2141 - DNA, 3878 bp, Artificial Sequence
  Description of Artificial Sequence: Synthetic polynucleotide
ctgcgcgctcgctcgctcactgaggccgcccgggcaaagcccgggcgtcgggcgacctttggtcgcccggcctcagtgagcgagcgagcgcgcagagagggagtggccaactccatcactaggggttccttgtagttaatgattaacccgccatgctacttatctaccagggtaatggggatcctctagaactatagctagtcgacataacgcgttagtatctgcagagggccctgcgtatgagtgcaagtgggttttaggaccaggatgaggcggggtgggggtgcctacctgacgaccgaccccgacccactggacaagcacccaacccccattccccaaattgcgcatcccctatcagagagggggaggggaaacaggatgcggcgaggcgcgtgcgcactgccagcttcagcaccgcggacagtgccttcgcccccgcctggcggcgcgcgccaccgccgcctcagcactgaaggcgcgctgacgtcactcgccggtcccccgcaaactccccttcccggccaccttggtcgcgtccgcgccgccgccggcccagccggaccgcaccacgcgaggcgcgagataggggggcacgggcgcgaccatctgcgctgcggcgccggcgactcagcgctgcctcagtctgcggtgggcagcggaggagtcgtgtcgtgcctgagagcgcagctgtgctcctgggcaccgcgcagtccgcccccgcggctcctggccagaccacccctaggaccccctgccccaagtcgcagccaagcttcgtttagtgaaccgtcagatcgcctggagacgccatccacgctgttttgacctccatagaagacaccgggaccgatccagcctccgcggattcgaatcccggccgggaacggtgcattggaacgcggattccccgtgccaagagtgacgtaagtaccgcctatagagtctataggcccacaaaaaatgctttcttcttttaatatacttttttgtttatcttatttctaatactttccctaatctctttctttcagggcaataatgatacaatgtatcatgcctctttgcaccattctaaagaataacagtgataatttctgggttaaggcaatagcaatatttctgcatataaatatttctgcatataaattgtaactgatgtaagaggtttcatattgctaatagcagctacaatccagctaccattctgcttttattttatggttgggataaggctggattattctgagtccaagctaggcccttttgctaatcatgttcatacctcttatcttcctcccacagctcctgggcaacgtgctggtctgtgtgctggcccatcactttggcaaagaattgggattcgaaccggtgccgccaccatgaacttcgggctcagcttgattttccttgtccttgttttaaaaggtgtccagtgtcaggtgcagctgcagcagagcgacgccgagctggtgaaacctggggccagcgtcaagatcagctgcaaggcctccggctacaccttcaccgaccgcaccatccactgggtgaagcagcggcccgagcaggggctggagtggatcgggtacatctaccccggggacggctccaccaagtacaacgagaacttcaagggcaaagccaccctgacggccgacaagtccagcagcaccgcctacatgcagctgaacagcctgaccagcgaggacagcgccgtgtacttctgcgcccggcggggggctatggactactggggccagggcacctccgtgaccgtgtcctccgccaaaacgacacccccatctgtctatccactggcccctggatctgctgcccaaactaactccatggtgaccctgggatgcctggtcaagggctatttccctgagccagtgacagtgacctggaactctggatccctgtccagcggtgtgcacaccttcccagctgtcctgcagtctgacctctacactctgagcagctcagtgactgtcccctccagcacctggcccagcgagaccgtcacctgcaacgttgcccacccggccagcagcaccaaggtggacaagaaaattgtgcccagggattgtggttgtaagccttgcatatgtacagtcccagaagtatcatctgtcttcatcttccccccaaagcccaaggatgtgctcaccattactctgactcctaaggtcacgtgtgttgtggtagacatcagcaaggatgatcccgaggtccagttcagctggtttgtagatgatgtggaggtgcacacagctcagacgcaaccccgggaggagcagttcaacagcactttccgctcagtcagtgaacttcccatcatgcaccaggactggctcaatggcaaggagttcaaatgcagggtcaacagtgcagctttccctgcccccatcgagaaaaccatctccaaaaccaaaggcagaccgaaggctccacaggtgtacaccattccacctcccaaggagcagatggccaaggataaagtcagtctgacctgcatgataacagacttcttccctgaagacattactgtggagtggcagtggaatgggcagccagcggagaactacaagaacactcagcccatcatggacacagatggctcttacttcgtctacagcaagctcaatgtgcagaagagcaactgggaggcaggaaatactttcacctgctctgtgttacatgagggcctgcacaaccaccatactgagaagagcctctcccactctcctggtcgggccaagcggggaagcggagtgaaacagactttgaattttgaccttctcaagttggcgggagacgtggagtccaaccctggacctatgaagttgcctgttaggctgttggtgctgatgttctggattcctgcttccagcagtgacgtgcagatgatccagagccccagcagcctgagcgcctcgctgggggacatcgtgaccatgacctgccaggcctcccagggcaccagcatcaacctcaactggttccagcagaagcccggcaaggcccccaagctcctcatctacggggccagcaacctggaggacggcgtgccctcccgcttcagcggctcccgctacggcacggacttcacgctgaccatctcctccctggaggacgaggacatggccacctacttctgcctgcagcacacctacctgcccttcaccttcggcagcgggaccaagctggagatcaagcgggctgatgctgcaccaactgtatccatcttcccaccatccagtgagcagttaacatctggaggtgcctcagtcgtgtgcttcttgaacaacttctaccccaaagacatcaatgtcaagtggaagattgatggcagtgaacgacaaaatggcgtcctgaacagttggactgatcaggacagcaaagacagcacctacagcatgagcagcaccctcacgttgaccaaggacgagtatgaacgacataacagctatacctgtgaggccactcacaagacatcaacttcacccattgtcaagagcttcaacaggaatgagtgttagtaactcgaggacggggtgaactacgcctgaggatccgatctttttccctctgccaaaaattatggggacatcatgaagccccttgagcatctgacttctggctaataaaggaaatttattttcattgcaatagtgtgttggaattttttgtgtctctcactcggcctaggtagataagtagcatggcgggttaatcattaactacaaggaacccctagtgatggagttggccactccctctctgcgcgctcgctcgctcactgaggccgggcgaccaaaggtcgcccgacgcccgggctttgcccgggcggcctcagtgagcgagcgagcgcgcag

SEQ ID NO: 2142 - DNA, 3950 bp, Artificial Sequence
  Description of Artificial Sequence: Synthetic polynucleotide
ctgcgcgctcgctcgctcactgaggccgcccgggcaaagcccgggcgtcgggcgacctttggtcgcccggcctcagtgagcgagcgagcgcgcagagagggagtggccaactccatcactaggggttccttgtagttaatgattaacccgccatgctacttatctaccagggtaatggggatcctctagaactatagctagtcgacattgattattgactagttattaatagtaatcaattacggggtcattagttcatagcccatatatggagttccgcgttacataacttacggtaaatggcccgcctggctgaccgcccaacgacccccgcccattgacgtcaataatgacgtatgttcccatagtaacgccaatagggactttccattgacgtcaatgggtggagtatttacggtaaactgcccacttggcagtacatcaagtgtatcatatgccaagtacgccccctattgacgtcaatgacggtaaatggcccgcctggcattatgcccagtacatgaccttatgggactttcctacttggcagtacatctacgtattagtcatcgctattaccatgtcgaggccacgttctgcttcactctccccatctcccccccctccccacccccaattttgtatttatttattttttaattattttgtgcagcgatgggggcggggggggggggcgcgcgccaggcggggcggggcggggcgaggggcggggcggggcgaggcggagaggtgcggcggcagccaatcagagcggcgcgctccgaaagtttccttttatggcgaggcggcggcggcggcggccctataaaaagcgaagcgcgcggcgggcgggagcaagcttcgtttagtgaaccgtcagatcgcctggagacgccatccacgctgttttgacctccatagaagacaccgggaccgatccagcctccgcggattcgaatcccggccgggaacggtgcattggaacgcggattccccgtgccaagagtgacgtaagtaccgcctatagagtctataggcccacaaaaaatgctttcttcttttaatatacttttttgtttatcttatttctaatactttccctaatctctttctttcagggcaataatgatacaatgtatcatgcctctttgcaccattctaaagaataacagtgataatttctgggttaaggcaatagcaatatttctgcatataaatatttctgcatataaattgtaactgatgtaagaggtttcatattgctaatagcagctacaatccagctaccattctgcttttattttatggttgggataaggctggattattctgagtccaagctaggcccttttgctaatcatgttcatacctcttatcttcctcccacagctcctgggcaacgtgctggtctgtgtgctggcccatcactttggcaaagaattgggattcgaaccggtgccgccaccatgaagttgcctgttaggctgttggtgctgatgttctggattcctgcttccagcagtgacgtgcagatgatccagagccccagcagcctgagcgcctcgctgggggacatcgtgaccatgacctgccaggcctcccagggcaccagcatcaacctcaactggttccagcagaagcccggcaaggcccccaagctcctcatctacggggccagcaacctggaggacggcgtgccctcccgcttcagcggctcccgctacggcacggacttcacgctgaccatctcctccctggaggacgaggacatggccacctacttctgcctgcagcacacctacctgcccttcaccttcggcagcgggaccaagctggagatcaagcgggctgatgctgcaccaactgtatccatcttcccaccatccagtgagcagttaacatctggaggtgcctcagtcgtgtgcttcttgaacaacttctaccccaaagacatcaatgtcaagtggaagattgatggcagtgaacgacaaaatggcgtcctgaacagttggactgatcaggacagcaaagacagcacctacagcatgagcagcaccctcacgttgaccaaggacgagtatgaacgacataacagctatacctgtgaggccactcacaagacatcaacttcacccattgtcaagagcttcaacaggaatgagtgtggaagcggagtgaaacagactttgaattttgaccttctcaagttggcgggagacgtggagtccaaccctggacctatgaacttcgggctcagcttgattttccttgtccttgttttaaaaggtgtccagtgtcaggtgcagctgcagcagagcgacgccgagctggtgaaacctggggccagcgtcaagatcagctgcaaggcctccggctacaccttcaccgaccgcaccatccactgggtgaagcagcggcccgagcaggggctggagtggatcgggtacatctaccccggggacggctccaccaagtacaacgagaacttcaagggcaaagccaccctgacggccgacaagtccagcagcaccgcctacatgcagctgaacagcctgaccagcgaggacagcgccgtgtacttctgcgcccggcggggggctatggactactggggccagggcacctccgtgaccgtgtcctccgccaaaacgacacccccatctgtctatccactggcccctggatctgctgcccaaactaactccatggtgaccctgggatgcctggtcaagggctatttccctgagccagtgacagtgacctggaactctggatccctgtccagcggtgtgcacaccttcccagctgtcctgcagtctgacctctacactctgagcagctcagtgactgtcccctccagcacctggcccagcgagaccgtcacctgcaacgttgcccacccggccagcagcaccaaggtggacaagaaaattgtgcccagggattgtggttgtaagccttgcatatgtacagtcccagaagtatcatctgtcttcatcttccccccaaagcccaaggatgtgctcaccattactctgactcctaaggtcacgtgtgttgtggtagacatcagcaaggatgatcccgaggtccagttcagctggtttgtagatgatgtggaggtgcacacagctcagacgcaaccccgggaggagcagttcaacagcactttccgctcagtcagtgaacttcccatcatgcaccaggactggctcaatggcaaggagttcaaatgcagggtcaacagtgcagctttccctgcccccatcgagaaaaccatctccaaaaccaaaggcagaccgaaggctccacaggtgtacaccattccacctcccaaggagcagatggccaaggataaagtcagtctgacctgcatgataacagacttcttccctgaagacattactgtggagtggcagtggaatgggcagccagcggagaactacaagaacactcagcccatcatggacacagatggctcttacttcgtctacagcaagctcaatgtgcagaagagcaactgggaggcaggaaatactttcacctgctctgtgttacatgagggcctgcacaaccaccatactgagaagagcctctcccactctcctggttagtaactcgaggacggggtgaactacgcctgaggatccgatctttttccctctgccaaaaattatggggacatcatgaagccccttgagcatctgacttctggctaataaaggaaatttattttcattgcaatagtgtgttggaattttttgtgtctctcactcggcctaggtagataagtagcatggcgggttaatcattaactacaaggaacccctagtgatggagttggccactccctctctgcgcgctcgctcgctcactgaggccgggcgaccaaaggtcgcccgacgcccgggctttgcccgggcggcctcagtgagcgagcgagcgcgcag

SEQ ID NO: 2143 - DNA, 4438 bp, Artificial Sequence
  Description of Artificial Sequence: Synthetic polynucleotide
ctgcgcgctcgctcgctcactgaggccgcccgggcaaagcccgggcgtcgggcgacctttggtcgcccggcctcagtgagcgagcgagcgcgcagagagggagtggccaactccatcactaggggttccttgtagttaatgattaacccgccatgctacttatctaccagggtaatggggatcctctagaactatagctagtcgacataacgcgtctagttattaatagtaatcaattacggggtcattagttcatagcccatatatggagttccgcgttacataacttacggtaaatggcccgcctggctgaccgcccaacgacccccgcccattgacgtcaataatgacgtatgttcccatagtaacgccaatagggactttccattgacgtcaatgggtggagtatttacggtaaactgcccacttggcagtacatcaagtgtatcatatgccaagtacgccccctattgacgtcaatgacggtaaatggcccgcctggcattatgcccagtacatgaccttatgggactttcctacttggcagtacatctacgtattagtcatcgctattaccatggtcgaggtgagccccacgttctgcttcactctccccatctcccccccctccccacccccaattttgtatttatttattttttaattattttgtgcagcgatgggggcggggggggggggggggcgcgcgccaggcggggcggggcggggcgaggggcggggcggggcgaggcggagaggtgcggcggcagccaatcagagcggcgcgctccgaaagtttccttttatggcgaggcggcggcggcggcggccctataaaaagcgaagcgcgcggcgggcgggagtcgctgcgcgctgccttcgccccgtgccccgctccgccgccgcctcgcgccgcccgccccggctctgactgaccgcgttactcccacaggtgagcgggcgggacggcccttctcctccgggctgtaattagcgcttggtttaatgacggcttgtttcttttctgtggctgcgtgaaagccttgaggggctccgggagggccctttgtgcggggggagcggctcggggggtgcgtgcgtgtgtgtgtgcgtggggagcgccgcgtgcggctccgcgctgcccggcggctgtgagcgctgcgggcgcggcgcggggctttgtgcgctccgcagtgtgcgcgaggggagcgcggccgggggcggtgccccgcggtgcggggggggctgcgaggggaacaaaggctgcgtgcggggtgtgtgcgtgggggggtgagcagggggtgtgggcgcgtcggtcgggctgcaaccccccctgcacccccctccccgagttgctgagcacggcccggcttcgggtgcggggctccgtacggggcgtggcgcggggctcgccgtgccgggcggggggtggcggcaggtgggggtgccgggcggggcggggccgcctcgggccggggagggctcgggggaggggcgcggcggcccccggagcgccggcggctgtcgaggcgcggcgagccgcagccattgccttttatggtaatcgtgcgagagggcgcagggacttcctttgtcccaaatctgtgcggagccgaaatctgggaggcgccgccgcaccccctctagcgggcgcggggcgaagcggtgcggcgccggcaggaaggaaatgggcggggagggccttcgtgcgtcgccgcgccgccgtccccttctccctctccagcctcggggctgtccgcggggggacggctgccttcgggggggacggggcagggcggggttcggcttctggcgtgtgaccggcggctctagagcctctgctaaccatgttcatgccttcttctttttcctacagctcctgggcaacgtgctggttattgtgctgtctcatcattttggcaaagaattcgggattcgaaccggtgccgccaccatgaagttgcctgttaggctgttggtgctgatgttctggattcctgcttccagcagtgacgtgcagatgatccagagccccagcagcctgagcgcctcgctgggggacatcgtgaccatgacctgccaggcctcccagggcaccagcatcaacctcaactggttccagcagaagcccggcaaggcccccaagctcctcatctacggggccagcaacctggaggacggcgtgccctcccgcttcagcggctcccgctacggcacggacttcacgctgaccatctcctccctggaggacgaggacatggccacctacttctgcctgcagcacacctacctgcccttcaccttcggcagcgggaccaagctggagatcaagcgggctgatgctgcaccaactgtatccatcttcccaccatccagtgagcagttaacatctggaggtgcctcagtcgtgtgcttcttgaacaacttctaccccaaagacatcaatgtcaagtggaagattgatggcagtgaacgacaaaatggcgtcctgaacagttggactgatcaggacagcaaagacagcacctacagcatgagcagcaccctcacgttgaccaaggacgagtatgaacgacataacagctatacctgtgaggccactcacaagacatcaacttcacccattgtcaagagcttcaacaggaatgagtgtggaagcggagtgaaacagactttgaattttgaccttctcaagttggcgggagacgtggagtccaaccctggacctatgaacttcgggctcagcttgattttccttgtccttgttttaaaaggtgtccagtgtcaggtgcagctgcagcagagcgacgccgagctggtgaaacctggggccagcgtcaagatcagctgcaaggcctccggctacaccttcaccgaccgcaccatccactgggtgaagcagcggcccgagcaggggctggagtggatcgggtacatctaccccggggacggctccaccaagtacaacgagaacttcaagggcaaagccaccctgacggccgacaagtccagcagcaccgcctacatgcagctgaacagcctgaccagcgaggacagcgccgtgtacttctgcgcccggcggggggctatggactactggggccagggcacctccgtgaccgtgtcctccgccaaaacgacacccccatctgtctatccactggcccctggatctgctgcccaaactaactccatggtgaccctgggatgcctggtcaagggctatttccctgagccagtgacagtgacctggaactctggatccctgtccagcggtgtgcacaccttcccagctgtcctgcagtctgacctctacactctgagcagctcagtgactgtcccctccagcacctggcccagcgagaccgtcacctgcaacgttgcccacccggccagcagcaccaaggtggacaagaaaattgtgcccagggattgtggttgtaagccttgcatatgtacagtcccagaagtatcatctgtcttcatcttccccccaaagcccaaggatgtgctcaccattactctgactcctaaggtcacgtgtgttgtggtagacatcagcaaggatgatcccgaggtccagttcagctggtttgtagatgatgtggaggtgcacacagctcagacgcaaccccgggaggagcagttcaacagcactttccgctcagtcagtgaacttcccatcatgcaccaggactggctcaatggcaaggagttcaaatgcagggtcaacagtgcagctttccctgcccccatcgagaaaaccatctccaaaaccaaaggcagaccgaaggctccacaggtgtacaccattccacctcccaaggagcagatggccaaggataaagtcagtctgacctgcatgataacagacttcttccctgaagacattactgtggagtggcagtggaatgggcagccagcggagaactacaagaacactcagcccatcatggacacagatggctcttacttcgtctacagcaagctcaatgtgcagaagagcaactgggaggcaggaaatactttcacctgctctgtgttacatgagggcctgcacaaccaccatactgagaagagcctctcccactctcctggttagtaactcgaggacggggtgaactacgcctgaggatccgatctttttccctctgccaaaaattatggggacatcatgaagccccttgagcatctgacttctggctaataaaggaaatttattttcattgcaatagtgtgttggaattttttgtgtctctcactcggcctaggtagataagtagcatggcgggttaatcattaactacaaggaacccctagtgatggagttggccactccctctctgcgcgctcgctcgctcactgaggccgggcgaccaaaggtcgcccgacgcccgggctttgcccgggcggcctcagtgagcgagcgagcgcgcag

SEQ ID NO: 2144 - DNA, 4008 bp, Artificial Sequence
  Description of Artificial Sequence: Synthetic polynucleotide
ctgcgcgctcgctcgctcactgaggccgcccgggcaaagcccgggcgtcgggcgacctttggtcgcccggcctcagtgagcgagcgagcgcgcagagagggagtggccaactccatcactaggggttccttgtagttaatgattaacccgccatgctacttatctaccagggtaatggggatcctctagaactatagctagtcgacataacgcgtgatctaacatatcctggtgtggagtagcggacgctgctatgacagaggctcgggggcctgagctggctctgtgagctggggaggaggcagacagccaggccttgtctgcaagcagacctggcagcattgggctggccgccccccagggcctcctcttcatgcccagtgaatgactcaccttggcacagacacaatgttcggggtgggcacagtgcctgcttcccgccgcaccccagcccccctcaaatgccttccgagaagcccattgagcagggggcttgcattgcaccccagcctgacagcctggcatcttgggataaaagcagcacagccccctaggggctgcccttgctgtgtggcgccaccggcggtggagaacaaggctctattcagcctgtgcccaggaaaggggatcaggggatgcccaggcatggacagtgggtggcagggggggagaggagggctgtctgcttcccagaagtccaaggacacaaatgggtgaggggagagctctccccatagctgggctgcggcccaaccccaccccctcaggctatgccagggggtgttgccaggggcacccgggcatcgccagtctagcccactccttcataaagccctcgcatcccaggagcgagcagagccagagcaggttggagaggagacgcatcacctccgctgctcgcggggatcctctagaagcttcgtttagtgaaccgtcagatcgcctggagacgccatccacgctgttttgacctccatagaagacaccgggaccgatccagcctccgcggattcgaatcccggccgggaacggtgcattggaacgcggattccccgtgccaagagtgacgtaagtaccgcctatagagtctataggcccacaaaaaatgctttcttcttttaatatacttttttgtttatcttatttctaatactttccctaatctctttctttcagggcaataatgatacaatgtatcatgcctctttgcaccattctaaagaataacagtgataatttctgggttaaggcaatagcaatatttctgcatataaatatttctgcatataaattgtaactgatgtaagaggtttcatattgctaatagcagctacaatccagctaccattctgcttttattttatggttgggataaggctggattattctgagtccaagctaggcccttttgctaatcatgttcatacctcttatcttcctcccacagctcctgggcaacgtgctggtctgtgtgctggcccatcactttggcaaagaattgggattcgaaccggtgccgccaccatgaagttgcctgttaggctgttggtgctgatgttctggattcctgcttccagcagtgacgtgcagatgatccagagccccagcagcctgagcgcctcgctgggggacatcgtgaccatgacctgccaggcctcccagggcaccagcatcaacctcaactggttccagcagaagcccggcaaggcccccaagctcctcatctacggggccagcaacctggaggacggcgtgccctcccgcttcagcggctcccgctacggcacggacttcacgctgaccatctcctccctggaggacgaggacatggccacctacttctgcctgcagcacacctacctgcccttcaccttcggcagcgggaccaagctggagatcaagcgggctgatgctgcaccaactgtatccatcttcccaccatccagtgagcagttaacatctggaggtgcctcagtcgtgtgcttcttgaacaacttctaccccaaagacatcaatgtcaagtggaagattgatggcagtgaacgacaaaatggcgtcctgaacagttggactgatcaggacagcaaagacagcacctacagcatgagcagcaccctcacgttgaccaaggacgagtatgaacgacataacagctatacctgtgaggccactcacaagacatcaacttcacccattgtcaagagcttcaacaggaatgagtgtggaagcggagtgaaacagactttgaattttgaccttctcaagttggcgggagacgtggagtccaaccctggacctatgaacttcgggctcagcttgattttccttgtccttgttttaaaaggtgtccagtgtcaggtgcagctgcagcagagcgacgccgagctggtgaaacctggggccagcgtcaagatcagctgcaaggcctccggctacaccttcaccgaccgcaccatccactgggtgaagcagcggcccgagcaggggctggagtggatcgggtacatctaccccggggacggctccaccaagtacaacgagaacttcaagggcaaagccaccctgacggccgacaagtccagcagcaccgcctacatgcagctgaacagcctgaccagcgaggacagcgccgtgtacttctgcgcccggcggggggctatggactactggggccagggcacctccgtgaccgtgtcctccgccaaaacgacacccccatctgtctatccactggcccctggatctgctgcccaaactaactccatggtgaccctgggatgcctggtcaagggctatttccctgagccagtgacagtgacctggaactctggatccctgtccagcggtgtgcacaccttcccagctgtcctgcagtctgacctctacactctgagcagctcagtgactgtcccctccagcacctggcccagcgagaccgtcacctgcaacgttgcccacccggccagcagcaccaaggtggacaagaaaattgtgcccagggattgtggttgtaagccttgcatatgtacagtcccagaagtatcatctgtcttcatcttccccccaaagcccaaggatgtgctcaccattactctgactcctaaggtcacgtgtgttgtggtagacatcagcaaggatgatcccgaggtccagttcagctggtttgtagatgatgtggaggtgcacacagctcagacgcaaccccgggaggagcagttcaacagcactttccgctcagtcagtgaacttcccatcatgcaccaggactggctcaatggcaaggagttcaaatgcagggtcaacagtgcagctttccctgcccccatcgagaaaaccatctccaaaaccaaaggcagaccgaaggctccacaggtgtacaccattccacctcccaaggagcagatggccaaggataaagtcagtctgacctgcatgataacagacttcttccctgaagacattactgtggagtggcagtggaatgggcagccagcggagaactacaagaacactcagcccatcatggacacagatggctcttacttcgtctacagcaagctcaatgtgcagaagagcaactgggaggcaggaaatactttcacctgctctgtgttacatgagggcctgcacaaccaccatactgagaagagcctctcccactctcctggttagtaactcgaggacggggtgaactacgcctgaggatccgatctttttccctctgccaaaaattatggggacatcatgaagccccttgagcatctgacttctggctaataaaggaaatttattttcattgcaatagtgtgttggaattttttgtgtctctcactcggcctaggtagataagtagcatggcgggttaatcattaactacaaggaacccctagtgatggagttggccactccctctctgcgcgctcgctcgctcactgaggccgggcgaccaaaggtcgcccgacgcccgggctttgcccgggcggcctcagtgagcgagcgagcgcgcag

SEQ ID NO: 2145 - DNA, 3866 bp, Artificial Sequence
  Description of Artificial Sequence: Synthetic polynucleotide
ctgcgcgctcgctcgctcactgaggccgcccgggcaaagcccgggcgtcgggcgacctttggtcgcccggcctcagtgagcgagcgagcgcgcagagagggagtggccaactccatcactaggggttccttgtagttaatgattaacccgccatgctacttatctaccagggtaatggggatcctctagaactatagctagtcgacataacgcgttagtatctgcagagggccctgcgtatgagtgcaagtgggttttaggaccaggatgaggcggggtgggggtgcctacctgacgaccgaccccgacccactggacaagcacccaacccccattccccaaattgcgcatcccctatcagagagggggaggggaaacaggatgcggcgaggcgcgtgcgcactgccagcttcagcaccgcggacagtgccttcgcccccgcctggcggcgcgcgccaccgccgcctcagcactgaaggcgcgctgacgtcactcgccggtcccccgcaaactccccttcccggccaccttggtcgcgtccgcgccgccgccggcccagccggaccgcaccacgcgaggcgcgagataggggggcacgggcgcgaccatctgcgctgcggcgccggcgactcagcgctgcctcagtctgcggtgggcagcggaggagtcgtgtcgtgcctgagagcgcagctgtgctcctgggcaccgcgcagtccgcccccgcggctcctggccagaccacccctaggaccccctgccccaagtcgcagccaagcttcgtttagtgaaccgtcagatcgcctggagacgccatccacgctgttttgacctccatagaagacaccgggaccgatccagcctccgcggattcgaatcccggccgggaacggtgcattggaacgcggattccccgtgccaagagtgacgtaagtaccgcctatagagtctataggcccacaaaaaatgctttcttcttttaatatacttttttgtttatcttatttctaatactttccctaatctctttctttcagggcaataatgatacaatgtatcatgcctctttgcaccattctaaagaataacagtgataatttctgggttaaggcaatagcaatatttctgcatataaatatttctgcatataaattgtaactgatgtaagaggtttcatattgctaatagcagctacaatccagctaccattctgcttttattttatggttgggataaggctggattattctgagtccaagctaggcccttttgctaatcatgttcatacctcttatcttcctcccacagctcctgggcaacgtgctggtctgtgtgctggcccatcactttggcaaagaattgggattcgaaccggtgccgccaccatgaagttgcctgttaggctgttggtgctgatgttctggattcctgcttccagcagtgacgtgcagatgatccagagccccagcagcctgagcgcctcgctgggggacatcgtgaccatgacctgccaggcctcccagggcaccagcatcaacctcaactggttccagcagaagcccggcaaggcccccaagctcctcatctacggggccagcaacctggaggacggcgtgccctcccgcttcagcggctcccgctacggcacggacttcacgctgaccatctcctccctggaggacgaggacatggccacctacttctgcctgcagcacacctacctgcccttcaccttcggcagcgggaccaagctggagatcaagcgggctgatgctgcaccaactgtatccatcttcccaccatccagtgagcagttaacatctggaggtgcctcagtcgtgtgcttcttgaacaacttctaccccaaagacatcaatgtcaagtggaagattgatggcagtgaacgacaaaatggcgtcctgaacagttggactgatcaggacagcaaagacagcacctacagcatgagcagcaccctcacgttgaccaaggacgagtatgaacgacataacagctatacctgtgaggccactcacaagacatcaacttcacccattgtcaagagcttcaacaggaatgagtgtggaagcggagtgaaacagactttgaattttgaccttctcaagttggcgggagacgtggagtccaaccctggacctatgaacttcgggctcagcttgattttccttgtccttgttttaaaaggtgtccagtgtcaggtgcagctgcagcagagcgacgccgagctggtgaaacctggggccagcgtcaagatcagctgcaaggcctccggctacaccttcaccgaccgcaccatccactgggtgaagcagcggcccgagcaggggctggagtggatcgggtacatctaccccggggacggctccaccaagtacaacgagaacttcaagggcaaagccaccctgacggccgacaagtccagcagcaccgcctacatgcagctgaacagcctgaccagcgaggacagcgccgtgtacttctgcgcccggcggggggctatggactactggggccagggcacctccgtgaccgtgtcctccgccaaaacgacacccccatctgtctatccactggcccctggatctgctgcccaaactaactccatggtgaccctgggatgcctggtcaagggctatttccctgagccagtgacagtgacctggaactctggatccctgtccagcggtgtgcacaccttcccagctgtcctgcagtctgacctctacactctgagcagctcagtgactgtcccctccagcacctggcccagcgagaccgtcacctgcaacgttgcccacccggccagcagcaccaaggtggacaagaaaattgtgcccagggattgtggttgtaagccttgcatatgtacagtcccagaagtatcatctgtcttcatcttccccccaaagcccaaggatgtgctcaccattactctgactcctaaggtcacgtgtgttgtggtagacatcagcaaggatgatcccgaggtccagttcagctggtttgtagatgatgtggaggtgcacacagctcagacgcaaccccgggaggagcagttcaacagcactttccgctcagtcagtgaacttcccatcatgcaccaggactggctcaatggcaaggagttcaaatgcagggtcaacagtgcagctttccctgcccccatcgagaaaaccatctccaaaaccaaaggcagaccgaaggctccacaggtgtacaccattccacctcccaaggagcagatggccaaggataaagtcagtctgacctgcatgataacagacttcttccctgaagacattactgtggagtggcagtggaatgggcagccagcggagaactacaagaacactcagcccatcatggacacagatggctcttacttcgtctacagcaagctcaatgtgcagaagagcaactgggaggcaggaaatactttcacctgctctgtgttacatgagggcctgcacaaccaccatactgagaagagcctctcccactctcctggttagtaactcgaggacggggtgaactacgcctgaggatccgatctttttccctctgccaaaaattatggggacatcatgaagccccttgagcatctgacttctggctaataaaggaaatttattttcattgcaatagtgtgttggaattttttgtgtctctcactcggcctaggtagataagtagcatggcgggttaatcattaactacaaggaacccctagtgatggagttggccactccctctctgcgcgctcgctcgctcactgaggccgggcgaccaaaggtcgcccgacgcccgggctttgcccgggcggcctcagtgagcgagcgagcgcgcag

SEQ ID NO: 2146 - DNA, 3941 bp, Artificial Sequence
  Description of Artificial Sequence: Synthetic polynucleotide
ctgcgcgctcgctcgctcactgaggccgcccgggcaaagcccgggcgtcgggcgacctttggtcgcccggcctcagtgagcgagcgagcgcgcagagagggagtggccaactccatcactaggggttccttgtagttaatgattaacccgccatgctacttatctaccagggtaatggggatcctctagaactatagctagtcgacattgattattgactagttattaatagtaatcaattacggggtcattagttcatagcccatatatggagttccgcgttacataacttacggtaaatggcccgcctggctgaccgcccaacgacccccgcccattgacgtcaataatgacgtatgttcccatagtaacgccaatagggactttccattgacgtcaatgggtggagtatttacggtaaactgcccacttggcagtacatcaagtgtatcatatgccaagtacgccccctattgacgtcaatgacggtaaatggcccgcctggcattatgcccagtacatgaccttatgggactttcctacttggcagtacatctacgtattagtcatcgctattaccatgtcgaggccacgttctgcttcactctccccatctcccccccctccccacccccaattttgtatttatttattttttaattattttgtgcagcgatgggggcggggggggggggcgcgcgccaggcggggcggggcggggcgaggggcggggcggggcgaggcggagaggtgcggcggcagccaatcagagcggcgcgctccgaaagtttccttttatggcgaggcggcggcggcggcggccctataaaaagcgaagcgcgcggcgggcgggagcaagcttcgtttagtgaaccgtcagatcgcctggagacgccatccacgctgttttgacctccatagaagacaccgggaccgatccagcctccgcggattcgaatcccggccgggaacggtgcattggaacgcggattccccgtgccaagagtgacgtaagtaccgcctatagagtctataggcccacaaaaaatgctttcttcttttaatatacttttttgtttatcttatttctaatactttccctaatctctttctttcagggcaataatgatacaatgtatcatgcctctttgcaccattctaaagaataacagtgataatttctgggttaaggcaatagcaatatttctgcatataaatatttctgcatataaattgtaactgatgtaagaggtttcatattgctaatagcagctacaatccagctaccattctgcttttattttatggttgggataaggctggattattctgagtccaagctaggcccttttgctaatcatgttcatacctcttatcttcctcccacagctcctgggcaacgtgctggtctgtgtgctggcccatcactttggcaaagaattgggattcgaaccggtgccgccaccatgaacttcgggctcagcttgattttccttgtccttgttttaaaaggtgtccagtgtcaggtgcagctgcagcagagcgacgccgagctggtgaaacctggggccagcgtcaagatcagctgcaaggcctccggctacaccttcaccgaccgcaccatccactgggtgaagcagcggcccgagcaggggctggagtggatcgggtacatctaccccggggacggctccaccaagtacaacgagaacttcaagggcaaagccaccctgacggccgacaagtccagcagcaccgcctacatgcagctgaacagcctgaccagcgaggacagcgccgtgtacttctgcgcccggcggggggctatggactactggggccagggcacctccgtgaccgtgtcctccgccaaaacgacacccccatctgtctatccactggcccctggatctgctgcccaaactaactccatggtgaccctgggatgcctggtcaagggctatttccctgagccagtgacagtgacctggaactctggatccctgtccagcggtgtgcacaccttcccagctgtcctgcagtctgacctctacactctgagcagctcagtgactgtcccctccagcacctggcccagcgagaccgtcacctgcaacgttgcccacccggccagcagcaccaaggtggacaagaaaattgtgcccagggattgtggttgtaagccttgcatatgtacagtcccagaagtatcatctgtcttcatcttccccccaaagcccaaggatgtgctcaccattactctgactcctaaggtcacgtgtgttgtggtagacatcagcaaggatgatcccgaggtccagttcagctggtttgtagatgatgtggaggtgcacacagctcagacgcaaccccgggaggagcagttcaacagcactttccgctcagtcagtgaacttcccatcatgcaccaggactggctcaatggcaaggagttcaaatgcagggtcaacagtgcagctttccctgcccccatcgagaaaaccatctccaaaaccaaaggcagaccgaaggctccacaggtgtacaccattccacctcccaaggagcagatggccaaggataaagtcagtctgacctgcatgataacagacttcttccctgaagacattactgtggagtggcagtggaatgggcagccagcggagaactacaagaacactcagcccatcatggacacagatggctcttacttcgtctacagcaagctcaatgtgcagaagagcaactgggaggcaggaaatactttcacctgctctgtgttacatgagggcctgcacaaccaccatactgagaagagcctctcccactctcctggtagaaagaggcgagagggcagaggaagtcttctaacatgcggtgacgtggaggagaatcccggccctatgaagttgcctgttaggctgttggtgctgatgttctggattcctgcttccagcagtgacgtgcagatgatccagagccccagcagcctgagcgcctcgctgggggacatcgtgaccatgacctgccaggcctcccagggcaccagcatcaacctcaactggttccagcagaagcccggcaaggcccccaagctcctcatctacggggccagcaacctggaggacggcgtgccctcccgcttcagcggctcccgctacggcacggacttcacgctgaccatctcctccctggaggacgaggacatggccacctacttctgcctgcagcacacctacctgcccttcaccttcggcagcgggaccaagctggagatcaagcgggctgatgctgcaccaactgtatccatcttcccaccatccagtgagcagttaacatctggaggtgcctcagtcgtgtgcttcttgaacaacttctaccccaaagacatcaatgtcaagtggaagattgatggcagtgaacgacaaaatggcgtcctgaacagttggactgatcaggacagcaaagacagcacctacagcatgagcagcaccctcacgttgaccaaggacgagtatgaacgacataacagctatacctgtgaggccactcacaagacatcaacttcacccattgtcaagagcttcaacaggaatgagtgttagtaactcgaggacggggtgaactacgcctgaggatccgatctttttccctctgccaaaaattatggggacatcatgaagccccttgagcatctgacttctggctaataaaggaaatttattttcattgcaatagtgtgttggaattttttgtgtctctcactcggcctaggtagataagtagcatggcgggttaatcattaactacaaggaacccctagtgatggagttggccactccctctctgcgcgctcgctcgctcactgaggccgggcgaccaaaggtcgcccgacgcccgggctttgcccgggcggcctcagtgagcgagcgagcgcgcag

SEQ ID NO: 2147 - DNA, 4429 bp, Artificial Sequence
  Description of Artificial Sequence: Synthetic polynucleotide
ctgcgcgctcgctcgctcactgaggccgcccgggcaaagcccgggcgtcgggcgacctttggtcgcccggcctcagtgagcgagcgagcgcgcagagagggagtggccaactccatcactaggggttccttgtagttaatgattaacccgccatgctacttatctaccagggtaatggggatcctctagaactatagctagtcgacataacgcgtctagttattaatagtaatcaattacggggtcattagttcatagcccatatatggagttccgcgttacataacttacggtaaatggcccgcctggctgaccgcccaacgacccccgcccattgacgtcaataatgacgtatgttcccatagtaacgccaatagggactttccattgacgtcaatgggtggagtatttacggtaaactgcccacttggcagtacatcaagtgtatcatatgccaagtacgccccctattgacgtcaatgacggtaaatggcccgcctggcattatgcccagtacatgaccttatgggactttcctacttggcagtacatctacgtattagtcatcgctattaccatggtcgaggtgagccccacgttctgcttcactctccccatctcccccccctccccacccccaattttgtatttatttattttttaattattttgtgcagcgatgggggcggggggggggggggggcgcgcgccaggcggggcggggcggggcgaggggcggggcggggcgaggcggagaggtgcggcggcagccaatcagagcggcgcgctccgaaagtttccttttatggcgaggcggcggcggcggcggccctataaaaagcgaagcgcgcggcgggcgggagtcgctgcgcgctgccttcgccccgtgccccgctccgccgccgcctcgcgccgcccgccccggctctgactgaccgcgttactcccacaggtgagcgggcgggacggcccttctcctccgggctgtaattagcgcttggtttaatgacggcttgtttcttttctgtggctgcgtgaaagccttgaggggctccgggagggccctttgtgcggggggagcggctcggggggtgcgtgcgtgtgtgtgtgcgtggggagcgccgcgtgcggctccgcgctgcccggcggctgtgagcgctgcgggcgcggcgcggggctttgtgcgctccgcagtgtgcgcgaggggagcgcggccgggggcggtgccccgcggtgcggggggggctgcgaggggaacaaaggctgcgtgcggggtgtgtgcgtgggggggtgagcagggggtgtgggcgcgtcggtcgggctgcaaccccccctgcacccccctccccgagttgctgagcacggcccggcttcgggtgcggggctccgtacggggcgtggcgcggggctcgccgtgccgggcggggggtggcggcaggtgggggtgccgggcggggcggggccgcctcgggccggggagggctcgggggaggggcgcggcggcccccggagcgccggcggctgtcgaggcgcggcgagccgcagccattgccttttatggtaatcgtgcgagagggcgcagggacttcctttgtcccaaatctgtgcggagccgaaatctgggaggcgccgccgcaccccctctagcgggcgcggggcgaagcggtgcggcgccggcaggaaggaaatgggcggggagggccttcgtgcgtcgccgcgccgccgtccccttctccctctccagcctcggggctgtccgcggggggacggctgccttcgggggggacggggcagggcggggttcggcttctggcgtgtgaccggcggctctagagcctctgctaaccatgttcatgccttcttctttttcctacagctcctgggcaacgtgctggttattgtgctgtctcatcattttggcaaagaattcgggattcgaaccggtgccgccaccatgaacttcgggctcagcttgattttccttgtccttgttttaaaaggtgtccagtgtcaggtgcagctgcagcagagcgacgccgagctggtgaaacctggggccagcgtcaagatcagctgcaaggcctccggctacaccttcaccgaccgcaccatccactgggtgaagcagcggcccgagcaggggctggagtggatcgggtacatctaccccggggacggctccaccaagtacaacgagaacttcaagggcaaagccaccctgacggccgacaagtccagcagcaccgcctacatgcagctgaacagcctgaccagcgaggacagcgccgtgtacttctgcgcccggcggggggctatggactactggggccagggcacctccgtgaccgtgtcctccgccaaaacgacacccccatctgtctatccactggcccctggatctgctgcccaaactaactccatggtgaccctgggatgcctggtcaagggctatttccctgagccagtgacagtgacctggaactctggatccctgtccagcggtgtgcacaccttcccagctgtcctgcagtctgacctctacactctgagcagctcagtgactgtcccctccagcacctggcccagcgagaccgtcacctgcaacgttgcccacccggccagcagcaccaaggtggacaagaaaattgtgcccagggattgtggttgtaagccttgcatatgtacagtcccagaagtatcatctgtcttcatcttccccccaaagcccaaggatgtgctcaccattactctgactcctaaggtcacgtgtgttgtggtagacatcagcaaggatgatcccgaggtccagttcagctggtttgtagatgatgtggaggtgcacacagctcagacgcaaccccgggaggagcagttcaacagcactttccgctcagtcagtgaacttcccatcatgcaccaggactggctcaatggcaaggagttcaaatgcagggtcaacagtgcagctttccctgcccccatcgagaaaaccatctccaaaaccaaaggcagaccgaaggctccacaggtgtacaccattccacctcccaaggagcagatggccaaggataaagtcagtctgacctgcatgataacagacttcttccctgaagacattactgtggagtggcagtggaatgggcagccagcggagaactacaagaacactcagcccatcatggacacagatggctcttacttcgtctacagcaagctcaatgtgcagaagagcaactgggaggcaggaaatactttcacctgctctgtgttacatgagggcctgcacaaccaccatactgagaagagcctctcccactctcctggtagaaagaggcgagagggcagaggaagtcttctaacatgcggtgacgtggaggagaatcccggccctatgaagttgcctgttaggctgttggtgctgatgttctggattcctgcttccagcagtgacgtgcagatgatccagagccccagcagcctgagcgcctcgctgggggacatcgtgaccatgacctgccaggcctcccagggcaccagcatcaacctcaactggttccagcagaagcccggcaaggcccccaagctcctcatctacggggccagcaacctggaggacggcgtgccctcccgcttcagcggctcccgctacggcacggacttcacgctgaccatctcctccctggaggacgaggacatggccacctacttctgcctgcagcacacctacctgcccttcaccttcggcagcgggaccaagctggagatcaagcgggctgatgctgcaccaactgtatccatcttcccaccatccagtgagcagttaacatctggaggtgcctcagtcgtgtgcttcttgaacaacttctaccccaaagacatcaatgtcaagtggaagattgatggcagtgaacgacaaaatggcgtcctgaacagttggactgatcaggacagcaaagacagcacctacagcatgagcagcaccctcacgttgaccaaggacgagtatgaacgacataacagctatacctgtgaggccactcacaagacatcaacttcacccattgtcaagagcttcaacaggaatgagtgttagtaactcgaggacggggtgaactacgcctgaggatccgatctttttccctctgccaaaaattatggggacatcatgaagccccttgagcatctgacttctggctaataaaggaaatttattttcattgcaatagtgtgttggaattttttgtgtctctcactcggcctaggtagataagtagcatggcgggttaatcattaactacaaggaacccctagtgatggagttggccactccctctctgcgcgctcgctcgctcactgaggccgggcgaccaaaggtcgcccgacgcccgggctttgcccgggcggcctcagtgagcgagcgagcgcgcag

SEQ ID NO: 2148 - DNA, 3999 bp, Artificial Sequence
  Description of Artificial Sequence: Synthetic polynucleotide
ctgcgcgctcgctcgctcactgaggccgcccgggcaaagcccgggcgtcgggcgacctttggtcgcccggcctcagtgagcgagcgagcgcgcagagagggagtggccaactccatcactaggggttccttgtagttaatgattaacccgccatgctacttatctaccagggtaatggggatcctctagaactatagctagtcgacataacgcgtgatctaacatatcctggtgtggagtagcggacgctgctatgacagaggctcgggggcctgagctggctctgtgagctggggaggaggcagacagccaggccttgtctgcaagcagacctggcagcattgggctggccgccccccagggcctcctcttcatgcccagtgaatgactcaccttggcacagacacaatgttcggggtgggcacagtgcctgcttcccgccgcaccccagcccccctcaaatgccttccgagaagcccattgagcagggggcttgcattgcaccccagcctgacagcctggcatcttgggataaaagcagcacagccccctaggggctgcccttgctgtgtggcgccaccggcggtggagaacaaggctctattcagcctgtgcccaggaaaggggatcaggggatgcccaggcatggacagtgggtggcagggggggagaggagggctgtctgcttcccagaagtccaaggacacaaatgggtgaggggagagctctccccatagctgggctgcggcccaaccccaccccctcaggctatgccagggggtgttgccaggggcacccgggcatcgccagtctagcccactccttcataaagccctcgcatcccaggagcgagcagagccagagcaggttggagaggagacgcatcacctccgctgctcgcggggatcctctagaagcttcgtttagtgaaccgtcagatcgcctggagacgccatccacgctgttttgacctccatagaagacaccgggaccgatccagcctccgcggattcgaatcccggccgggaacggtgcattggaacgcggattccccgtgccaagagtgacgtaagtaccgcctatagagtctataggcccacaaaaaatgctttcttcttttaatatacttttttgtttatcttatttctaatactttccctaatctctttctttcagggcaataatgatacaatgtatcatgcctctttgcaccattctaaagaataacagtgataatttctgggttaaggcaatagcaatatttctgcatataaatatttctgcatataaattgtaactgatgtaagaggtttcatattgctaatagcagctacaatccagctaccattctgcttttattttatggttgggataaggctggattattctgagtccaagctaggcccttttgctaatcatgttcatacctcttatcttcctcccacagctcctgggcaacgtgctggtctgtgtgctggcccatcactttggcaaagaattgggattcgaaccggtgccgccaccatgaacttcgggctcagcttgattttccttgtccttgttttaaaaggtgtccagtgtcaggtgcagctgcagcagagcgacgccgagctggtgaaacctggggccagcgtcaagatcagctgcaaggcctccggctacaccttcaccgaccgcaccatccactgggtgaagcagcggcccgagcaggggctggagtggatcgggtacatctaccccggggacggctccaccaagtacaacgagaacttcaagggcaaagccaccctgacggccgacaagtccagcagcaccgcctacatgcagctgaacagcctgaccagcgaggacagcgccgtgtacttctgcgcccggcggggggctatggactactggggccagggcacctccgtgaccgtgtcctccgccaaaacgacacccccatctgtctatccactggcccctggatctgctgcccaaactaactccatggtgaccctgggatgcctggtcaagggctatttccctgagccagtgacagtgacctggaactctggatccctgtccagcggtgtgcacaccttcccagctgtcctgcagtctgacctctacactctgagcagctcagtgactgtcccctccagcacctggcccagcgagaccgtcacctgcaacgttgcccacccggccagcagcaccaaggtggacaagaaaattgtgcccagggattgtggttgtaagccttgcatatgtacagtcccagaagtatcatctgtcttcatcttccccccaaagcccaaggatgtgctcaccattactctgactcctaaggtcacgtgtgttgtggtagacatcagcaaggatgatcccgaggtccagttcagctggtttgtagatgatgtggaggtgcacacagctcagacgcaaccccgggaggagcagttcaacagcactttccgctcagtcagtgaacttcccatcatgcaccaggactggctcaatggcaaggagttcaaatgcagggtcaacagtgcagctttccctgcccccatcgagaaaaccatctccaaaaccaaaggcagaccgaaggctccacaggtgtacaccattccacctcccaaggagcagatggccaaggataaagtcagtctgacctgcatgataacagacttcttccctgaagacattactgtggagtggcagtggaatgggcagccagcggagaactacaagaacactcagcccatcatggacacagatggctcttacttcgtctacagcaagctcaatgtgcagaagagcaactgggaggcaggaaatactttcacctgctctgtgttacatgagggcctgcacaaccaccatactgagaagagcctctcccactctcctggtagaaagaggcgagagggcagaggaagtcttctaacatgcggtgacgtggaggagaatcccggccctatgaagttgcctgttaggctgttggtgctgatgttctggattcctgcttccagcagtgacgtgcagatgatccagagccccagcagcctgagcgcctcgctgggggacatcgtgaccatgacctgccaggcctcccagggcaccagcatcaacctcaactggttccagcagaagcccggcaaggcccccaagctcctcatctacggggccagcaacctggaggacggcgtgccctcccgcttcagcggctcccgctacggcacggacttcacgctgaccatctcctccctggaggacgaggacatggccacctacttctgcctgcagcacacctacctgcccttcaccttcggcagcgggaccaagctggagatcaagcgggctgatgctgcaccaactgtatccatcttcccaccatccagtgagcagttaacatctggaggtgcctcagtcgtgtgcttcttgaacaacttctaccccaaagacatcaatgtcaagtggaagattgatggcagtgaacgacaaaatggcgtcctgaacagttggactgatcaggacagcaaagacagcacctacagcatgagcagcaccctcacgttgaccaaggacgagtatgaacgacataacagctatacctgtgaggccactcacaagacatcaacttcacccattgtcaagagcttcaacaggaatgagtgttagtaactcgaggacggggtgaactacgcctgaggatccgatctttttccctctgccaaaaattatggggacatcatgaagccccttgagcatctgacttctggctaataaaggaaatttattttcattgcaatagtgtgttggaattttttgtgtctctcactcggcctaggtagataagtagcatggcgggttaatcattaactacaaggaacccctagtgatggagttggccactccctctctgcgcgctcgctcgctcactgaggccgggcgaccaaaggtcgcccgacgcccgggctttgcccgggcggcctcagtgagcgagcgagcgcgcag

SEQ ID NO: 2149 - DNA, 3857 bp, Artificial Sequence
  Description of Artificial Sequence: Synthetic polynucleotide
ctgcgcgctcgctcgctcactgaggccgcccgggcaaagcccgggcgtcgggcgacctttggtcgcccggcctcagtgagcgagcgagcgcgcagagagggagtggccaactccatcactaggggttccttgtagttaatgattaacccgccatgctacttatctaccagggtaatggggatcctctagaactatagctagtcgacataacgcgttagtatctgcagagggccctgcgtatgagtgcaagtgggttttaggaccaggatgaggcggggtgggggtgcctacctgacgaccgaccccgacccactggacaagcacccaacccccattccccaaattgcgcatcccctatcagagagggggaggggaaacaggatgcggcgaggcgcgtgcgcactgccagcttcagcaccgcggacagtgccttcgcccccgcctggcggcgcgcgccaccgccgcctcagcactgaaggcgcgctgacgtcactcgccggtcccccgcaaactccccttcccggccaccttggtcgcgtccgcgccgccgccggcccagccggaccgcaccacgcgaggcgcgagataggggggcacgggcgcgaccatctgcgctgcggcgccggcgactcagcgctgcctcagtctgcggtgggcagcggaggagtcgtgtcgtgcctgagagcgcagctgtgctcctgggcaccgcgcagtccgcccccgcggctcctggccagaccacccctaggaccccctgccccaagtcgcagccaagcttcgtttagtgaaccgtcagatcgcctggagacgccatccacgctgttttgacctccatagaagacaccgggaccgatccagcctccgcggattcgaatcccggccgggaacggtgcattggaacgcggattccccgtgccaagagtgacgtaagtaccgcctatagagtctataggcccacaaaaaatgctttcttcttttaatatacttttttgtttatcttatttctaatactttccctaatctctttctttcagggcaataatgatacaatgtatcatgcctctttgcaccattctaaagaataacagtgataatttctgggttaaggcaatagcaatatttctgcatataaatatttctgcatataaattgtaactgatgtaagaggtttcatattgctaatagcagctacaatccagctaccattctgcttttattttatggttgggataaggctggattattctgagtccaagctaggcccttttgctaatcatgttcatacctcttatcttcctcccacagctcctgggcaacgtgctggtctgtgtgctggcccatcactttggcaaagaattgggattcgaaccggtgccgccaccatgaacttcgggctcagcttgattttccttgtccttgttttaaaaggtgtccagtgtcaggtgcagctgcagcagagcgacgccgagctggtgaaacctggggccagcgtcaagatcagctgcaaggcctccggctacaccttcaccgaccgcaccatccactgggtgaagcagcggcccgagcaggggctggagtggatcgggtacatctaccccggggacggctccaccaagtacaacgagaacttcaagggcaaagccaccctgacggccgacaagtccagcagcaccgcctacatgcagctgaacagcctgaccagcgaggacagcgccgtgtacttctgcgcccggcggggggctatggactactggggccagggcacctccgtgaccgtgtcctccgccaaaacgacacccccatctgtctatccactggcccctggatctgctgcccaaactaactccatggtgaccctgggatgcctggtcaagggctatttccctgagccagtgacagtgacctggaactctggatccctgtccagcggtgtgcacaccttcccagctgtcctgcagtctgacctctacactctgagcagctcagtgactgtcccctccagcacctggcccagcgagaccgtcacctgcaacgttgcccacccggccagcagcaccaaggtggacaagaaaattgtgcccagggattgtggttgtaagccttgcatatgtacagtcccagaagtatcatctgtcttcatcttccccccaaagcccaaggatgtgctcaccattactctgactcctaaggtcacgtgtgttgtggtagacatcagcaaggatgatcccgaggtccagttcagctggtttgtagatgatgtggaggtgcacacagctcagacgcaaccccgggaggagcagttcaacagcactttccgctcagtcagtgaacttcccatcatgcaccaggactggctcaatggcaaggagttcaaatgcagggtcaacagtgcagctttccctgcccccatcgagaaaaccatctccaaaaccaaaggcagaccgaaggctccacaggtgtacaccattccacctcccaaggagcagatggccaaggataaagtcagtctgacctgcatgataacagacttcttccctgaagacattactgtggagtggcagtggaatgggcagccagcggagaactacaagaacactcagcccatcatggacacagatggctcttacttcgtctacagcaagctcaatgtgcagaagagcaactgggaggcaggaaatactttcacctgctctgtgttacatgagggcctgcacaaccaccatactgagaagagcctctcccactctcctggtagaaagaggcgagagggcagaggaagtcttctaacatgcggtgacgtggaggagaatcccggccctatgaagttgcctgttaggctgttggtgctgatgttctggattcctgcttccagcagtgacgtgcagatgatccagagccccagcagcctgagcgcctcgctgggggacatcgtgaccatgacctgccaggcctcccagggcaccagcatcaacctcaactggttccagcagaagcccggcaaggcccccaagctcctcatctacggggccagcaacctggaggacggcgtgccctcccgcttcagcggctcccgctacggcacggacttcacgctgaccatctcctccctggaggacgaggacatggccacctacttctgcctgcagcacacctacctgcccttcaccttcggcagcgggaccaagctggagatcaagcgggctgatgctgcaccaactgtatccatcttcccaccatccagtgagcagttaacatctggaggtgcctcagtcgtgtgcttcttgaacaacttctaccccaaagacatcaatgtcaagtggaagattgatggcagtgaacgacaaaatggcgtcctgaacagttggactgatcaggacagcaaagacagcacctacagcatgagcagcaccctcacgttgaccaaggacgagtatgaacgacataacagctatacctgtgaggccactcacaagacatcaacttcacccattgtcaagagcttcaacaggaatgagtgttagtaactcgaggacggggtgaactacgcctgaggatccgatctttttccctctgccaaaaattatggggacatcatgaagccccttgagcatctgacttctggctaataaaggaaatttattttcattgcaatagtgtgttggaattttttgtgtctctcactcggcctaggtagataagtagcatggcgggttaatcattaactacaaggaacccctagtgatggagttggccactccctctctgcgcgctcgctcgctcactgaggccgggcgaccaaaggtcgcccgacgcccgggctttgcccgggcggcctcagtgagcgagcgagcgcgcag

SEQ ID NO: 2150 - DNA, 4420 bp, Artificial Sequence
  Description of Artificial Sequence: Synthetic polynucleotide
ctgcgcgctcgctcgctcactgaggccgcccgggcaaagcccgggcgtcgggcgacctttggtcgcccggcctcagtgagcgagcgagcgcgcagagagggagtggccaactccatcactaggggttccttgtagttaatgattaacccgccatgctacttatctaccagggtaatggggatcctctagaactatagctagtcgacataacgcgtctagttattaatagtaatcaattacggggtcattagttcatagcccatatatggagttccgcgttacataacttacggtaaatggcccgcctggctgaccgcccaacgacccccgcccattgacgtcaataatgacgtatgttcccatagtaacgccaatagggactttccattgacgtcaatgggtggagtatttacggtaaactgcccacttggcagtacatcaagtgtatcatatgccaagtacgccccctattgacgtcaatgacggtaaatggcccgcctggcattatgcccagtacatgaccttatgggactttcctacttggcagtacatctacgtattagtcatcgctattaccatggtcgaggtgagccccacgttctgcttcactctccccatctcccccccctccccacccccaattttgtatttatttattttttaattattttgtgcagcgatgggggcggggggggggggggggcgcgcgccaggcggggcggggcggggcgaggggcggggcggggcgaggcggagaggtgcggcggcagccaatcagagcggcgcgctccgaaagtttccttttatggcgaggcggcggcggcggcggccctataaaaagcgaagcgcgcggcgggcgggagtcgctgcgcgctgccttcgccccgtgccccgctccgccgccgcctcgcgccgcccgccccggctctgactgaccgcgttactcccacaggtgagcgggcgggacggcccttctcctccgggctgtaattagcgcttggtttaatgacggcttgtttcttttctgtggctgcgtgaaagccttgaggggctccgggagggccctttgtgcggggggagcggctcggggggtgcgtgcgtgtgtgtgtgcgtggggagcgccgcgtgcggctccgcgctgcccggcggctgtgagcgctgcgggcgcggcgcggggctttgtgcgctccgcagtgtgcgcgaggggagcgcggccgggggcggtgccccgcggtgcggggggggctgcgaggggaacaaaggctgcgtgcggggtgtgtgcgtgggggggtgagcagggggtgtgggcgcgtcggtcgggctgcaaccccccctgcacccccctccccgagttgctgagcacggcccggcttcgggtgcggggctccgtacggggcgtggcgcggggctcgccgtgccgggcggggggtggcggcaggtgggggtgccgggcggggcggggccgcctcgggccggggagggctcgggggaggggcgcggcggcccccggagcgccggcggctgtcgaggcgcggcgagccgcagccattgccttttatggtaatcgtgcgagagggcgcagggacttcctttgtcccaaatctgtgcggagccgaaatctgggaggcgccgccgcaccccctctagcgggcgcggggcgaagcggtgcggcgccggcaggaaggaaatgggcggggagggccttcgtgcgtcgccgcgccgccgtccccttctccctctccagcctcggggctgtccgcggggggacggctgccttcgggggggacggggcagggcggggttcggcttctggcgtgtgaccggcggctctagagcctctgctaaccatgttcatgccttcttctttttcctacagctcctgggcaacgtgctggttattgtgctgtctcatcattttggcaaagaattcgggattcgaaccggtgccgccaccatgaagttgcctgttaggctgttggtgctgatgttctggattcctgcttccagcagtgacgtgcagatgatccagagccccagcagcctgagcgcctcgctgggggacatcgtgaccatgacctgccaggcctcccagggcaccagcatcaacctcaactggttccagcagaagcccggcaaggcccccaagctcctcatctacggggccagcaacctggaggacggcgtgccctcccgcttcagcggctcccgctacggcacggacttcacgctgaccatctcctccctggaggacgaggacatggccacctacttctgcctgcagcacacctacctgcccttcaccttcggcagcgggaccaagctggagatcaagcgggctgatgctgcaccaactgtatccatcttcccaccatccagtgagcagttaacatctggaggtgcctcagtcgtgtgcttcttgaacaacttctaccccaaagacatcaatgtcaagtggaagattgatggcagtgaacgacaaaatggcgtcctgaacagttggactgatcaggacagcaaagacagcacctacagcatgagcagcaccctcacgttgaccaaggacgagtatgaacgacataacagctatacctgtgaggccactcacaagacatcaacttcacccattgtcaagagcttcaacaggaatgagtgtgagggcagaggaagtcttctaacatgcggtgacgtggaggagaatcccggccctatgaacttcgggctcagcttgattttccttgtccttgttttaaaaggtgtccagtgtcaggtgcagctgcagcagagcgacgccgagctggtgaaacctggggccagcgtcaagatcagctgcaaggcctccggctacaccttcaccgaccgcaccatccactgggtgaagcagcggcccgagcaggggctggagtggatcgggtacatctaccccggggacggctccaccaagtacaacgagaacttcaagggcaaagccaccctgacggccgacaagtccagcagcaccgcctacatgcagctgaacagcctgaccagcgaggacagcgccgtgtacttctgcgcccggcggggggctatggactactggggccagggcacctccgtgaccgtgtcctccgccaaaacgacacccccatctgtctatccactggcccctggatctgctgcccaaactaactccatggtgaccctgggatgcctggtcaagggctatttccctgagccagtgacagtgacctggaactctggatccctgtccagcggtgtgcacaccttcccagctgtcctgcagtctgacctctacactctgagcagctcagtgactgtcccctccagcacctggcccagcgagaccgtcacctgcaacgttgcccacccggccagcagcaccaaggtggacaagaaaattgtgcccagggattgtggttgtaagccttgcatatgtacagtcccagaagtatcatctgtcttcatcttccccccaaagcccaaggatgtgctcaccattactctgactcctaaggtcacgtgtgttgtggtagacatcagcaaggatgatcccgaggtccagttcagctggtttgtagatgatgtggaggtgcacacagctcagacgcaaccccgggaggagcagttcaacagcactttccgctcagtcagtgaacttcccatcatgcaccaggactggctcaatggcaaggagttcaaatgcagggtcaacagtgcagctttccctgcccccatcgagaaaaccatctccaaaaccaaaggcagaccgaaggctccacaggtgtacaccattccacctcccaaggagcagatggccaaggataaagtcagtctgacctgcatgataacagacttcttccctgaagacattactgtggagtggcagtggaatgggcagccagcggagaactacaagaacactcagcccatcatggacacagatggctcttacttcgtctacagcaagctcaatgtgcagaagagcaactgggaggcaggaaatactttcacctgctctgtgttacatgagggcctgcacaaccaccatactgagaagagcctctcccactctcctggtaagtagtaactcgaggacggggtgaactacgcctgaggatccgatctttttccctctgccaaaaattatggggacatcatgaagccccttgagcatctgacttctggctaataaaggaaatttattttcattgcaatagtgtgttggaattttttgtgtctctcactcggcctaggtagataagtagcatggcgggttaatcattaactacaaggaacccctagtgatggagttggccactccctctctgcgcgctcgctcgctcactgaggccgggcgaccaaaggtcgcccgacgcccgggctttgcccgggcggcctcagtgagcgagcgagcgcgcag

SEQ ID NO: 2151 - DNA, 3990 bp, Artificial Sequence
  Description of Artificial Sequence: Synthetic polynucleotide
ctgcgcgctcgctcgctcactgaggccgcccgggcaaagcccgggcgtcgggcgacctttggtcgcccggcctcagtgagcgagcgagcgcgcagagagggagtggccaactccatcactaggggttccttgtagttaatgattaacccgccatgctacttatctaccagggtaatggggatcctctagaactatagctagtcgacataacgcgtgatctaacatatcctggtgtggagtagcggacgctgctatgacagaggctcgggggcctgagctggctctgtgagctggggaggaggcagacagccaggccttgtctgcaagcagacctggcagcattgggctggccgccccccagggcctcctcttcatgcccagtgaatgactcaccttggcacagacacaatgttcggggtgggcacagtgcctgcttcccgccgcaccccagcccccctcaaatgccttccgagaagcccattgagcagggggcttgcattgcaccccagcctgacagcctggcatcttgggataaaagcagcacagccccctaggggctgcccttgctgtgtggcgccaccggcggtggagaacaaggctctattcagcctgtgcccaggaaaggggatcaggggatgcccaggcatggacagtgggtggcagggggggagaggagggctgtctgcttcccagaagtccaaggacacaaatgggtgaggggagagctctccccatagctgggctgcggcccaaccccaccccctcaggctatgccagggggtgttgccaggggcacccgggcatcgccagtctagcccactccttcataaagccctcgcatcccaggagcgagcagagccagagcaggttggagaggagacgcatcacctccgctgctcgcggggatcctctagaagcttcgtttagtgaaccgtcagatcgcctggagacgccatccacgctgttttgacctccatagaagacaccgggaccgatccagcctccgcggattcgaatcccggccgggaacggtgcattggaacgcggattccccgtgccaagagtgacgtaagtaccgcctatagagtctataggcccacaaaaaatgctttcttcttttaatatacttttttgtttatcttatttctaatactttccctaatctctttctttcagggcaataatgatacaatgtatcatgcctctttgcaccattctaaagaataacagtgataatttctgggttaaggcaatagcaatatttctgcatataaatatttctgcatataaattgtaactgatgtaagaggtttcatattgctaatagcagctacaatccagctaccattctgcttttattttatggttgggataaggctggattattctgagtccaagctaggcccttttgctaatcatgttcatacctcttatcttcctcccacagctcctgggcaacgtgctggtctgtgtgctggcccatcactttggcaaagaattgggattcgaaccggtgccgccaccatgaagttgcctgttaggctgttggtgctgatgttctggattcctgcttccagcagtgacgtgcagatgatccagagccccagcagcctgagcgcctcgctgggggacatcgtgaccatgacctgccaggcctcccagggcaccagcatcaacctcaactggttccagcagaagcccggcaaggcccccaagctcctcatctacggggccagcaacctggaggacggcgtgccctcccgcttcagcggctcccgctacggcacggacttcacgctgaccatctcctccctggaggacgaggacatggccacctacttctgcctgcagcacacctacctgcccttcaccttcggcagcgggaccaagctggagatcaagcgggctgatgctgcaccaactgtatccatcttcccaccatccagtgagcagttaacatctggaggtgcctcagtcgtgtgcttcttgaacaacttctaccccaaagacatcaatgtcaagtggaagattgatggcagtgaacgacaaaatggcgtcctgaacagttggactgatcaggacagcaaagacagcacctacagcatgagcagcaccctcacgttgaccaaggacgagtatgaacgacataacagctatacctgtgaggccactcacaagacatcaacttcacccattgtcaagagcttcaacaggaatgagtgtgagggcagaggaagtcttctaacatgcggtgacgtggaggagaatcccggccctatgaacttcgggctcagcttgattttccttgtccttgttttaaaaggtgtccagtgtcaggtgcagctgcagcagagcgacgccgagctggtgaaacctggggccagcgtcaagatcagctgcaaggcctccggctacaccttcaccgaccgcaccatccactgggtgaagcagcggcccgagcaggggctggagtggatcgggtacatctaccccggggacggctccaccaagtacaacgagaacttcaagggcaaagccaccctgacggccgacaagtccagcagcaccgcctacatgcagctgaacagcctgaccagcgaggacagcgccgtgtacttctgcgcccggcggggggctatggactactggggccagggcacctccgtgaccgtgtcctccgccaaaacgacacccccatctgtctatccactggcccctggatctgctgcccaaactaactccatggtgaccctgggatgcctggtcaagggctatttccctgagccagtgacagtgacctggaactctggatccctgtccagcggtgtgcacaccttcccagctgtcctgcagtctgacctctacactctgagcagctcagtgactgtcccctccagcacctggcccagcgagaccgtcacctgcaacgttgcccacccggccagcagcaccaaggtggacaagaaaattgtgcccagggattgtggttgtaagccttgcatatgtacagtcccagaagtatcatctgtcttcatcttccccccaaagcccaaggatgtgctcaccattactctgactcctaaggtcacgtgtgttgtggtagacatcagcaaggatgatcccgaggtccagttcagctggtttgtagatgatgtggaggtgcacacagctcagacgcaaccccgggaggagcagttcaacagcactttccgctcagtcagtgaacttcccatcatgcaccaggactggctcaatggcaaggagttcaaatgcagggtcaacagtgcagctttccctgcccccatcgagaaaaccatctccaaaaccaaaggcagaccgaaggctccacaggtgtacaccattccacctcccaaggagcagatggccaaggataaagtcagtctgacctgcatgataacagacttcttccctgaagacattactgtggagtggcagtggaatgggcagccagcggagaactacaagaacactcagcccatcatggacacagatggctcttacttcgtctacagcaagctcaatgtgcagaagagcaactgggaggcaggaaatactttcacctgctctgtgttacatgagggcctgcacaaccaccatactgagaagagcctctcccactctcctggtaagtagtaactcgaggacggggtgaactacgcctgaggatccgatctttttccctctgccaaaaattatggggacatcatgaagccccttgagcatctgacttctggctaataaaggaaatttattttcattgcaatagtgtgttggaattttttgtgtctctcactcggcctaggtagataagtagcatggcgggttaatcattaactacaaggaacccctagtgatggagttggccactccctctctgcgcgctcgctcgctcactgaggccgggcgaccaaaggtcgcccgacgcccgggctttgcccgggcggcctcagtgagcgagcgagcgcgcag

SEQ ID NO: 2152 - DNA, 3848 bp, Artificial Sequence
  Description of Artificial Sequence: Synthetic polynucleotide
ctgcgcgctcgctcgctcactgaggccgcccgggcaaagcccgggcgtcgggcgacctttggtcgcccggcctcagtgagcgagcgagcgcgcagagagggagtggccaactccatcactaggggttccttgtagttaatgattaacccgccatgctacttatctaccagggtaatggggatcctctagaactatagctagtcgacataacgcgttagtatctgcagagggccctgcgtatgagtgcaagtgggttttaggaccaggatgaggcggggtgggggtgcctacctgacgaccgaccccgacccactggacaagcacccaacccccattccccaaattgcgcatcccctatcagagagggggaggggaaacaggatgcggcgaggcgcgtgcgcactgccagcttcagcaccgcggacagtgccttcgcccccgcctggcggcgcgcgccaccgccgcctcagcactgaaggcgcgctgacgtcactcgccggtcccccgcaaactccccttcccggccaccttggtcgcgtccgcgccgccgccggcccagccggaccgcaccacgcgaggcgcgagataggggggcacgggcgcgaccatctgcgctgcggcgccggcgactcagcgctgcctcagtctgcggtgggcagcggaggagtcgtgtcgtgcctgagagcgcagctgtgctcctgggcaccgcgcagtccgcccccgcggctcctggccagaccacccctaggaccccctgccccaagtcgcagccaagcttcgtttagtgaaccgtcagatcgcctggagacgccatccacgctgttttgacctccatagaagacaccgggaccgatccagcctccgcggattcgaatcccggccgggaacggtgcattggaacgcggattccccgtgccaagagtgacgtaagtaccgcctatagagtctataggcccacaaaaaatgctttcttcttttaatatacttttttgtttatcttatttctaatactttccctaatctctttctttcagggcaataatgatacaatgtatcatgcctctttgcaccattctaaagaataacagtgataatttctgggttaaggcaatagcaatatttctgcatataaatatttctgcatataaattgtaactgatgtaagaggtttcatattgctaatagcagctacaatccagctaccattctgcttttattttatggttgggataaggctggattattctgagtccaagctaggcccttttgctaatcatgttcatacctcttatcttcctcccacagctcctgggcaacgtgctggtctgtgtgctggcccatcactttggcaaagaattgggattcgaaccggtgccgccaccatgaagttgcctgttaggctgttggtgctgatgttctggattcctgcttccagcagtgacgtgcagatgatccagagccccagcagcctgagcgcctcgctgggggacatcgtgaccatgacctgccaggcctcccagggcaccagcatcaacctcaactggttccagcagaagcccggcaaggcccccaagctcctcatctacggggccagcaacctggaggacggcgtgccctcccgcttcagcggctcccgctacggcacggacttcacgctgaccatctcctccctggaggacgaggacatggccacctacttctgcctgcagcacacctacctgcccttcaccttcggcagcgggaccaagctggagatcaagcgggctgatgctgcaccaactgtatccatcttcccaccatccagtgagcagttaacatctggaggtgcctcagtcgtgtgcttcttgaacaacttctaccccaaagacatcaatgtcaagtggaagattgatggcagtgaacgacaaaatggcgtcctgaacagttggactgatcaggacagcaaagacagcacctacagcatgagcagcaccctcacgttgaccaaggacgagtatgaacgacataacagctatacctgtgaggccactcacaagacatcaacttcacccattgtcaagagcttcaacaggaatgagtgtgagggcagaggaagtcttctaacatgcggtgacgtggaggagaatcccggccctatgaacttcgggctcagcttgattttccttgtccttgttttaaaaggtgtccagtgtcaggtgcagctgcagcagagcgacgccgagctggtgaaacctggggccagcgtcaagatcagctgcaaggcctccggctacaccttcaccgaccgcaccatccactgggtgaagcagcggcccgagcaggggctggagtggatcgggtacatctaccccggggacggctccaccaagtacaacgagaacttcaagggcaaagccaccctgacggccgacaagtccagcagcaccgcctacatgcagctgaacagcctgaccagcgaggacagcgccgtgtacttctgcgcccggcggggggctatggactactggggccagggcacctccgtgaccgtgtcctccgccaaaacgacacccccatctgtctatccactggcccctggatctgctgcccaaactaactccatggtgaccctgggatgcctggtcaagggctatttccctgagccagtgacagtgacctggaactctggatccctgtccagcggtgtgcacaccttcccagctgtcctgcagtctgacctctacactctgagcagctcagtgactgtcccctccagcacctggcccagcgagaccgtcacctgcaacgttgcccacccggccagcagcaccaaggtggacaagaaaattgtgcccagggattgtggttgtaagccttgcatatgtacagtcccagaagtatcatctgtcttcatcttccccccaaagcccaaggatgtgctcaccattactctgactcctaaggtcacgtgtgttgtggtagacatcagcaaggatgatcccgaggtccagttcagctggtttgtagatgatgtggaggtgcacacagctcagacgcaaccccgggaggagcagttcaacagcactttccgctcagtcagtgaacttcccatcatgcaccaggactggctcaatggcaaggagttcaaatgcagggtcaacagtgcagctttccctgcccccatcgagaaaaccatctccaaaaccaaaggcagaccgaaggctccacaggtgtacaccattccacctcccaaggagcagatggccaaggataaagtcagtctgacctgcatgataacagacttcttccctgaagacattactgtggagtggcagtggaatgggcagccagcggagaactacaagaacactcagcccatcatggacacagatggctcttacttcgtctacagcaagctcaatgtgcagaagagcaactgggaggcaggaaatactttcacctgctctgtgttacatgagggcctgcacaaccaccatactgagaagagcctctcccactctcctggtaagtagtaactcgaggacggggtgaactacgcctgaggatccgatctttttccctctgccaaaaattatggggacatcatgaagccccttgagcatctgacttctggctaataaaggaaatttattttcattgcaatagtgtgttggaattttttgtgtctctcactcggcctaggtagataagtagcatggcgggttaatcattaactacaaggaacccctagtgatggagttggccactccctctctgcgcgctcgctcgctcactgaggccgggcgaccaaaggtcgcccgacgcccgggctttgcccgggcggcctcagtgagcgagcgagcgcgcag

SEQ ID NO: 2153 - DNA, 3971 bp, Artificial Sequence
  Description of Artificial Sequence: Synthetic polynucleotide
ctgcgcgctcgctcgctcactgaggccgcccgggcaaagcccgggcgtcgggcgacctttggtcgcccggcctcagtgagcgagcgagcgcgcagagagggagtggccaactccatcactaggggttccttgtagttaatgattaacccgccatgctacttatctaccagggtaatggggatcctctagaactatagctagtcgacattgattattgactagttattaatagtaatcaattacggggtcattagttcatagcccatatatggagttccgcgttacataacttacggtaaatggcccgcctggctgaccgcccaacgacccccgcccattgacgtcaataatgacgtatgttcccatagtaacgccaatagggactttccattgacgtcaatgggtggagtatttacggtaaactgcccacttggcagtacatcaagtgtatcatatgccaagtacgccccctattgacgtcaatgacggtaaatggcccgcctggcattatgcccagtacatgaccttatgggactttcctacttggcagtacatctacgtattagtcatcgctattaccatgtcgaggccacgttctgcttcactctccccatctcccccccctccccacccccaattttgtatttatttattttttaattattttgtgcagcgatgggggcggggggggggggcgcgcgccaggcggggcggggcggggcgaggggcggggcggggcgaggcggagaggtgcggcggcagccaatcagagcggcgcgctccgaaagtttccttttatggcgaggcggcggcggcggcggccctataaaaagcgaagcgcgcggcgggcgggagcaagcttcgtttagtgaaccgtcagatcgcctggagacgccatccacgctgttttgacctccatagaagacaccgggaccgatccagcctccgcggattcgaatcccggccgggaacggtgcattggaacgcggattccccgtgccaagagtgacgtaagtaccgcctatagagtctataggcccacaaaaaatgctttcttcttttaatatacttttttgtttatcttatttctaatactttccctaatctctttctttcagggcaataatgatacaatgtatcatgcctctttgcaccattctaaagaataacagtgataatttctgggttaaggcaatagcaatatttctgcatataaatatttctgcatataaattgtaactgatgtaagaggtttcatattgctaatagcagctacaatccagctaccattctgcttttattttatggttgggataaggctggattattctgagtccaagctaggcccttttgctaatcatgttcatacctcttatcttcctcccacagctcctgggcaacgtgctggtctgtgtgctggcccatcactttggcaaagaattgggattcgaaccggtgccgccaccatgaacttcgggctcagcttgattttccttgtccttgttttaaaaggtgtccagtgtgaggtgaagctggtggagagcggcggcgacctggtgaagcctggcggcagcctgaagctgagctgcgccgccagcggcttcaccttcagcagctacgccatgagctgggtgagacagaaccctgagaagagactggagtgggtggccagcatcagcaagggcggcaacacctactaccctaacagcgtgaagggcagattcaccatcagcagagacaacgccagaaacatcctgtacctgcagatgagcagcctgagaagcgaggacaccgccctgtactactgcgccagaggctggggcgactacggctggttcgcctactggggccaggtgaccctggtgaccgtgagcgccgccaaaacgacacccccatctgtctatccactggcccctggatctgctgcccaaactaactccatggtgaccctgggatgcctggtcaagggctatttccctgagccagtgacagtgacctggaactctggatccctgtccagcggtgtgcacaccttcccagctgtcctgcagtctgacctctacactctgagcagctcagtgactgtcccctccagcacctggcccagcgagaccgtcacctgcaacgttgcccacccggccagcagcaccaaggtggacaagaaaattgtgcccagggattgtggttgtaagccttgcatatgtacagtcccagaagtatcatctgtcttcatcttccccccaaagcccaaggatgtgctcaccattactctgactcctaaggtcacgtgtgttgtggtagacatcagcaaggatgatcccgaggtccagttcagctggtttgtagatgatgtggaggtgcacacagctcagacgcaaccccgggaggagcagttcaacagcactttccgctcagtcagtgaacttcccatcatgcaccaggactggctcaatggcaaggagttcaaatgcagggtcaacagtgcagctttccctgcccccatcgagaaaaccatctccaaaaccaaaggcagaccgaaggctccacaggtgtacaccattccacctcccaaggagcagatggccaaggataaagtcagtctgacctgcatgataacagacttcttccctgaagacattactgtggagtggcagtggaatgggcagccagcggagaactacaagaacactcagcccatcatggacacagatggctcttacttcgtctacagcaagctcaatgtgcagaagagcaactgggaggcaggaaatactttcacctgctctgtgttacatgagggcctgcacaaccaccatactgagaagagcctctcccactctcctggtcgggccaagcggggaagcggagtgaaacagactttgaattttgaccttctcaagttggcgggagacgtggagtccaaccctggacctatgaagttgcctgttaggctgttggtgctgatgttctggattcctgcttccagcagtgacatcaagatgacccagagccctagcagcatgtacgccagcctgggcgagagagtgaccatcacctgcaaggccagccaggacatcaacagatacctgaactggttccagcagaagcctggcaagagccctaagaccctgatctacagagccaacagactgctggacggcgtgcctagcagattcagcggcagcggcagcggccaggactacagcctgaccatcagcagcctggactacgaggacatgggcatctactactgcctgcagtacgacgagttccctctgaccttcggcgacggcaccaagctggagctgaagcgggctgatgctgcaccaactgtatccatcttcccaccatccagtgagcagttaacatctggaggtgcctcagtcgtgtgcttcttgaacaacttctaccccaaagacatcaatgtcaagtggaagattgatggcagtgaacgacaaaatggcgtcctgaacagttggactgatcaggacagcaaagacagcacctacagcatgagcagcaccctcacgttgaccaaggacgagtatgaacgacataacagctatacctgtgaggccactcacaagacatcaacttcacccattgtcaagagcttcaacaggaatgagtgttagtaactcgaggacggggtgaactacgcctgaggatccgatctttttccctctgccaaaaattatggggacatcatgaagccccttgagcatctgacttctggctaataaaggaaatttattttcattgcaatagtgtgttggaattttttgtgtctctcactcggcctaggtagataagtagcatggcgggttaatcattaactacaaggaacccctagtgatggagttggccactccctctctgcgcgctcgctcgctcactgaggccgggcgaccaaaggtcgcccgacgcccgggctttgcccgggcggcctcagtgagcgagcgagcgcgcag

SEQ ID NO: 2154 - DNA, 4459 bp, Artificial Sequence
  Description of Artificial Sequence: Synthetic polynucleotide
ctgcgcgctcgctcgctcactgaggccgcccgggcaaagcccgggcgtcgggcgacctttggtcgcccggcctcagtgagcgagcgagcgcgcagagagggagtggccaactccatcactaggggttccttgtagttaatgattaacccgccatgctacttatctaccagggtaatggggatcctctagaactatagctagtcgacataacgcgtctagttattaatagtaatcaattacggggtcattagttcatagcccatatatggagttccgcgttacataacttacggtaaatggcccgcctggctgaccgcccaacgacccccgcccattgacgtcaataatgacgtatgttcccatagtaacgccaatagggactttccattgacgtcaatgggtggagtatttacggtaaactgcccacttggcagtacatcaagtgtatcatatgccaagtacgccccctattgacgtcaatgacggtaaatggcccgcctggcattatgcccagtacatgaccttatgggactttcctacttggcagtacatctacgtattagtcatcgctattaccatggtcgaggtgagccccacgttctgcttcactctccccatctcccccccctccccacccccaattttgtatttatttattttttaattattttgtgcagcgatgggggcggggggggggggggggcgcgcgccaggcggggcggggcggggcgaggggcggggcggggcgaggcggagaggtgcggcggcagccaatcagagcggcgcgctccgaaagtttccttttatggcgaggcggcggcggcggcggccctataaaaagcgaagcgcgcggcgggcgggagtcgctgcgcgctgccttcgccccgtgccccgctccgccgccgcctcgcgccgcccgccccggctctgactgaccgcgttactcccacaggtgagcgggcgggacggcccttctcctccgggctgtaattagcgcttggtttaatgacggcttgtttcttttctgtggctgcgtgaaagccttgaggggctccgggagggccctttgtgcggggggagcggctcggggggtgcgtgcgtgtgtgtgtgcgtggggagcgccgcgtgcggctccgcgctgcccggcggctgtgagcgctgcgggcgcggcgcggggctttgtgcgctccgcagtgtgcgcgaggggagcgcggccgggggcggtgccccgcggtgcggggggggctgcgaggggaacaaaggctgcgtgcggggtgtgtgcgtgggggggtgagcagggggtgtgggcgcgtcggtcgggctgcaaccccccctgcacccccctccccgagttgctgagcacggcccggcttcgggtgcggggctccgtacggggcgtggcgcggggctcgccgtgccgggcggggggtggcggcaggtgggggtgccgggcggggcggggccgcctcgggccggggagggctcgggggaggggcgcggcggcccccggagcgccggcggctgtcgaggcgcggcgagccgcagccattgccttttatggtaatcgtgcgagagggcgcagggacttcctttgtcccaaatctgtgcggagccgaaatctgggaggcgccgccgcaccccctctagcgggcgcggggcgaagcggtgcggcgccggcaggaaggaaatgggcggggagggccttcgtgcgtcgccgcgccgccgtccccttctccctctccagcctcggggctgtccgcggggggacggctgccttcgggggggacggggcagggcggggttcggcttctggcgtgtgaccggcggctctagagcctctgctaaccatgttcatgccttcttctttttcctacagctcctgggcaacgtgctggttattgtgctgtctcatcattttggcaaagaattcgggattcgaaccggtgccgccaccatgaacttcgggctcagcttgattttccttgtccttgttttaaaaggtgtccagtgtgaggtgaagctggtggagagcggcggcgacctggtgaagcctggcggcagcctgaagctgagctgcgccgccagcggcttcaccttcagcagctacgccatgagctgggtgagacagaaccctgagaagagactggagtgggtggccagcatcagcaagggcggcaacacctactaccctaacagcgtgaagggcagattcaccatcagcagagacaacgccagaaacatcctgtacctgcagatgagcagcctgagaagcgaggacaccgccctgtactactgcgccagaggctggggcgactacggctggttcgcctactggggccaggtgaccctggtgaccgtgagcgccgccaaaacgacacccccatctgtctatccactggcccctggatctgctgcccaaactaactccatggtgaccctgggatgcctggtcaagggctatttccctgagccagtgacagtgacctggaactctggatccctgtccagcggtgtgcacaccttcccagctgtcctgcagtctgacctctacactctgagcagctcagtgactgtcccctccagcacctggcccagcgagaccgtcacctgcaacgttgcccacccggccagcagcaccaaggtggacaagaaaattgtgcccagggattgtggttgtaagccttgcatatgtacagtcccagaagtatcatctgtcttcatcttccccccaaagcccaaggatgtgctcaccattactctgactcctaaggtcacgtgtgttgtggtagacatcagcaaggatgatcccgaggtccagttcagctggtttgtagatgatgtggaggtgcacacagctcagacgcaaccccgggaggagcagttcaacagcactttccgctcagtcagtgaacttcccatcatgcaccaggactggctcaatggcaaggagttcaaatgcagggtcaacagtgcagctttccctgcccccatcgagaaaaccatctccaaaaccaaaggcagaccgaaggctccacaggtgtacaccattccacctcccaaggagcagatggccaaggataaagtcagtctgacctgcatgataacagacttcttccctgaagacattactgtggagtggcagtggaatgggcagccagcggagaactacaagaacactcagcccatcatggacacagatggctcttacttcgtctacagcaagctcaatgtgcagaagagcaactgggaggcaggaaatactttcacctgctctgtgttacatgagggcctgcacaaccaccatactgagaagagcctctcccactctcctggtcgggccaagcggggaagcggagtgaaacagactttgaattttgaccttctcaagttggcgggagacgtggagtccaaccctggacctatgaagttgcctgttaggctgttggtgctgatgttctggattcctgcttccagcagtgacatcaagatgacccagagccctagcagcatgtacgccagcctgggcgagagagtgaccatcacctgcaaggccagccaggacatcaacagatacctgaactggttccagcagaagcctggcaagagccctaagaccctgatctacagagccaacagactgctggacggcgtgcctagcagattcagcggcagcggcagcggccaggactacagcctgaccatcagcagcctggactacgaggacatgggcatctactactgcctgcagtacgacgagttccctctgaccttcggcgacggcaccaagctggagctgaagcgggctgatgctgcaccaactgtatccatcttcccaccatccagtgagcagttaacatctggaggtgcctcagtcgtgtgcttcttgaacaacttctaccccaaagacatcaatgtcaagtggaagattgatggcagtgaacgacaaaatggcgtcctgaacagttggactgatcaggacagcaaagacagcacctacagcatgagcagcaccctcacgttgaccaaggacgagtatgaacgacataacagctatacctgtgaggccactcacaagacatcaacttcacccattgtcaagagcttcaacaggaatgagtgttagtaactcgaggacggggtgaactacgcctgaggatccgatctttttccctctgccaaaaattatggggacatcatgaagccccttgagcatctgacttctggctaataaaggaaatttattttcattgcaatagtgtgttggaattttttgtgtctctcactcggcctaggtagataagtagcatggcgggttaatcattaactacaaggaacccctagtgatggagttggccactccctctctgcgcgctcgctcgctcactgaggccgggcgaccaaaggtcgcccgacgcccgggctttgcccgggcggcctcagtgagcgagcgagcgcgcag

SEQ ID NO: 2155 - DNA, 4029 bp, Artificial Sequence
  Description of Artificial Sequence: Synthetic polynucleotide
ctgcgcgctcgctcgctcactgaggccgcccgggcaaagcccgggcgtcgggcgacctttggtcgcccggcctcagtgagcgagcgagcgcgcagagagggagtggccaactccatcactaggggttccttgtagttaatgattaacccgccatgctacttatctaccagggtaatggggatcctctagaactatagctagtcgacataacgcgtgatctaacatatcctggtgtggagtagcggacgctgctatgacagaggctcgggggcctgagctggctctgtgagctggggaggaggcagacagccaggccttgtctgcaagcagacctggcagcattgggctggccgccccccagggcctcctcttcatgcccagtgaatgactcaccttggcacagacacaatgttcggggtgggcacagtgcctgcttcccgccgcaccccagcccccctcaaatgccttccgagaagcccattgagcagggggcttgcattgcaccccagcctgacagcctggcatcttgggataaaagcagcacagccccctaggggctgcccttgctgtgtggcgccaccggcggtggagaacaaggctctattcagcctgtgcccaggaaaggggatcaggggatgcccaggcatggacagtgggtggcagggggggagaggagggctgtctgcttcccagaagtccaaggacacaaatgggtgaggggagagctctccccatagctgggctgcggcccaaccccaccccctcaggctatgccagggggtgttgccaggggcacccgggcatcgccagtctagcccactccttcataaagccctcgcatcccaggagcgagcagagccagagcaggttggagaggagacgcatcacctccgctgctcgcggggatcctctagaagcttcgtttagtgaaccgtcagatcgcctggagacgccatccacgctgttttgacctccatagaagacaccgggaccgatccagcctccgcggattcgaatcccggccgggaacggtgcattggaacgcggattccccgtgccaagagtgacgtaagtaccgcctatagagtctataggcccacaaaaaatgctttcttcttttaatatacttttttgtttatcttatttctaatactttccctaatctctttctttcagggcaataatgatacaatgtatcatgcctctttgcaccattctaaagaataacagtgataatttctgggttaaggcaatagcaatatttctgcatataaatatttctgcatataaattgtaactgatgtaagaggtttcatattgctaatagcagctacaatccagctaccattctgcttttattttatggttgggataaggctggattattctgagtccaagctaggcccttttgctaatcatgttcatacctcttatcttcctcccacagctcctgggcaacgtgctggtctgtgtgctggcccatcactttggcaaagaattgggattcgaaccggtgccgccaccatgaacttcgggctcagcttgattttccttgtccttgttttaaaaggtgtccagtgtgaggtgaagctggtggagagcggcggcgacctggtgaagcctggcggcagcctgaagctgagctgcgccgccagcggcttcaccttcagcagctacgccatgagctgggtgagacagaaccctgagaagagactggagtgggtggccagcatcagcaagggcggcaacacctactaccctaacagcgtgaagggcagattcaccatcagcagagacaacgccagaaacatcctgtacctgcagatgagcagcctgagaagcgaggacaccgccctgtactactgcgccagaggctggggcgactacggctggttcgcctactggggccaggtgaccctggtgaccgtgagcgccgccaaaacgacacccccatctgtctatccactggcccctggatctgctgcccaaactaactccatggtgaccctgggatgcctggtcaagggctatttccctgagccagtgacagtgacctggaactctggatccctgtccagcggtgtgcacaccttcccagctgtcctgcagtctgacctctacactctgagcagctcagtgactgtcccctccagcacctggcccagcgagaccgtcacctgcaacgttgcccacccggccagcagcaccaaggtggacaagaaaattgtgcccagggattgtggttgtaagccttgcatatgtacagtcccagaagtatcatctgtcttcatcttccccccaaagcccaaggatgtgctcaccattactctgactcctaaggtcacgtgtgttgtggtagacatcagcaaggatgatcccgaggtccagttcagctggtttgtagatgatgtggaggtgcacacagctcagacgcaaccccgggaggagcagttcaacagcactttccgctcagtcagtgaacttcccatcatgcaccaggactggctcaatggcaaggagttcaaatgcagggtcaacagtgcagctttccctgcccccatcgagaaaaccatctccaaaaccaaaggcagaccgaaggctccacaggtgtacaccattccacctcccaaggagcagatggccaaggataaagtcagtctgacctgcatgataacagacttcttccctgaagacattactgtggagtggcagtggaatgggcagccagcggagaactacaagaacactcagcccatcatggacacagatggctcttacttcgtctacagcaagctcaatgtgcagaagagcaactgggaggcaggaaatactttcacctgctctgtgttacatgagggcctgcacaaccaccatactgagaagagcctctcccactctcctggtcgggccaagcggggaagcggagtgaaacagactttgaattttgaccttctcaagttggcgggagacgtggagtccaaccctggacctatgaagttgcctgttaggctgttggtgctgatgttctggattcctgcttccagcagtgacatcaagatgacccagagccctagcagcatgtacgccagcctgggcgagagagtgaccatcacctgcaaggccagccaggacatcaacagatacctgaactggttccagcagaagcctggcaagagccctaagaccctgatctacagagccaacagactgctggacggcgtgcctagcagattcagcggcagcggcagcggccaggactacagcctgaccatcagcagcctggactacgaggacatgggcatctactactgcctgcagtacgacgagttccctctgaccttcggcgacggcaccaagctggagctgaagcgggctgatgctgcaccaactgtatccatcttcccaccatccagtgagcagttaacatctggaggtgcctcagtcgtgtgcttcttgaacaacttctaccccaaagacatcaatgtcaagtggaagattgatggcagtgaacgacaaaatggcgtcctgaacagttggactgatcaggacagcaaagacagcacctacagcatgagcagcaccctcacgttgaccaaggacgagtatgaacgacataacagctatacctgtgaggccactcacaagacatcaacttcacccattgtcaagagcttcaacaggaatgagtgttagtaactcgaggacggggtgaactacgcctgaggatccgatctttttccctctgccaaaaattatggggacatcatgaagccccttgagcatctgacttctggctaataaaggaaatttattttcattgcaatagtgtgttggaattttttgtgtctctcactcggcctaggtagataagtagcatggcgggttaatcattaactacaaggaacccctagtgatggagttggccactccctctctgcgcgctcgctcgctcactgaggccgggcgaccaaaggtcgcccgacgcccgggctttgcccgggcggcctcagtgagcgagcgagcgcgcag

SEQ ID NO: 2156 - DNA, 3887 bp, Artificial Sequence
  Description of Artificial Sequence: Synthetic polynucleotide
ctgcgcgctcgctcgctcactgaggccgcccgggcaaagcccgggcgtcgggcgacctttggtcgcccggcctcagtgagcgagcgagcgcgcagagagggagtggccaactccatcactaggggttccttgtagttaatgattaacccgccatgctacttatctaccagggtaatggggatcctctagaactatagctagtcgacataacgcgttagtatctgcagagggccctgcgtatgagtgcaagtgggttttaggaccaggatgaggcggggtgggggtgcctacctgacgaccgaccccgacccactggacaagcacccaacccccattccccaaattgcgcatcccctatcagagagggggaggggaaacaggatgcggcgaggcgcgtgcgcactgccagcttcagcaccgcggacagtgccttcgcccccgcctggcggcgcgcgccaccgccgcctcagcactgaaggcgcgctgacgtcactcgccggtcccccgcaaactccccttcccggccaccttggtcgcgtccgcgccgccgccggcccagccggaccgcaccacgcgaggcgcgagataggggggcacgggcgcgaccatctgcgctgcggcgccggcgactcagcgctgcctcagtctgcggtgggcagcggaggagtcgtgtcgtgcctgagagcgcagctgtgctcctgggcaccgcgcagtccgcccccgcggctcctggccagaccacccctaggaccccctgccccaagtcgcagccaagcttcgtttagtgaaccgtcagatcgcctggagacgccatccacgctgttttgacctccatagaagacaccgggaccgatccagcctccgcggattcgaatcccggccgggaacggtgcattggaacgcggattccccgtgccaagagtgacgtaagtaccgcctatagagtctataggcccacaaaaaatgctttcttcttttaatatacttttttgtttatcttatttctaatactttccctaatctctttctttcagggcaataatgatacaatgtatcatgcctctttgcaccattctaaagaataacagtgataatttctgggttaaggcaatagcaatatttctgcatataaatatttctgcatataaattgtaactgatgtaagaggtttcatattgctaatagcagctacaatccagctaccattctgcttttattttatggttgggataaggctggattattctgagtccaagctaggcccttttgctaatcatgttcatacctcttatcttcctcccacagctcctgggcaacgtgctggtctgtgtgctggcccatcactttggcaaagaattgggattcgaaccggtgccgccaccatgaacttcgggctcagcttgattttccttgtccttgttttaaaaggtgtccagtgtgaggtgaagctggtggagagcggcggcgacctggtgaagcctggcggcagcctgaagctgagctgcgccgccagcggcttcaccttcagcagctacgccatgagctgggtgagacagaaccctgagaagagactggagtgggtggccagcatcagcaagggcggcaacacctactaccctaacagcgtgaagggcagattcaccatcagcagagacaacgccagaaacatcctgtacctgcagatgagcagcctgagaagcgaggacaccgccctgtactactgcgccagaggctggggcgactacggctggttcgcctactggggccaggtgaccctggtgaccgtgagcgccgccaaaacgacacccccatctgtctatccactggcccctggatctgctgcccaaactaactccatggtgaccctgggatgcctggtcaagggctatttccctgagccagtgacagtgacctggaactctggatccctgtccagcggtgtgcacaccttcccagctgtcctgcagtctgacctctacactctgagcagctcagtgactgtcccctccagcacctggcccagcgagaccgtcacctgcaacgttgcccacccggccagcagcaccaaggtggacaagaaaattgtgcccagggattgtggttgtaagccttgcatatgtacagtcccagaagtatcatctgtcttcatcttccccccaaagcccaaggatgtgctcaccattactctgactcctaaggtcacgtgtgttgtggtagacatcagcaaggatgatcccgaggtccagttcagctggtttgtagatgatgtggaggtgcacacagctcagacgcaaccccgggaggagcagttcaacagcactttccgctcagtcagtgaacttcccatcatgcaccaggactggctcaatggcaaggagttcaaatgcagggtcaacagtgcagctttccctgcccccatcgagaaaaccatctccaaaaccaaaggcagaccgaaggctccacaggtgtacaccattccacctcccaaggagcagatggccaaggataaagtcagtctgacctgcatgataacagacttcttccctgaagacattactgtggagtggcagtggaatgggcagccagcggagaactacaagaacactcagcccatcatggacacagatggctcttacttcgtctacagcaagctcaatgtgcagaagagcaactgggaggcaggaaatactttcacctgctctgtgttacatgagggcctgcacaaccaccatactgagaagagcctctcccactctcctggtcgggccaagcggggaagcggagtgaaacagactttgaattttgaccttctcaagttggcgggagacgtggagtccaaccctggacctatgaagttgcctgttaggctgttggtgctgatgttctggattcctgcttccagcagtgacatcaagatgacccagagccctagcagcatgtacgccagcctgggcgagagagtgaccatcacctgcaaggccagccaggacatcaacagatacctgaactggttccagcagaagcctggcaagagccctaagaccctgatctacagagccaacagactgctggacggcgtgcctagcagattcagcggcagcggcagcggccaggactacagcctgaccatcagcagcctggactacgaggacatgggcatctactactgcctgcagtacgacgagttccctctgaccttcggcgacggcaccaagctggagctgaagcgggctgatgctgcaccaactgtatccatcttcccaccatccagtgagcagttaacatctggaggtgcctcagtcgtgtgcttcttgaacaacttctaccccaaagacatcaatgtcaagtggaagattgatggcagtgaacgacaaaatggcgtcctgaacagttggactgatcaggacagcaaagacagcacctacagcatgagcagcaccctcacgttgaccaaggacgagtatgaacgacataacagctatacctgtgaggccactcacaagacatcaacttcacccattgtcaagagcttcaacaggaatgagtgttagtaactcgaggacggggtgaactacgcctgaggatccgatctttttccctctgccaaaaattatggggacatcatgaagccccttgagcatctgacttctggctaataaaggaaatttattttcattgcaatagtgtgttggaattttttgtgtctctcactcggcctaggtagataagtagcatggcgggttaatcattaactacaaggaacccctagtgatggagttggccactccctctctgcgcgctcgctcgctcactgaggccgggcgaccaaaggtcgcccgacgcccgggctttgcccgggcggcctcagtgagcgagcgagcgcgcag

SEQ ID NO: 2157 - DNA, 3959 bp, Artificial Sequence
  Description of Artificial Sequence: Synthetic polynucleotide
ctgcgcgctcgctcgctcactgaggccgcccgggcaaagcccgggcgtcgggcgacctttggtcgcccggcctcagtgagcgagcgagcgcgcagagagggagtggccaactccatcactaggggttccttgtagttaatgattaacccgccatgctacttatctaccagggtaatggggatcctctagaactatagctagtcgacattgattattgactagttattaatagtaatcaattacggggtcattagttcatagcccatatatggagttccgcgttacataacttacggtaaatggcccgcctggctgaccgcccaacgacccccgcccattgacgtcaataatgacgtatgttcccatagtaacgccaatagggactttccattgacgtcaatgggtggagtatttacggtaaactgcccacttggcagtacatcaagtgtatcatatgccaagtacgccccctattgacgtcaatgacggtaaatggcccgcctggcattatgcccagtacatgaccttatgggactttcctacttggcagtacatctacgtattagtcatcgctattaccatgtcgaggccacgttctgcttcactctccccatctcccccccctccccacccccaattttgtatttatttattttttaattattttgtgcagcgatgggggcggggggggggggcgcgcgccaggcggggcggggcggggcgaggggcggggcggggcgaggcggagaggtgcggcggcagccaatcagagcggcgcgctccgaaagtttccttttatggcgaggcggcggcggcggcggccctataaaaagcgaagcgcgcggcgggcgggagcaagcttcgtttagtgaaccgtcagatcgcctggagacgccatccacgctgttttgacctccatagaagacaccgggaccgatccagcctccgcggattcgaatcccggccgggaacggtgcattggaacgcggattccccgtgccaagagtgacgtaagtaccgcctatagagtctataggcccacaaaaaatgctttcttcttttaatatacttttttgtttatcttatttctaatactttccctaatctctttctttcagggcaataatgatacaatgtatcatgcctctttgcaccattctaaagaataacagtgataatttctgggttaaggcaatagcaatatttctgcatataaatatttctgcatataaattgtaactgatgtaagaggtttcatattgctaatagcagctacaatccagctaccattctgcttttattttatggttgggataaggctggattattctgagtccaagctaggcccttttgctaatcatgttcatacctcttatcttcctcccacagctcctgggcaacgtgctggtctgtgtgctggcccatcactttggcaaagaattgggattcgaaccggtgccgccaccatgaagttgcctgttaggctgttggtgctgatgttctggattcctgcttccagcagtgacatcaagatgacccagagccctagcagcatgtacgccagcctgggcgagagagtgaccatcacctgcaaggccagccaggacatcaacagatacctgaactggttccagcagaagcctggcaagagccctaagaccctgatctacagagccaacagactgctggacggcgtgcctagcagattcagcggcagcggcagcggccaggactacagcctgaccatcagcagcctggactacgaggacatgggcatctactactgcctgcagtacgacgagttccctctgaccttcggcgacggcaccaagctggagctgaagcgggctgatgctgcaccaactgtatccatcttcccaccatccagtgagcagttaacatctggaggtgcctcagtcgtgtgcttcttgaacaacttctaccccaaagacatcaatgtcaagtggaagattgatggcagtgaacgacaaaatggcgtcctgaacagttggactgatcaggacagcaaagacagcacctacagcatgagcagcaccctcacgttgaccaaggacgagtatgaacgacataacagctatacctgtgaggccactcacaagacatcaacttcacccattgtcaagagcttcaacaggaatgagtgtggaagcggagtgaaacagactttgaattttgaccttctcaagttggcgggagacgtggagtccaaccctggacctatgaacttcgggctcagcttgattttccttgtccttgttttaaaaggtgtccagtgtgaggtgaagctggtggagagcggcggcgacctggtgaagcctggcggcagcctgaagctgagctgcgccgccagcggcttcaccttcagcagctacgccatgagctgggtgagacagaaccctgagaagagactggagtgggtggccagcatcagcaagggcggcaacacctactaccctaacagcgtgaagggcagattcaccatcagcagagacaacgccagaaacatcctgtacctgcagatgagcagcctgagaagcgaggacaccgccctgtactactgcgccagaggctggggcgactacggctggttcgcctactggggccaggtgaccctggtgaccgtgagcgccgccaaaacgacacccccatctgtctatccactggcccctggatctgctgcccaaactaactccatggtgaccctgggatgcctggtcaagggctatttccctgagccagtgacagtgacctggaactctggatccctgtccagcggtgtgcacaccttcccagctgtcctgcagtctgacctctacactctgagcagctcagtgactgtcccctccagcacctggcccagcgagaccgtcacctgcaacgttgcccacccggccagcagcaccaaggtggacaagaaaattgtgcccagggattgtggttgtaagccttgcatatgtacagtcccagaagtatcatctgtcttcatcttccccccaaagcccaaggatgtgctcaccattactctgactcctaaggtcacgtgtgttgtggtagacatcagcaaggatgatcccgaggtccagttcagctggtttgtagatgatgtggaggtgcacacagctcagacgcaaccccgggaggagcagttcaacagcactttccgctcagtcagtgaacttcccatcatgcaccaggactggctcaatggcaaggagttcaaatgcagggtcaacagtgcagctttccctgcccccatcgagaaaaccatctccaaaaccaaaggcagaccgaaggctccacaggtgtacaccattccacctcccaaggagcagatggccaaggataaagtcagtctgacctgcatgataacagacttcttccctgaagacattactgtggagtggcagtggaatgggcagccagcggagaactacaagaacactcagcccatcatggacacagatggctcttacttcgtctacagcaagctcaatgtgcagaagagcaactgggaggcaggaaatactttcacctgctctgtgttacatgagggcctgcacaaccaccatactgagaagagcctctcccactctcctggttagtaactcgaggacggggtgaactacgcctgaggatccgatctttttccctctgccaaaaattatggggacatcatgaagccccttgagcatctgacttctggctaataaaggaaatttattttcattgcaatagtgtgttggaattttttgtgtctctcactcggcctaggtagataagtagcatggcgggttaatcattaactacaaggaacccctagtgatggagttggccactccctctctgcgcgctcgctcgctcactgaggccgggcgaccaaaggtcgcccgacgcccgggctttgcccgggcggcctcagtgagcgagcgagcgcgcag

SEQ ID NO: 2158 - DNA, 4447 bp, Artificial Sequence
  Description of Artificial Sequence: Synthetic polynucleotide
ctgcgcgctcgctcgctcactgaggccgcccgggcaaagcccgggcgtcgggcgacctttggtcgcccggcctcagtgagcgagcgagcgcgcagagagggagtggccaactccatcactaggggttccttgtagttaatgattaacccgccatgctacttatctaccagggtaatggggatcctctagaactatagctagtcgacataacgcgtctagttattaatagtaatcaattacggggtcattagttcatagcccatatatggagttccgcgttacataacttacggtaaatggcccgcctggctgaccgcccaacgacccccgcccattgacgtcaataatgacgtatgttcccatagtaacgccaatagggactttccattgacgtcaatgggtggagtatttacggtaaactgcccacttggcagtacatcaagtgtatcatatgccaagtacgccccctattgacgtcaatgacggtaaatggcccgcctggcattatgcccagtacatgaccttatgggactttcctacttggcagtacatctacgtattagtcatcgctattaccatggtcgaggtgagccccacgttctgcttcactctccccatctcccccccctccccacccccaattttgtatttatttattttttaattattttgtgcagcgatgggggcggggggggggggggggcgcgcgccaggcggggcggggcggggcgaggggcggggcggggcgaggcggagaggtgcggcggcagccaatcagagcggcgcgctccgaaagtttccttttatggcgaggcggcggcggcggcggccctataaaaagcgaagcgcgcggcgggcgggagtcgctgcgcgctgccttcgccccgtgccccgctccgccgccgcctcgcgccgcccgccccggctctgactgaccgcgttactcccacaggtgagcgggcgggacggcccttctcctccgggctgtaattagcgcttggtttaatgacggcttgtttcttttctgtggctgcgtgaaagccttgaggggctccgggagggccctttgtgcggggggagcggctcggggggtgcgtgcgtgtgtgtgtgcgtggggagcgccgcgtgcggctccgcgctgcccggcggctgtgagcgctgcgggcgcggcgcggggctttgtgcgctccgcagtgtgcgcgaggggagcgcggccgggggcggtgccccgcggtgcggggggggctgcgaggggaacaaaggctgcgtgcggggtgtgtgcgtgggggggtgagcagggggtgtgggcgcgtcggtcgggctgcaaccccccctgcacccccctccccgagttgctgagcacggcccggcttcgggtgcggggctccgtacggggcgtggcgcggggctcgccgtgccgggcggggggtggcggcaggtgggggtgccgggcggggcggggccgcctcgggccggggagggctcgggggaggggcgcggcggcccccggagcgccggcggctgtcgaggcgcggcgagccgcagccattgccttttatggtaatcgtgcgagagggcgcagggacttcctttgtcccaaatctgtgcggagccgaaatctgggaggcgccgccgcaccccctctagcgggcgcggggcgaagcggtgcggcgccggcaggaaggaaatgggcggggagggccttcgtgcgtcgccgcgccgccgtccccttctccctctccagcctcggggctgtccgcggggggacggctgccttcgggggggacggggcagggcggggttcggcttctggcgtgtgaccggcggctctagagcctctgctaaccatgttcatgccttcttctttttcctacagctcctgggcaacgtgctggttattgtgctgtctcatcattttggcaaagaattcgggattcgaaccggtgccgccaccatgaagttgcctgttaggctgttggtgctgatgttctggattcctgcttccagcagtgacatcaagatgacccagagccctagcagcatgtacgccagcctgggcgagagagtgaccatcacctgcaaggccagccaggacatcaacagatacctgaactggttccagcagaagcctggcaagagccctaagaccctgatctacagagccaacagactgctggacggcgtgcctagcagattcagcggcagcggcagcggccaggactacagcctgaccatcagcagcctggactacgaggacatgggcatctactactgcctgcagtacgacgagttccctctgaccttcggcgacggcaccaagctggagctgaagcgggctgatgctgcaccaactgtatccatcttcccaccatccagtgagcagttaacatctggaggtgcctcagtcgtgtgcttcttgaacaacttctaccccaaagacatcaatgtcaagtggaagattgatggcagtgaacgacaaaatggcgtcctgaacagttggactgatcaggacagcaaagacagcacctacagcatgagcagcaccctcacgttgaccaaggacgagtatgaacgacataacagctatacctgtgaggccactcacaagacatcaacttcacccattgtcaagagcttcaacaggaatgagtgtggaagcggagtgaaacagactttgaattttgaccttctcaagttggcgggagacgtggagtccaaccctggacctatgaacttcgggctcagcttgattttccttgtccttgttttaaaaggtgtccagtgtgaggtgaagctggtggagagcggcggcgacctggtgaagcctggcggcagcctgaagctgagctgcgccgccagcggcttcaccttcagcagctacgccatgagctgggtgagacagaaccctgagaagagactggagtgggtggccagcatcagcaagggcggcaacacctactaccctaacagcgtgaagggcagattcaccatcagcagagacaacgccagaaacatcctgtacctgcagatgagcagcctgagaagcgaggacaccgccctgtactactgcgccagaggctggggcgactacggctggttcgcctactggggccaggtgaccctggtgaccgtgagcgccgccaaaacgacacccccatctgtctatccactggcccctggatctgctgcccaaactaactccatggtgaccctgggatgcctggtcaagggctatttccctgagccagtgacagtgacctggaactctggatccctgtccagcggtgtgcacaccttcccagctgtcctgcagtctgacctctacactctgagcagctcagtgactgtcccctccagcacctggcccagcgagaccgtcacctgcaacgttgcccacccggccagcagcaccaaggtggacaagaaaattgtgcccagggattgtggttgtaagccttgcatatgtacagtcccagaagtatcatctgtcttcatcttccccccaaagcccaaggatgtgctcaccattactctgactcctaaggtcacgtgtgttgtggtagacatcagcaaggatgatcccgaggtccagttcagctggtttgtagatgatgtggaggtgcacacagctcagacgcaaccccgggaggagcagttcaacagcactttccgctcagtcagtgaacttcccatcatgcaccaggactggctcaatggcaaggagttcaaatgcagggtcaacagtgcagctttccctgcccccatcgagaaaaccatctccaaaaccaaaggcagaccgaaggctccacaggtgtacaccattccacctcccaaggagcagatggccaaggataaagtcagtctgacctgcatgataacagacttcttccctgaagacattactgtggagtggcagtggaatgggcagccagcggagaactacaagaacactcagcccatcatggacacagatggctcttacttcgtctacagcaagctcaatgtgcagaagagcaactgggaggcaggaaatactttcacctgctctgtgttacatgagggcctgcacaaccaccatactgagaagagcctctcccactctcctggttagtaactcgaggacggggtgaactacgcctgaggatccgatctttttccctctgccaaaaattatggggacatcatgaagccccttgagcatctgacttctggctaataaaggaaatttattttcattgcaatagtgtgttggaattttttgtgtctctcactcggcctaggtagataagtagcatggcgggttaatcattaactacaaggaacccctagtgatggagttggccactccctctctgcgcgctcgctcgctcactgaggccgggcgaccaaaggtcgcccgacgcccgggctttgcccgggcggcctcagtgagcgagcgagcgcgcag

SEQ ID NO: 2159 - DNA, 4017 bp, Artificial Sequence
  Description of Artificial Sequence: Synthetic polynucleotide
ctgcgcgctcgctcgctcactgaggccgcccgggcaaagcccgggcgtcgggcgacctttggtcgcccggcctcagtgagcgagcgagcgcgcagagagggagtggccaactccatcactaggggttccttgtagttaatgattaacccgccatgctacttatctaccagggtaatggggatcctctagaactatagctagtcgacataacgcgtgatctaacatatcctggtgtggagtagcggacgctgctatgacagaggctcgggggcctgagctggctctgtgagctggggaggaggcagacagccaggccttgtctgcaagcagacctggcagcattgggctggccgccccccagggcctcctcttcatgcccagtgaatgactcaccttggcacagacacaatgttcggggtgggcacagtgcctgcttcccgccgcaccccagcccccctcaaatgccttccgagaagcccattgagcagggggcttgcattgcaccccagcctgacagcctggcatcttgggataaaagcagcacagccccctaggggctgcccttgctgtgtggcgccaccggcggtggagaacaaggctctattcagcctgtgcccaggaaaggggatcaggggatgcccaggcatggacagtgggtggcagggggggagaggagggctgtctgcttcccagaagtccaaggacacaaatgggtgaggggagagctctccccatagctgggctgcggcccaaccccaccccctcaggctatgccagggggtgttgccaggggcacccgggcatcgccagtctagcccactccttcataaagccctcgcatcccaggagcgagcagagccagagcaggttggagaggagacgcatcacctccgctgctcgcggggatcctctagaagcttcgtttagtgaaccgtcagatcgcctggagacgccatccacgctgttttgacctccatagaagacaccgggaccgatccagcctccgcggattcgaatcccggccgggaacggtgcattggaacgcggattccccgtgccaagagtgacgtaagtaccgcctatagagtctataggcccacaaaaaatgctttcttcttttaatatacttttttgtttatcttatttctaatactttccctaatctctttctttcagggcaataatgatacaatgtatcatgcctctttgcaccattctaaagaataacagtgataatttctgggttaaggcaatagcaatatttctgcatataaatatttctgcatataaattgtaactgatgtaagaggtttcatattgctaatagcagctacaatccagctaccattctgcttttattttatggttgggataaggctggattattctgagtccaagctaggcccttttgctaatcatgttcatacctcttatcttcctcccacagctcctgggcaacgtgctggtctgtgtgctggcccatcactttggcaaagaattgggattcgaaccggtgccgccaccatgaagttgcctgttaggctgttggtgctgatgttctggattcctgcttccagcagtgacatcaagatgacccagagccctagcagcatgtacgccagcctgggcgagagagtgaccatcacctgcaaggccagccaggacatcaacagatacctgaactggttccagcagaagcctggcaagagccctaagaccctgatctacagagccaacagactgctggacggcgtgcctagcagattcagcggcagcggcagcggccaggactacagcctgaccatcagcagcctggactacgaggacatgggcatctactactgcctgcagtacgacgagttccctctgaccttcggcgacggcaccaagctggagctgaagcgggctgatgctgcaccaactgtatccatcttcccaccatccagtgagcagttaacatctggaggtgcctcagtcgtgtgcttcttgaacaacttctaccccaaagacatcaatgtcaagtggaagattgatggcagtgaacgacaaaatggcgtcctgaacagttggactgatcaggacagcaaagacagcacctacagcatgagcagcaccctcacgttgaccaaggacgagtatgaacgacataacagctatacctgtgaggccactcacaagacatcaacttcacccattgtcaagagcttcaacaggaatgagtgtggaagcggagtgaaacagactttgaattttgaccttctcaagttggcgggagacgtggagtccaaccctggacctatgaacttcgggctcagcttgattttccttgtccttgttttaaaaggtgtccagtgtgaggtgaagctggtggagagcggcggcgacctggtgaagcctggcggcagcctgaagctgagctgcgccgccagcggcttcaccttcagcagctacgccatgagctgggtgagacagaaccctgagaagagactggagtgggtggccagcatcagcaagggcggcaacacctactaccctaacagcgtgaagggcagattcaccatcagcagagacaacgccagaaacatcctgtacctgcagatgagcagcctgagaagcgaggacaccgccctgtactactgcgccagaggctggggcgactacggctggttcgcctactggggccaggtgaccctggtgaccgtgagcgccgccaaaacgacacccccatctgtctatccactggcccctggatctgctgcccaaactaactccatggtgaccctgggatgcctggtcaagggctatttccctgagccagtgacagtgacctggaactctggatccctgtccagcggtgtgcacaccttcccagctgtcctgcagtctgacctctacactctgagcagctcagtgactgtcccctccagcacctggcccagcgagaccgtcacctgcaacgttgcccacccggccagcagcaccaaggtggacaagaaaattgtgcccagggattgtggttgtaagccttgcatatgtacagtcccagaagtatcatctgtcttcatcttccccccaaagcccaaggatgtgctcaccattactctgactcctaaggtcacgtgtgttgtggtagacatcagcaaggatgatcccgaggtccagttcagctggtttgtagatgatgtggaggtgcacacagctcagacgcaaccccgggaggagcagttcaacagcactttccgctcagtcagtgaacttcccatcatgcaccaggactggctcaatggcaaggagttcaaatgcagggtcaacagtgcagctttccctgcccccatcgagaaaaccatctccaaaaccaaaggcagaccgaaggctccacaggtgtacaccattccacctcccaaggagcagatggccaaggataaagtcagtctgacctgcatgataacagacttcttccctgaagacattactgtggagtggcagtggaatgggcagccagcggagaactacaagaacactcagcccatcatggacacagatggctcttacttcgtctacagcaagctcaatgtgcagaagagcaactgggaggcaggaaatactttcacctgctctgtgttacatgagggcctgcacaaccaccatactgagaagagcctctcccactctcctggttagtaactcgaggacggggtgaactacgcctgaggatccgatctttttccctctgccaaaaattatggggacatcatgaagccccttgagcatctgacttctggctaataaaggaaatttattttcattgcaatagtgtgttggaattttttgtgtctctcactcggcctaggtagataagtagcatggcgggttaatcattaactacaaggaacccctagtgatggagttggccactccctctctgcgcgctcgctcgctcactgaggccgggcgaccaaaggtcgcccgacgcccgggctttgcccgggcggcctcagtgagcgagcgagcgcgcag

SEQ ID NO: 2160 - DNA, 3875 bp, Artificial Sequence
  Description of Artificial Sequence: Synthetic polynucleotide
ctgcgcgctcgctcgctcactgaggccgcccgggcaaagcccgggcgtcgggcgacctttggtcgcccggcctcagtgagcgagcgagcgcgcagagagggagtggccaactccatcactaggggttccttgtagttaatgattaacccgccatgctacttatctaccagggtaatggggatcctctagaactatagctagtcgacataacgcgttagtatctgcagagggccctgcgtatgagtgcaagtgggttttaggaccaggatgaggcggggtgggggtgcctacctgacgaccgaccccgacccactggacaagcacccaacccccattccccaaattgcgcatcccctatcagagagggggaggggaaacaggatgcggcgaggcgcgtgcgcactgccagcttcagcaccgcggacagtgccttcgcccccgcctggcggcgcgcgccaccgccgcctcagcactgaaggcgcgctgacgtcactcgccggtcccccgcaaactccccttcccggccaccttggtcgcgtccgcgccgccgccggcccagccggaccgcaccacgcgaggcgcgagataggggggcacgggcgcgaccatctgcgctgcggcgccggcgactcagcgctgcctcagtctgcggtgggcagcggaggagtcgtgtcgtgcctgagagcgcagctgtgctcctgggcaccgcgcagtccgcccccgcggctcctggccagaccacccctaggaccccctgccccaagtcgcagccaagcttcgtttagtgaaccgtcagatcgcctggagacgccatccacgctgttttgacctccatagaagacaccgggaccgatccagcctccgcggattcgaatcccggccgggaacggtgcattggaacgcggattccccgtgccaagagtgacgtaagtaccgcctatagagtctataggcccacaaaaaatgctttcttcttttaatatacttttttgtttatcttatttctaatactttccctaatctctttctttcagggcaataatgatacaatgtatcatgcctctttgcaccattctaaagaataacagtgataatttctgggttaaggcaatagcaatatttctgcatataaatatttctgcatataaattgtaactgatgtaagaggtttcatattgctaatagcagctacaatccagctaccattctgcttttattttatggttgggataaggctggattattctgagtccaagctaggcccttttgctaatcatgttcatacctcttatcttcctcccacagctcctgggcaacgtgctggtctgtgtgctggcccatcactttggcaaagaattgggattcgaaccggtgccgccaccatgaagttgcctgttaggctgttggtgctgatgttctggattcctgcttccagcagtgacatcaagatgacccagagccctagcagcatgtacgccagcctgggcgagagagtgaccatcacctgcaaggccagccaggacatcaacagatacctgaactggttccagcagaagcctggcaagagccctaagaccctgatctacagagccaacagactgctggacggcgtgcctagcagattcagcggcagcggcagcggccaggactacagcctgaccatcagcagcctggactacgaggacatgggcatctactactgcctgcagtacgacgagttccctctgaccttcggcgacggcaccaagctggagctgaagcgggctgatgctgcaccaactgtatccatcttcccaccatccagtgagcagttaacatctggaggtgcctcagtcgtgtgcttcttgaacaacttctaccccaaagacatcaatgtcaagtggaagattgatggcagtgaacgacaaaatggcgtcctgaacagttggactgatcaggacagcaaagacagcacctacagcatgagcagcaccctcacgttgaccaaggacgagtatgaacgacataacagctatacctgtgaggccactcacaagacatcaacttcacccattgtcaagagcttcaacaggaatgagtgtggaagcggagtgaaacagactttgaattttgaccttctcaagttggcgggagacgtggagtccaaccctggacctatgaacttcgggctcagcttgattttccttgtccttgttttaaaaggtgtccagtgtgaggtgaagctggtggagagcggcggcgacctggtgaagcctggcggcagcctgaagctgagctgcgccgccagcggcttcaccttcagcagctacgccatgagctgggtgagacagaaccctgagaagagactggagtgggtggccagcatcagcaagggcggcaacacctactaccctaacagcgtgaagggcagattcaccatcagcagagacaacgccagaaacatcctgtacctgcagatgagcagcctgagaagcgaggacaccgccctgtactactgcgccagaggctggggcgactacggctggttcgcctactggggccaggtgaccctggtgaccgtgagcgccgccaaaacgacacccccatctgtctatccactggcccctggatctgctgcccaaactaactccatggtgaccctgggatgcctggtcaagggctatttccctgagccagtgacagtgacctggaactctggatccctgtccagcggtgtgcacaccttcccagctgtcctgcagtctgacctctacactctgagcagctcagtgactgtcccctccagcacctggcccagcgagaccgtcacctgcaacgttgcccacccggccagcagcaccaaggtggacaagaaaattgtgcccagggattgtggttgtaagccttgcatatgtacagtcccagaagtatcatctgtcttcatcttccccccaaagcccaaggatgtgctcaccattactctgactcctaaggtcacgtgtgttgtggtagacatcagcaaggatgatcccgaggtccagttcagctggtttgtagatgatgtggaggtgcacacagctcagacgcaaccccgggaggagcagttcaacagcactttccgctcagtcagtgaacttcccatcatgcaccaggactggctcaatggcaaggagttcaaatgcagggtcaacagtgcagctttccctgcccccatcgagaaaaccatctccaaaaccaaaggcagaccgaaggctccacaggtgtacaccattccacctcccaaggagcagatggccaaggataaagtcagtctgacctgcatgataacagacttcttccctgaagacattactgtggagtggcagtggaatgggcagccagcggagaactacaagaacactcagcccatcatggacacagatggctcttacttcgtctacagcaagctcaatgtgcagaagagcaactgggaggcaggaaatactttcacctgctctgtgttacatgagggcctgcacaaccaccatactgagaagagcctctcccactctcctggttagtaactcgaggacggggtgaactacgcctgaggatccgatctttttccctctgccaaaaattatggggacatcatgaagccccttgagcatctgacttctggctaataaaggaaatttattttcattgcaatagtgtgttggaattttttgtgtctctcactcggcctaggtagataagtagcatggcgggttaatcattaactacaaggaacccctagtgatggagttggccactccctctctgcgcgctcgctcgctcactgaggccgggcgaccaaaggtcgcccgacgcccgggctttgcccgggcggcctcagtgagcgagcgagcgcgcag

SEQ ID NO: 2161 - DNA, 3950 bp, Artificial Sequence
  Description of Artificial Sequence: Synthetic polynucleotide
ctgcgcgctcgctcgctcactgaggccgcccgggcaaagcccgggcgtcgggcgacctttggtcgcccggcctcagtgagcgagcgagcgcgcagagagggagtggccaactccatcactaggggttccttgtagttaatgattaacccgccatgctacttatctaccagggtaatggggatcctctagaactatagctagtcgacattgattattgactagttattaatagtaatcaattacggggtcattagttcatagcccatatatggagttccgcgttacataacttacggtaaatggcccgcctggctgaccgcccaacgacccccgcccattgacgtcaataatgacgtatgttcccatagtaacgccaatagggactttccattgacgtcaatgggtggagtatttacggtaaactgcccacttggcagtacatcaagtgtatcatatgccaagtacgccccctattgacgtcaatgacggtaaatggcccgcctggcattatgcccagtacatgaccttatgggactttcctacttggcagtacatctacgtattagtcatcgctattaccatgtcgaggccacgttctgcttcactctccccatctcccccccctccccacccccaattttgtatttatttattttttaattattttgtgcagcgatgggggcggggggggggggcgcgcgccaggcggggcggggcggggcgaggggcggggcggggcgaggcggagaggtgcggcggcagccaatcagagcggcgcgctccgaaagtttccttttatggcgaggcggcggcggcggcggccctataaaaagcgaagcgcgcggcgggcgggagcaagcttcgtttagtgaaccgtcagatcgcctggagacgccatccacgctgttttgacctccatagaagacaccgggaccgatccagcctccgcggattcgaatcccggccgggaacggtgcattggaacgcggattccccgtgccaagagtgacgtaagtaccgcctatagagtctataggcccacaaaaaatgctttcttcttttaatatacttttttgtttatcttatttctaatactttccctaatctctttctttcagggcaataatgatacaatgtatcatgcctctttgcaccattctaaagaataacagtgataatttctgggttaaggcaatagcaatatttctgcatataaatatttctgcatataaattgtaactgatgtaagaggtttcatattgctaatagcagctacaatccagctaccattctgcttttattttatggttgggataaggctggattattctgagtccaagctaggcccttttgctaatcatgttcatacctcttatcttcctcccacagctcctgggcaacgtgctggtctgtgtgctggcccatcactttggcaaagaattgggattcgaaccggtgccgccaccatgaacttcgggctcagcttgattttccttgtccttgttttaaaaggtgtccagtgtgaggtgaagctggtggagagcggcggcgacctggtgaagcctggcggcagcctgaagctgagctgcgccgccagcggcttcaccttcagcagctacgccatgagctgggtgagacagaaccctgagaagagactggagtgggtggccagcatcagcaagggcggcaacacctactaccctaacagcgtgaagggcagattcaccatcagcagagacaacgccagaaacatcctgtacctgcagatgagcagcctgagaagcgaggacaccgccctgtactactgcgccagaggctggggcgactacggctggttcgcctactggggccaggtgaccctggtgaccgtgagcgccgccaaaacgacacccccatctgtctatccactggcccctggatctgctgcccaaactaactccatggtgaccctgggatgcctggtcaagggctatttccctgagccagtgacagtgacctggaactctggatccctgtccagcggtgtgcacaccttcccagctgtcctgcagtctgacctctacactctgagcagctcagtgactgtcccctccagcacctggcccagcgagaccgtcacctgcaacgttgcccacccggccagcagcaccaaggtggacaagaaaattgtgcccagggattgtggttgtaagccttgcatatgtacagtcccagaagtatcatctgtcttcatcttccccccaaagcccaaggatgtgctcaccattactctgactcctaaggtcacgtgtgttgtggtagacatcagcaaggatgatcccgaggtccagttcagctggtttgtagatgatgtggaggtgcacacagctcagacgcaaccccgggaggagcagttcaacagcactttccgctcagtcagtgaacttcccatcatgcaccaggactggctcaatggcaaggagttcaaatgcagggtcaacagtgcagctttccctgcccccatcgagaaaaccatctccaaaaccaaaggcagaccgaaggctccacaggtgtacaccattccacctcccaaggagcagatggccaaggataaagtcagtctgacctgcatgataacagacttcttccctgaagacattactgtggagtggcagtggaatgggcagccagcggagaactacaagaacactcagcccatcatggacacagatggctcttacttcgtctacagcaagctcaatgtgcagaagagcaactgggaggcaggaaatactttcacctgctctgtgttacatgagggcctgcacaaccaccatactgagaagagcctctcccactctcctggtagaaagaggcgagagggcagaggaagtcttctaacatgcggtgacgtggaggagaatcccggccctatgaagttgcctgttaggctgttggtgctgatgttctggattcctgcttccagcagtgacatcaagatgacccagagccctagcagcatgtacgccagcctgggcgagagagtgaccatcacctgcaaggccagccaggacatcaacagatacctgaactggttccagcagaagcctggcaagagccctaagaccctgatctacagagccaacagactgctggacggcgtgcctagcagattcagcggcagcggcagcggccaggactacagcctgaccatcagcagcctggactacgaggacatgggcatctactactgcctgcagtacgacgagttccctctgaccttcggcgacggcaccaagctggagctgaagcgggctgatgctgcaccaactgtatccatcttcccaccatccagtgagcagttaacatctggaggtgcctcagtcgtgtgcttcttgaacaacttctaccccaaagacatcaatgtcaagtggaagattgatggcagtgaacgacaaaatggcgtcctgaacagttggactgatcaggacagcaaagacagcacctacagcatgagcagcaccctcacgttgaccaaggacgagtatgaacgacataacagctatacctgtgaggccactcacaagacatcaacttcacccattgtcaagagcttcaacaggaatgagtgttagtaactcgaggacggggtgaactacgcctgaggatccgatctttttccctctgccaaaaattatggggacatcatgaagccccttgagcatctgacttctggctaataaaggaaatttattttcattgcaatagtgtgttggaattttttgtgtctctcactcggcctaggtagataagtagcatggcgggttaatcattaactacaaggaacccctagtgatggagttggccactccctctctgcgcgctcgctcgctcactgaggccgggcgaccaaaggtcgcccgacgcccgggctttgcccgggcggcctcagtgagcgagcgagcgcgcag

SEQ ID NO: 2162 - DNA, 4438 bp, Artificial Sequence
  Description of Artificial Sequence: Synthetic polynucleotide
ctgcgcgctcgctcgctcactgaggccgcccgggcaaagcccgggcgtcgggcgacctttggtcgcccggcctcagtgagcgagcgagcgcgcagagagggagtggccaactccatcactaggggttccttgtagttaatgattaacccgccatgctacttatctaccagggtaatggggatcctctagaactatagctagtcgacataacgcgtctagttattaatagtaatcaattacggggtcattagttcatagcccatatatggagttccgcgttacataacttacggtaaatggcccgcctggctgaccgcccaacgacccccgcccattgacgtcaataatgacgtatgttcccatagtaacgccaatagggactttccattgacgtcaatgggtggagtatttacggtaaactgcccacttggcagtacatcaagtgtatcatatgccaagtacgccccctattgacgtcaatgacggtaaatggcccgcctggcattatgcccagtacatgaccttatgggactttcctacttggcagtacatctacgtattagtcatcgctattaccatggtcgaggtgagccccacgttctgcttcactctccccatctcccccccctccccacccccaattttgtatttatttattttttaattattttgtgcagcgatgggggcggggggggggggggggcgcgcgccaggcggggcggggcggggcgaggggcggggcggggcgaggcggagaggtgcggcggcagccaatcagagcggcgcgctccgaaagtttccttttatggcgaggcggcggcggcggcggccctataaaaagcgaagcgcgcggcgggcgggagtcgctgcgcgctgccttcgccccgtgccccgctccgccgccgcctcgcgccgcccgccccggctctgactgaccgcgttactcccacaggtgagcgggcgggacggcccttctcctccgggctgtaattagcgcttggtttaatgacggcttgtttcttttctgtggctgcgtgaaagccttgaggggctccgggagggccctttgtgcggggggagcggctcggggggtgcgtgcgtgtgtgtgtgcgtggggagcgccgcgtgcggctccgcgctgcccggcggctgtgagcgctgcgggcgcggcgcggggctttgtgcgctccgcagtgtgcgcgaggggagcgcggccgggggcggtgccccgcggtgcggggggggctgcgaggggaacaaaggctgcgtgcggggtgtgtgcgtgggggggtgagcagggggtgtgggcgcgtcggtcgggctgcaaccccccctgcacccccctccccgagttgctgagcacggcccggcttcgggtgcggggctccgtacggggcgtggcgcggggctcgccgtgccgggcggggggtggcggcaggtgggggtgccgggcggggcggggccgcctcgggccggggagggctcgggggaggggcgcggcggcccccggagcgccggcggctgtcgaggcgcggcgagccgcagccattgccttttatggtaatcgtgcgagagggcgcagggacttcctttgtcccaaatctgtgcggagccgaaatctgggaggcgccgccgcaccccctctagcgggcgcggggcgaagcggtgcggcgccggcaggaaggaaatgggcggggagggccttcgtgcgtcgccgcgccgccgtccccttctccctctccagcctcggggctgtccgcggggggacggctgccttcgggggggacggggcagggcggggttcggcttctggcgtgtgaccggcggctctagagcctctgctaaccatgttcatgccttcttctttttcctacagctcctgggcaacgtgctggttattgtgctgtctcatcattttggcaaagaattcgggattcgaaccggtgccgccaccatgaacttcgggctcagcttgattttccttgtccttgttttaaaaggtgtccagtgtgaggtgaagctggtggagagcggcggcgacctggtgaagcctggcggcagcctgaagctgagctgcgccgccagcggcttcaccttcagcagctacgccatgagctgggtgagacagaaccctgagaagagactggagtgggtggccagcatcagcaagggcggcaacacctactaccctaacagcgtgaagggcagattcaccatcagcagagacaacgccagaaacatcctgtacctgcagatgagcagcctgagaagcgaggacaccgccctgtactactgcgccagaggctggggcgactacggctggttcgcctactggggccaggtgaccctggtgaccgtgagcgccgccaaaacgacacccccatctgtctatccactggcccctggatctgctgcccaaactaactccatggtgaccctgggatgcctggtcaagggctatttccctgagccagtgacagtgacctggaactctggatccctgtccagcggtgtgcacaccttcccagctgtcctgcagtctgacctctacactctgagcagctcagtgactgtcccctccagcacctggcccagcgagaccgtcacctgcaacgttgcccacccggccagcagcaccaaggtggacaagaaaattgtgcccagggattgtggttgtaagccttgcatatgtacagtcccagaagtatcatctgtcttcatcttccccccaaagcccaaggatgtgctcaccattactctgactcctaaggtcacgtgtgttgtggtagacatcagcaaggatgatcccgaggtccagttcagctggtttgtagatgatgtggaggtgcacacagctcagacgcaaccccgggaggagcagttcaacagcactttccgctcagtcagtgaacttcccatcatgcaccaggactggctcaatggcaaggagttcaaatgcagggtcaacagtgcagctttccctgcccccatcgagaaaaccatctccaaaaccaaaggcagaccgaaggctccacaggtgtacaccattccacctcccaaggagcagatggccaaggataaagtcagtctgacctgcatgataacagacttcttccctgaagacattactgtggagtggcagtggaatgggcagccagcggagaactacaagaacactcagcccatcatggacacagatggctcttacttcgtctacagcaagctcaatgtgcagaagagcaactgggaggcaggaaatactttcacctgctctgtgttacatgagggcctgcacaaccaccatactgagaagagcctctcccactctcctggtagaaagaggcgagagggcagaggaagtcttctaacatgcggtgacgtggaggagaatcccggccctatgaagttgcctgttaggctgttggtgctgatgttctggattcctgcttccagcagtgacatcaagatgacccagagccctagcagcatgtacgccagcctgggcgagagagtgaccatcacctgcaaggccagccaggacatcaacagatacctgaactggttccagcagaagcctggcaagagccctaagaccctgatctacagagccaacagactgctggacggcgtgcctagcagattcagcggcagcggcagcggccaggactacagcctgaccatcagcagcctggactacgaggacatgggcatctactactgcctgcagtacgacgagttccctctgaccttcggcgacggcaccaagctggagctgaagcgggctgatgctgcaccaactgtatccatcttcccaccatccagtgagcagttaacatctggaggtgcctcagtcgtgtgcttcttgaacaacttctaccccaaagacatcaatgtcaagtggaagattgatggcagtgaacgacaaaatggcgtcctgaacagttggactgatcaggacagcaaagacagcacctacagcatgagcagcaccctcacgttgaccaaggacgagtatgaacgacataacagctatacctgtgaggccactcacaagacatcaacttcacccattgtcaagagcttcaacaggaatgagtgttagtaactcgaggacggggtgaactacgcctgaggatccgatctttttccctctgccaaaaattatggggacatcatgaagccccttgagcatctgacttctggctaataaaggaaatttattttcattgcaatagtgtgttggaattttttgtgtctctcactcggcctaggtagataagtagcatggcgggttaatcattaactacaaggaacccctagtgatggagttggccactccctctctgcgcgctcgctcgctcactgaggccgggcgaccaaaggtcgcccgacgcccgggctttgcccgggcggcctcagtgagcgagcgagcgcgcag

SEQ ID NO: 2163 - DNA, 4008 bp, Artificial Sequence
  Description of Artificial Sequence: Synthetic polynucleotide
ctgcgcgctcgctcgctcactgaggccgcccgggcaaagcccgggcgtcgggcgacctttggtcgcccggcctcagtgagcgagcgagcgcgcagagagggagtggccaactccatcactaggggttccttgtagttaatgattaacccgccatgctacttatctaccagggtaatggggatcctctagaactatagctagtcgacataacgcgtgatctaacatatcctggtgtggagtagcggacgctgctatgacagaggctcgggggcctgagctggctctgtgagctggggaggaggcagacagccaggccttgtctgcaagcagacctggcagcattgggctggccgccccccagggcctcctcttcatgcccagtgaatgactcaccttggcacagacacaatgttcggggtgggcacagtgcctgcttcccgccgcaccccagcccccctcaaatgccttccgagaagcccattgagcagggggcttgcattgcaccccagcctgacagcctggcatcttgggataaaagcagcacagccccctaggggctgcccttgctgtgtggcgccaccggcggtggagaacaaggctctattcagcctgtgcccaggaaaggggatcaggggatgcccaggcatggacagtgggtggcagggggggagaggagggctgtctgcttcccagaagtccaaggacacaaatgggtgaggggagagctctccccatagctgggctgcggcccaaccccaccccctcaggctatgccagggggtgttgccaggggcacccgggcatcgccagtctagcccactccttcataaagccctcgcatcccaggagcgagcagagccagagcaggttggagaggagacgcatcacctccgctgctcgcggggatcctctagaagcttcgtttagtgaaccgtcagatcgcctggagacgccatccacgctgttttgacctccatagaagacaccgggaccgatccagcctccgcggattcgaatcccggccgggaacggtgcattggaacgcggattccccgtgccaagagtgacgtaagtaccgcctatagagtctataggcccacaaaaaatgctttcttcttttaatatacttttttgtttatcttatttctaatactttccctaatctctttctttcagggcaataatgatacaatgtatcatgcctctttgcaccattctaaagaataacagtgataatttctgggttaaggcaatagcaatatttctgcatataaatatttctgcatataaattgtaactgatgtaagaggtttcatattgctaatagcagctacaatccagctaccattctgcttttattttatggttgggataaggctggattattctgagtccaagctaggcccttttgctaatcatgttcatacctcttatcttcctcccacagctcctgggcaacgtgctggtctgtgtgctggcccatcactttggcaaagaattgggattcgaaccggtgccgccaccatgaacttcgggctcagcttgattttccttgtccttgttttaaaaggtgtccagtgtgaggtgaagctggtggagagcggcggcgacctggtgaagcctggcggcagcctgaagctgagctgcgccgccagcggcttcaccttcagcagctacgccatgagctgggtgagacagaaccctgagaagagactggagtgggtggccagcatcagcaagggcggcaacacctactaccctaacagcgtgaagggcagattcaccatcagcagagacaacgccagaaacatcctgtacctgcagatgagcagcctgagaagcgaggacaccgccctgtactactgcgccagaggctggggcgactacggctggttcgcctactggggccaggtgaccctggtgaccgtgagcgccgccaaaacgacacccccatctgtctatccactggcccctggatctgctgcccaaactaactccatggtgaccctgggatgcctggtcaagggctatttccctgagccagtgacagtgacctggaactctggatccctgtccagcggtgtgcacaccttcccagctgtcctgcagtctgacctctacactctgagcagctcagtgactgtcccctccagcacctggcccagcgagaccgtcacctgcaacgttgcccacccggccagcagcaccaaggtggacaagaaaattgtgcccagggattgtggttgtaagccttgcatatgtacagtcccagaagtatcatctgtcttcatcttccccccaaagcccaaggatgtgctcaccattactctgactcctaaggtcacgtgtgttgtggtagacatcagcaaggatgatcccgaggtccagttcagctggtttgtagatgatgtggaggtgcacacagctcagacgcaaccccgggaggagcagttcaacagcactttccgctcagtcagtgaacttcccatcatgcaccaggactggctcaatggcaaggagttcaaatgcagggtcaacagtgcagctttccctgcccccatcgagaaaaccatctccaaaaccaaaggcagaccgaaggctccacaggtgtacaccattccacctcccaaggagcagatggccaaggataaagtcagtctgacctgcatgataacagacttcttccctgaagacattactgtggagtggcagtggaatgggcagccagcggagaactacaagaacactcagcccatcatggacacagatggctcttacttcgtctacagcaagctcaatgtgcagaagagcaactgggaggcaggaaatactttcacctgctctgtgttacatgagggcctgcacaaccaccatactgagaagagcctctcccactctcctggtagaaagaggcgagagggcagaggaagtcttctaacatgcggtgacgtggaggagaatcccggccctatgaagttgcctgttaggctgttggtgctgatgttctggattcctgcttccagcagtgacatcaagatgacccagagccctagcagcatgtacgccagcctgggcgagagagtgaccatcacctgcaaggccagccaggacatcaacagatacctgaactggttccagcagaagcctggcaagagccctaagaccctgatctacagagccaacagactgctggacggcgtgcctagcagattcagcggcagcggcagcggccaggactacagcctgaccatcagcagcctggactacgaggacatgggcatctactactgcctgcagtacgacgagttccctctgaccttcggcgacggcaccaagctggagctgaagcgggctgatgctgcaccaactgtatccatcttcccaccatccagtgagcagttaacatctggaggtgcctcagtcgtgtgcttcttgaacaacttctaccccaaagacatcaatgtcaagtggaagattgatggcagtgaacgacaaaatggcgtcctgaacagttggactgatcaggacagcaaagacagcacctacagcatgagcagcaccctcacgttgaccaaggacgagtatgaacgacataacagctatacctgtgaggccactcacaagacatcaacttcacccattgtcaagagcttcaacaggaatgagtgttagtaactcgaggacggggtgaactacgcctgaggatccgatctttttccctctgccaaaaattatggggacatcatgaagccccttgagcatctgacttctggctaataaaggaaatttattttcattgcaatagtgtgttggaattttttgtgtctctcactcggcctaggtagataagtagcatggcgggttaatcattaactacaaggaacccctagtgatggagttggccactccctctctgcgcgctcgctcgctcactgaggccgggcgaccaaaggtcgcccgacgcccgggctttgcccgggcggcctcagtgagcgagcgagcgcgcag

SEQ ID NO: 2164 - DNA, 3866 bp, Artificial Sequence
  Description of Artificial Sequence: Synthetic polynucleotide
ctgcgcgctcgctcgctcactgaggccgcccgggcaaagcccgggcgtcgggcgacctttggtcgcccggcctcagtgagcgagcgagcgcgcagagagggagtggccaactccatcactaggggttccttgtagttaatgattaacccgccatgctacttatctaccagggtaatggggatcctctagaactatagctagtcgacataacgcgttagtatctgcagagggccctgcgtatgagtgcaagtgggttttaggaccaggatgaggcggggtgggggtgcctacctgacgaccgaccccgacccactggacaagcacccaacccccattccccaaattgcgcatcccctatcagagagggggaggggaaacaggatgcggcgaggcgcgtgcgcactgccagcttcagcaccgcggacagtgccttcgcccccgcctggcggcgcgcgccaccgccgcctcagcactgaaggcgcgctgacgtcactcgccggtcccccgcaaactccccttcccggccaccttggtcgcgtccgcgccgccgccggcccagccggaccgcaccacgcgaggcgcgagataggggggcacgggcgcgaccatctgcgctgcggcgccggcgactcagcgctgcctcagtctgcggtgggcagcggaggagtcgtgtcgtgcctgagagcgcagctgtgctcctgggcaccgcgcagtccgcccccgcggctcctggccagaccacccctaggaccccctgccccaagtcgcagccaagcttcgtttagtgaaccgtcagatcgcctggagacgccatccacgctgttttgacctccatagaagacaccgggaccgatccagcctccgcggattcgaatcccggccgggaacggtgcattggaacgcggattccccgtgccaagagtgacgtaagtaccgcctatagagtctataggcccacaaaaaatgctttcttcttttaatatacttttttgtttatcttatttctaatactttccctaatctctttctttcagggcaataatgatacaatgtatcatgcctctttgcaccattctaaagaataacagtgataatttctgggttaaggcaatagcaatatttctgcatataaatatttctgcatataaattgtaactgatgtaagaggtttcatattgctaatagcagctacaatccagctaccattctgcttttattttatggttgggataaggctggattattctgagtccaagctaggcccttttgctaatcatgttcatacctcttatcttcctcccacagctcctgggcaacgtgctggtctgtgtgctggcccatcactttggcaaagaattgggattcgaaccggtgccgccaccatgaacttcgggctcagcttgattttccttgtccttgttttaaaaggtgtccagtgtgaggtgaagctggtggagagcggcggcgacctggtgaagcctggcggcagcctgaagctgagctgcgccgccagcggcttcaccttcagcagctacgccatgagctgggtgagacagaaccctgagaagagactggagtgggtggccagcatcagcaagggcggcaacacctactaccctaacagcgtgaagggcagattcaccatcagcagagacaacgccagaaacatcctgtacctgcagatgagcagcctgagaagcgaggacaccgccctgtactactgcgccagaggctggggcgactacggctggttcgcctactggggccaggtgaccctggtgaccgtgagcgccgccaaaacgacacccccatctgtctatccactggcccctggatctgctgcccaaactaactccatggtgaccctgggatgcctggtcaagggctatttccctgagccagtgacagtgacctggaactctggatccctgtccagcggtgtgcacaccttcccagctgtcctgcagtctgacctctacactctgagcagctcagtgactgtcccctccagcacctggcccagcgagaccgtcacctgcaacgttgcccacccggccagcagcaccaaggtggacaagaaaattgtgcccagggattgtggttgtaagccttgcatatgtacagtcccagaagtatcatctgtcttcatcttccccccaaagcccaaggatgtgctcaccattactctgactcctaaggtcacgtgtgttgtggtagacatcagcaaggatgatcccgaggtccagttcagctggtttgtagatgatgtggaggtgcacacagctcagacgcaaccccgggaggagcagttcaacagcactttccgctcagtcagtgaacttcccatcatgcaccaggactggctcaatggcaaggagttcaaatgcagggtcaacagtgcagctttccctgcccccatcgagaaaaccatctccaaaaccaaaggcagaccgaaggctccacaggtgtacaccattccacctcccaaggagcagatggccaaggataaagtcagtctgacctgcatgataacagacttcttccctgaagacattactgtggagtggcagtggaatgggcagccagcggagaactacaagaacactcagcccatcatggacacagatggctcttacttcgtctacagcaagctcaatgtgcagaagagcaactgggaggcaggaaatactttcacctgctctgtgttacatgagggcctgcacaaccaccatactgagaagagcctctcccactctcctggtagaaagaggcgagagggcagaggaagtcttctaacatgcggtgacgtggaggagaatcccggccctatgaagttgcctgttaggctgttggtgctgatgttctggattcctgcttccagcagtgacatcaagatgacccagagccctagcagcatgtacgccagcctgggcgagagagtgaccatcacctgcaaggccagccaggacatcaacagatacctgaactggttccagcagaagcctggcaagagccctaagaccctgatctacagagccaacagactgctggacggcgtgcctagcagattcagcggcagcggcagcggccaggactacagcctgaccatcagcagcctggactacgaggacatgggcatctactactgcctgcagtacgacgagttccctctgaccttcggcgacggcaccaagctggagctgaagcgggctgatgctgcaccaactgtatccatcttcccaccatccagtgagcagttaacatctggaggtgcctcagtcgtgtgcttcttgaacaacttctaccccaaagacatcaatgtcaagtggaagattgatggcagtgaacgacaaaatggcgtcctgaacagttggactgatcaggacagcaaagacagcacctacagcatgagcagcaccctcacgttgaccaaggacgagtatgaacgacataacagctatacctgtgaggccactcacaagacatcaacttcacccattgtcaagagcttcaacaggaatgagtgttagtaactcgaggacggggtgaactacgcctgaggatccgatctttttccctctgccaaaaattatggggacatcatgaagccccttgagcatctgacttctggctaataaaggaaatttattttcattgcaatagtgtgttggaattttttgtgtctctcactcggcctaggtagataagtagcatggcgggttaatcattaactacaaggaacccctagtgatggagttggccactccctctctgcgcgctcgctcgctcactgaggccgggcgaccaaaggtcgcccgacgcccgggctttgcccgggcggcctcagtgagcgagcgagcgcgcag

SEQ ID NO: 2165 - DNA, 3938 bp, Artificial Sequence
  Description of Artificial Sequence: Synthetic polynucleotide
ctgcgcgctcgctcgctcactgaggccgcccgggcaaagcccgggcgtcgggcgacctttggtcgcccggcctcagtgagcgagcgagcgcgcagagagggagtggccaactccatcactaggggttccttgtagttaatgattaacccgccatgctacttatctaccagggtaatggggatcctctagaactatagctagtcgacattgattattgactagttattaatagtaatcaattacggggtcattagttcatagcccatatatggagttccgcgttacataacttacggtaaatggcccgcctggctgaccgcccaacgacccccgcccattgacgtcaataatgacgtatgttcccatagtaacgccaatagggactttccattgacgtcaatgggtggagtatttacggtaaactgcccacttggcagtacatcaagtgtatcatatgccaagtacgccccctattgacgtcaatgacggtaaatggcccgcctggcattatgcccagtacatgaccttatgggactttcctacttggcagtacatctacgtattagtcatcgctattaccatgtcgaggccacgttctgcttcactctccccatctcccccccctccccacccccaattttgtatttatttattttttaattattttgtgcagcgatgggggcggggggggggggcgcgcgccaggcggggcggggcggggcgaggggcggggcggggcgaggcggagaggtgcggcggcagccaatcagagcggcgcgctccgaaagtttccttttatggcgaggcggcggcggcggcggccctataaaaagcgaagcgcgcggcgggcgggagcaagcttcgtttagtgaaccgtcagatcgcctggagacgccatccacgctgttttgacctccatagaagacaccgggaccgatccagcctccgcggattcgaatcccggccgggaacggtgcattggaacgcggattccccgtgccaagagtgacgtaagtaccgcctatagagtctataggcccacaaaaaatgctttcttcttttaatatacttttttgtttatcttatttctaatactttccctaatctctttctttcagggcaataatgatacaatgtatcatgcctctttgcaccattctaaagaataacagtgataatttctgggttaaggcaatagcaatatttctgcatataaatatttctgcatataaattgtaactgatgtaagaggtttcatattgctaatagcagctacaatccagctaccattctgcttttattttatggttgggataaggctggattattctgagtccaagctaggcccttttgctaatcatgttcatacctcttatcttcctcccacagctcctgggcaacgtgctggtctgtgtgctggcccatcactttggcaaagaattgggattcgaaccggtgccgccaccatgaagttgcctgttaggctgttggtgctgatgttctggattcctgcttccagcagtgacatcaagatgacccagagccctagcagcatgtacgccagcctgggcgagagagtgaccatcacctgcaaggccagccaggacatcaacagatacctgaactggttccagcagaagcctggcaagagccctaagaccctgatctacagagccaacagactgctggacggcgtgcctagcagattcagcggcagcggcagcggccaggactacagcctgaccatcagcagcctggactacgaggacatgggcatctactactgcctgcagtacgacgagttccctctgaccttcggcgacggcaccaagctggagctgaagcgggctgatgctgcaccaactgtatccatcttcccaccatccagtgagcagttaacatctggaggtgcctcagtcgtgtgcttcttgaacaacttctaccccaaagacatcaatgtcaagtggaagattgatggcagtgaacgacaaaatggcgtcctgaacagttggactgatcaggacagcaaagacagcacctacagcatgagcagcaccctcacgttgaccaaggacgagtatgaacgacataacagctatacctgtgaggccactcacaagacatcaacttcacccattgtcaagagcttcaacaggaatgagtgtgagggcagaggaagtcttctaacatgcggtgacgtggaggagaatcccggccctatgaacttcgggctcagcttgattttccttgtccttgttttaaaaggtgtccagtgtgaggtgaagctggtggagagcggcggcgacctggtgaagcctggcggcagcctgaagctgagctgcgccgccagcggcttcaccttcagcagctacgccatgagctgggtgagacagaaccctgagaagagactggagtgggtggccagcatcagcaagggcggcaacacctactaccctaacagcgtgaagggcagattcaccatcagcagagacaacgccagaaacatcctgtacctgcagatgagcagcctgagaagcgaggacaccgccctgtactactgcgccagaggctggggcgactacggctggttcgcctactggggccaggtgaccctggtgaccgtgagcgccgccaaaacgacacccccatctgtctatccactggcccctggatctgctgcccaaactaactccatggtgaccctgggatgcctggtcaagggctatttccctgagccagtgacagtgacctggaactctggatccctgtccagcggtgtgcacaccttcccagctgtcctgcagtctgacctctacactctgagcagctcagtgactgtcccctccagcacctggcccagcgagaccgtcacctgcaacgttgcccacccggccagcagcaccaaggtggacaagaaaattgtgcccagggattgtggttgtaagccttgcatatgtacagtcccagaagtatcatctgtcttcatcttccccccaaagcccaaggatgtgctcaccattactctgactcctaaggtcacgtgtgttgtggtagacatcagcaaggatgatcccgaggtccagttcagctggtttgtagatgatgtggaggtgcacacagctcagacgcaaccccgggaggagcagttcaacagcactttccgctcagtcagtgaacttcccatcatgcaccaggactggctcaatggcaaggagttcaaatgcagggtcaacagtgcagctttccctgcccccatcgagaaaaccatctccaaaaccaaaggcagaccgaaggctccacaggtgtacaccattccacctcccaaggagcagatggccaaggataaagtcagtctgacctgcatgataacagacttcttccctgaagacattactgtggagtggcagtggaatgggcagccagcggagaactacaagaacactcagcccatcatggacacagatggctcttacttcgtctacagcaagctcaatgtgcagaagagcaactgggaggcaggaaatactttcacctgctctgtgttacatgagggcctgcacaaccaccatactgagaagagcctctcccactctcctggttagtaactcgaggacggggtgaactacgcctgaggatccgatctttttccctctgccaaaaattatggggacatcatgaagccccttgagcatctgacttctggctaataaaggaaatttattttcattgcaatagtgtgttggaattttttgtgtctctcactcggcctaggtagataagtagcatggcgggttaatcattaactacaaggaacccctagtgatggagttggccactccctctctgcgcgctcgctcgctcactgaggccgggcgaccaaaggtcgcccgacgcccgggctttgcccgggcggcctcagtgagcgagcgagcgcgcag

SEQ ID NO: 2166 - DNA, 4426 bp, Artificial Sequence
  Description of Artificial Sequence: Synthetic polynucleotide
ctgcgcgctcgctcgctcactgaggccgcccgggcaaagcccgggcgtcgggcgacctttggtcgcccggcctcagtgagcgagcgagcgcgcagagagggagtggccaactccatcactaggggttccttgtagttaatgattaacccgccatgctacttatctaccagggtaatggggatcctctagaactatagctagtcgacataacgcgtctagttattaatagtaatcaattacggggtcattagttcatagcccatatatggagttccgcgttacataacttacggtaaatggcccgcctggctgaccgcccaacgacccccgcccattgacgtcaataatgacgtatgttcccatagtaacgccaatagggactttccattgacgtcaatgggtggagtatttacggtaaactgcccacttggcagtacatcaagtgtatcatatgccaagtacgccccctattgacgtcaatgacggtaaatggcccgcctggcattatgcccagtacatgaccttatgggactttcctacttggcagtacatctacgtattagtcatcgctattaccatggtcgaggtgagccccacgttctgcttcactctccccatctcccccccctccccacccccaattttgtatttatttattttttaattattttgtgcagcgatgggggcggggggggggggggggcgcgcgccaggcggggcggggcggggcgaggggcggggcggggcgaggcggagaggtgcggcggcagccaatcagagcggcgcgctccgaaagtttccttttatggcgaggcggcggcggcggcggccctataaaaagcgaagcgcgcggcgggcgggagtcgctgcgcgctgccttcgccccgtgccccgctccgccgccgcctcgcgccgcccgccccggctctgactgaccgcgttactcccacaggtgagcgggcgggacggcccttctcctccgggctgtaattagcgcttggtttaatgacggcttgtttcttttctgtggctgcgtgaaagccttgaggggctccgggagggccctttgtgcggggggagcggctcggggggtgcgtgcgtgtgtgtgtgcgtggggagcgccgcgtgcggctccgcgctgcccggcggctgtgagcgctgcgggcgcggcgcggggctttgtgcgctccgcagtgtgcgcgaggggagcgcggccgggggcggtgccccgcggtgcggggggggctgcgaggggaacaaaggctgcgtgcggggtgtgtgcgtgggggggtgagcagggggtgtgggcgcgtcggtcgggctgcaaccccccctgcacccccctccccgagttgctgagcacggcccggcttcgggtgcggggctccgtacggggcgtggcgcggggctcgccgtgccgggcggggggtggcggcaggtgggggtgccgggcggggcggggccgcctcgggccggggagggctcgggggaggggcgcggcggcccccggagcgccggcggctgtcgaggcgcggcgagccgcagccattgccttttatggtaatcgtgcgagagggcgcagggacttcctttgtcccaaatctgtgcggagccgaaatctgggaggcgccgccgcaccccctctagcgggcgcggggcgaagcggtgcggcgccggcaggaaggaaatgggcggggagggccttcgtgcgtcgccgcgccgccgtccccttctccctctccagcctcggggctgtccgcggggggacggctgccttcgggggggacggggcagggcggggttcggcttctggcgtgtgaccggcggctctagagcctctgctaaccatgttcatgccttcttctttttcctacagctcctgggcaacgtgctggttattgtgctgtctcatcattttggcaaagaattcgggattcgaaccggtgccgccaccatgaagttgcctgttaggctgttggtgctgatgttctggattcctgcttccagcagtgacatcaagatgacccagagccctagcagcatgtacgccagcctgggcgagagagtgaccatcacctgcaaggccagccaggacatcaacagatacctgaactggttccagcagaagcctggcaagagccctaagaccctgatctacagagccaacagactgctggacggcgtgcctagcagattcagcggcagcggcagcggccaggactacagcctgaccatcagcagcctggactacgaggacatgggcatctactactgcctgcagtacgacgagttccctctgaccttcggcgacggcaccaagctggagctgaagcgggctgatgctgcaccaactgtatccatcttcccaccatccagtgagcagttaacatctggaggtgcctcagtcgtgtgcttcttgaacaacttctaccccaaagacatcaatgtcaagtggaagattgatggcagtgaacgacaaaatggcgtcctgaacagttggactgatcaggacagcaaagacagcacctacagcatgagcagcaccctcacgttgaccaaggacgagtatgaacgacataacagctatacctgtgaggccactcacaagacatcaacttcacccattgtcaagagcttcaacaggaatgagtgtgagggcagaggaagtcttctaacatgcggtgacgtggaggagaatcccggccctatgaacttcgggctcagcttgattttccttgtccttgttttaaaaggtgtccagtgtgaggtgaagctggtggagagcggcggcgacctggtgaagcctggcggcagcctgaagctgagctgcgccgccagcggcttcaccttcagcagctacgccatgagctgggtgagacagaaccctgagaagagactggagtgggtggccagcatcagcaagggcggcaacacctactaccctaacagcgtgaagggcagattcaccatcagcagagacaacgccagaaacatcctgtacctgcagatgagcagcctgagaagcgaggacaccgccctgtactactgcgccagaggctggggcgactacggctggttcgcctactggggccaggtgaccctggtgaccgtgagcgccgccaaaacgacacccccatctgtctatccactggcccctggatctgctgcccaaactaactccatggtgaccctgggatgcctggtcaagggctatttccctgagccagtgacagtgacctggaactctggatccctgtccagcggtgtgcacaccttcccagctgtcctgcagtctgacctctacactctgagcagctcagtgactgtcccctccagcacctggcccagcgagaccgtcacctgcaacgttgcccacccggccagcagcaccaaggtggacaagaaaattgtgcccagggattgtggttgtaagccttgcatatgtacagtcccagaagtatcatctgtcttcatcttccccccaaagcccaaggatgtgctcaccattactctgactcctaaggtcacgtgtgttgtggtagacatcagcaaggatgatcccgaggtccagttcagctggtttgtagatgatgtggaggtgcacacagctcagacgcaaccccgggaggagcagttcaacagcactttccgctcagtcagtgaacttcccatcatgcaccaggactggctcaatggcaaggagttcaaatgcagggtcaacagtgcagctttccctgcccccatcgagaaaaccatctccaaaaccaaaggcagaccgaaggctccacaggtgtacaccattccacctcccaaggagcagatggccaaggataaagtcagtctgacctgcatgataacagacttcttccctgaagacattactgtggagtggcagtggaatgggcagccagcggagaactacaagaacactcagcccatcatggacacagatggctcttacttcgtctacagcaagctcaatgtgcagaagagcaactgggaggcaggaaatactttcacctgctctgtgttacatgagggcctgcacaaccaccatactgagaagagcctctcccactctcctggttagtaactcgaggacggggtgaactacgcctgaggatccgatctttttccctctgccaaaaattatggggacatcatgaagccccttgagcatctgacttctggctaataaaggaaatttattttcattgcaatagtgtgttggaattttttgtgtctctcactcggcctaggtagataagtagcatggcgggttaatcattaactacaaggaacccctagtgatggagttggccactccctctctgcgcgctcgctcgctcactgaggccgggcgaccaaaggtcgcccgacgcccgggctttgcccgggcggcctcagtgagcgagcgagcgcgcag

SEQ ID NO: 2167 - DNA, 3996 bp, Artificial Sequence
  Description of Artificial Sequence: Synthetic polynucleotide
ctgcgcgctcgctcgctcactgaggccgcccgggcaaagcccgggcgtcgggcgacctttggtcgcccggcctcagtgagcgagcgagcgcgcagagagggagtggccaactccatcactaggggttccttgtagttaatgattaacccgccatgctacttatctaccagggtaatggggatcctctagaactatagctagtcgacataacgcgtgatctaacatatcctggtgtggagtagcggacgctgctatgacagaggctcgggggcctgagctggctctgtgagctggggaggaggcagacagccaggccttgtctgcaagcagacctggcagcattgggctggccgccccccagggcctcctcttcatgcccagtgaatgactcaccttggcacagacacaatgttcggggtgggcacagtgcctgcttcccgccgcaccccagcccccctcaaatgccttccgagaagcccattgagcagggggcttgcattgcaccccagcctgacagcctggcatcttgggataaaagcagcacagccccctaggggctgcccttgctgtgtggcgccaccggcggtggagaacaaggctctattcagcctgtgcccaggaaaggggatcaggggatgcccaggcatggacagtgggtggcagggggggagaggagggctgtctgcttcccagaagtccaaggacacaaatgggtgaggggagagctctccccatagctgggctgcggcccaaccccaccccctcaggctatgccagggggtgttgccaggggcacccgggcatcgccagtctagcccactccttcataaagccctcgcatcccaggagcgagcagagccagagcaggttggagaggagacgcatcacctccgctgctcgcggggatcctctagaagcttcgtttagtgaaccgtcagatcgcctggagacgccatccacgctgttttgacctccatagaagacaccgggaccgatccagcctccgcggattcgaatcccggccgggaacggtgcattggaacgcggattccccgtgccaagagtgacgtaagtaccgcctatagagtctataggcccacaaaaaatgctttcttcttttaatatacttttttgtttatcttatttctaatactttccctaatctctttctttcagggcaataatgatacaatgtatcatgcctctttgcaccattctaaagaataacagtgataatttctgggttaaggcaatagcaatatttctgcatataaatatttctgcatataaattgtaactgatgtaagaggtttcatattgctaatagcagctacaatccagctaccattctgcttttattttatggttgggataaggctggattattctgagtccaagctaggcccttttgctaatcatgttcatacctcttatcttcctcccacagctcctgggcaacgtgctggtctgtgtgctggcccatcactttggcaaagaattgggattcgaaccggtgccgccaccatgaagttgcctgttaggctgttggtgctgatgttctggattcctgcttccagcagtgacatcaagatgacccagagccctagcagcatgtacgccagcctgggcgagagagtgaccatcacctgcaaggccagccaggacatcaacagatacctgaactggttccagcagaagcctggcaagagccctaagaccctgatctacagagccaacagactgctggacggcgtgcctagcagattcagcggcagcggcagcggccaggactacagcctgaccatcagcagcctggactacgaggacatgggcatctactactgcctgcagtacgacgagttccctctgaccttcggcgacggcaccaagctggagctgaagcgggctgatgctgcaccaactgtatccatcttcccaccatccagtgagcagttaacatctggaggtgcctcagtcgtgtgcttcttgaacaacttctaccccaaagacatcaatgtcaagtggaagattgatggcagtgaacgacaaaatggcgtcctgaacagttggactgatcaggacagcaaagacagcacctacagcatgagcagcaccctcacgttgaccaaggacgagtatgaacgacataacagctatacctgtgaggccactcacaagacatcaacttcacccattgtcaagagcttcaacaggaatgagtgtgagggcagaggaagtcttctaacatgcggtgacgtggaggagaatcccggccctatgaacttcgggctcagcttgattttccttgtccttgttttaaaaggtgtccagtgtgaggtgaagctggtggagagcggcggcgacctggtgaagcctggcggcagcctgaagctgagctgcgccgccagcggcttcaccttcagcagctacgccatgagctgggtgagacagaaccctgagaagagactggagtgggtggccagcatcagcaagggcggcaacacctactaccctaacagcgtgaagggcagattcaccatcagcagagacaacgccagaaacatcctgtacctgcagatgagcagcctgagaagcgaggacaccgccctgtactactgcgccagaggctggggcgactacggctggttcgcctactggggccaggtgaccctggtgaccgtgagcgccgccaaaacgacacccccatctgtctatccactggcccctggatctgctgcccaaactaactccatggtgaccctgggatgcctggtcaagggctatttccctgagccagtgacagtgacctggaactctggatccctgtccagcggtgtgcacaccttcccagctgtcctgcagtctgacctctacactctgagcagctcagtgactgtcccctccagcacctggcccagcgagaccgtcacctgcaacgttgcccacccggccagcagcaccaaggtggacaagaaaattgtgcccagggattgtggttgtaagccttgcatatgtacagtcccagaagtatcatctgtcttcatcttccccccaaagcccaaggatgtgctcaccattactctgactcctaaggtcacgtgtgttgtggtagacatcagcaaggatgatcccgaggtccagttcagctggtttgtagatgatgtggaggtgcacacagctcagacgcaaccccgggaggagcagttcaacagcactttccgctcagtcagtgaacttcccatcatgcaccaggactggctcaatggcaaggagttcaaatgcagggtcaacagtgcagctttccctgcccccatcgagaaaaccatctccaaaaccaaaggcagaccgaaggctccacaggtgtacaccattccacctcccaaggagcagatggccaaggataaagtcagtctgacctgcatgataacagacttcttccctgaagacattactgtggagtggcagtggaatgggcagccagcggagaactacaagaacactcagcccatcatggacacagatggctcttacttcgtctacagcaagctcaatgtgcagaagagcaactgggaggcaggaaatactttcacctgctctgtgttacatgagggcctgcacaaccaccatactgagaagagcctctcccactctcctggttagtaactcgaggacggggtgaactacgcctgaggatccgatctttttccctctgccaaaaattatggggacatcatgaagccccttgagcatctgacttctggctaataaaggaaatttattttcattgcaatagtgtgttggaattttttgtgtctctcactcggcctaggtagataagtagcatggcgggttaatcattaactacaaggaacccctagtgatggagttggccactccctctctgcgcgctcgctcgctcactgaggccgggcgaccaaaggtcgcccgacgcccgggctttgcccgggcggcctcagtgagcgagcgagcgcgcag

SEQ ID NO: 2168 - DNA, 3854 bp, Artificial Sequence
  Description of Artificial Sequence: Synthetic polynucleotide
ctgcgcgctcgctcgctcactgaggccgcccgggcaaagcccgggcgtcgggcgacctttggtcgcccggcctcagtgagcgagcgagcgcgcagagagggagtggccaactccatcactaggggttccttgtagttaatgattaacccgccatgctacttatctaccagggtaatggggatcctctagaactatagctagtcgacataacgcgttagtatctgcagagggccctgcgtatgagtgcaagtgggttttaggaccaggatgaggcggggtgggggtgcctacctgacgaccgaccccgacccactggacaagcacccaacccccattccccaaattgcgcatcccctatcagagagggggaggggaaacaggatgcggcgaggcgcgtgcgcactgccagcttcagcaccgcggacagtgccttcgcccccgcctggcggcgcgcgccaccgccgcctcagcactgaaggcgcgctgacgtcactcgccggtcccccgcaaactccccttcccggccaccttggtcgcgtccgcgccgccgccggcccagccggaccgcaccacgcgaggcgcgagataggggggcacgggcgcgaccatctgcgctgcggcgccggcgactcagcgctgcctcagtctgcggtgggcagcggaggagtcgtgtcgtgcctgagagcgcagctgtgctcctgggcaccgcgcagtccgcccccgcggctcctggccagaccacccctaggaccccctgccccaagtcgcagccaagcttcgtttagtgaaccgtcagatcgcctggagacgccatccacgctgttttgacctccatagaagacaccgggaccgatccagcctccgcggattcgaatcccggccgggaacggtgcattggaacgcggattccccgtgccaagagtgacgtaagtaccgcctatagagtctataggcccacaaaaaatgctttcttcttttaatatacttttttgtttatcttatttctaatactttccctaatctctttctttcagggcaataatgatacaatgtatcatgcctctttgcaccattctaaagaataacagtgataatttctgggttaaggcaatagcaatatttctgcatataaatatttctgcatataaattgtaactgatgtaagaggtttcatattgctaatagcagctacaatccagctaccattctgcttttattttatggttgggataaggctggattattctgagtccaagctaggcccttttgctaatcatgttcatacctcttatcttcctcccacagctcctgggcaacgtgctggtctgtgtgctggcccatcactttggcaaagaattgggattcgaaccggtgccgccaccatgaagttgcctgttaggctgttggtgctgatgttctggattcctgcttccagcagtgacatcaagatgacccagagccctagcagcatgtacgccagcctgggcgagagagtgaccatcacctgcaaggccagccaggacatcaacagatacctgaactggttccagcagaagcctggcaagagccctaagaccctgatctacagagccaacagactgctggacggcgtgcctagcagattcagcggcagcggcagcggccaggactacagcctgaccatcagcagcctggactacgaggacatgggcatctactactgcctgcagtacgacgagttccctctgaccttcggcgacggcaccaagctggagctgaagcgggctgatgctgcaccaactgtatccatcttcccaccatccagtgagcagttaacatctggaggtgcctcagtcgtgtgcttcttgaacaacttctaccccaaagacatcaatgtcaagtggaagattgatggcagtgaacgacaaaatggcgtcctgaacagttggactgatcaggacagcaaagacagcacctacagcatgagcagcaccctcacgttgaccaaggacgagtatgaacgacataacagctatacctgtgaggccactcacaagacatcaacttcacccattgtcaagagcttcaacaggaatgagtgtgagggcagaggaagtcttctaacatgcggtgacgtggaggagaatcccggccctatgaacttcgggctcagcttgattttccttgtccttgttttaaaaggtgtccagtgtgaggtgaagctggtggagagcggcggcgacctggtgaagcctggcggcagcctgaagctgagctgcgccgccagcggcttcaccttcagcagctacgccatgagctgggtgagacagaaccctgagaagagactggagtgggtggccagcatcagcaagggcggcaacacctactaccctaacagcgtgaagggcagattcaccatcagcagagacaacgccagaaacatcctgtacctgcagatgagcagcctgagaagcgaggacaccgccctgtactactgcgccagaggctggggcgactacggctggttcgcctactggggccaggtgaccctggtgaccgtgagcgccgccaaaacgacacccccatctgtctatccactggcccctggatctgctgcccaaactaactccatggtgaccctgggatgcctggtcaagggctatttccctgagccagtgacagtgacctggaactctggatccctgtccagcggtgtgcacaccttcccagctgtcctgcagtctgacctctacactctgagcagctcagtgactgtcccctccagcacctggcccagcgagaccgtcacctgcaacgttgcccacccggccagcagcaccaaggtggacaagaaaattgtgcccagggattgtggttgtaagccttgcatatgtacagtcccagaagtatcatctgtcttcatcttccccccaaagcccaaggatgtgctcaccattactctgactcctaaggtcacgtgtgttgtggtagacatcagcaaggatgatcccgaggtccagttcagctggtttgtagatgatgtggaggtgcacacagctcagacgcaaccccgggaggagcagttcaacagcactttccgctcagtcagtgaacttcccatcatgcaccaggactggctcaatggcaaggagttcaaatgcagggtcaacagtgcagctttccctgcccccatcgagaaaaccatctccaaaaccaaaggcagaccgaaggctccacaggtgtacaccattccacctcccaaggagcagatggccaaggataaagtcagtctgacctgcatgataacagacttcttccctgaagacattactgtggagtggcagtggaatgggcagccagcggagaactacaagaacactcagcccatcatggacacagatggctcttacttcgtctacagcaagctcaatgtgcagaagagcaactgggaggcaggaaatactttcacctgctctgtgttacatgagggcctgcacaaccaccatactgagaagagcctctcccactctcctggttagtaactcgaggacggggtgaactacgcctgaggatccgatctttttccctctgccaaaaattatggggacatcatgaagccccttgagcatctgacttctggctaataaaggaaatttattttcattgcaatagtgtgttggaattttttgtgtctctcactcggcctaggtagataagtagcatggcgggttaatcattaactacaaggaacccctagtgatggagttggccactccctctctgcgcgctcgctcgctcactgaggccgggcgaccaaaggtcgcccgacgcccgggctttgcccgggcggcctcagtgagcgagcgagcgcgcag

SEQ ID NO: 2169 - DNA, 435 bp, Artificial Sequence
  Description of Artificial Sequence: Synthetic polynucleotide
atggcgacgggttcaagaacttccctacttcttgcatttggcctgctttgtttgccgtggttacaggagggctcggcagctgccgaggtccagctgcaacagtctggacctgagctggtgaagcctggggcttcagtgaagatatcctgcaagacttctggatacacattcactgaatacaccatacactgggtgaagcagagccatggagagagccttgagtggattggaggtattaatccaaacgatggtggtactatttacaaccagaagttcaagggcaaggccacattgactgtagacaagtcctccaaaacagcctacatggagctccgcagcctgacatctgaggattctgcagtcttttactgtgcaagagggccctccgccaggtttccttactggggccaagggactctggtcactgtctctgca

SEQ ID NO: 2170 - DNA, 408 bp, Artificial Sequence
  Description of Artificial Sequence: Synthetic polynucleotide
atgggatggagctggatctttctctttctcctgtcaggaactacaggtgtcctctctgaggtccagctgcaacagtctggacctgagctggtgaagcctggggcttcagtgaagatatcctgcaagacttctggatacacattcactgaatacaccatacactgggtgaagcagagccatggagagagccttgagtggattggaggtattaatccaaacgatggtggtactatttacaaccagaagttcaagggcaaggccacattgactgtagacaagtcctccaaaacagcctacatggagctccgcagcctgacatctgaggattctgcagtcttttactgtgcaagagggccctccgccaggtttccttactggggccaagggactctggtcactgtctctgca

SEQ ID NO: 2171 - DNA, 3455 bp, Artificial Sequence
  Description of Artificial Sequence: Synthetic polynucleotide
ctgcgcgctcgctcgctcactgaggccgcccgggcaaagcccgggcgtcgggcgacctttggtcgcccggcctcagtgagcgagcgagcgcgcagagagggagtggccaactccatcactaggggttccttgtagttaatgattaacccgccatgctacttatctaccagggtaatggggatcctctagaactatagctagtcgacattgattattgactagttattaatagtaatcaattacggggtcattagttcatagcccatatatggagttccgcgttacataacttacggtaaatggcccgcctggctgaccgcccaacgacccccgcccattgacgtcaataatgacgtatgttcccatagtaacgccaatagggactttccattgacgtcaatgggtggagtatttacggtaaactgcccacttggcagtacatcaagtgtatcatatgccaagtacgccccctattgacgtcaatgacggtaaatggcccgcctggcattatgcccagtacatgaccttatgggactttcctacttggcagtacatctacgtattagtcatcgctattaccatgtcgaggccacgttctgcttcactctccccatctcccccccctccccacccccaattttgtatttatttattttttaattattttgtgcagcgatgggggcggggggggggggcgcgcgccaggcggggcggggcggggcgaggggcggggcggggcgaggcggagaggtgcggcggcagccaatcagagcggcgcgctccgaaagtttccttttatggcgaggcggcggcggcggcggccctataaaaagcgaagcgcgcggcgggcgggagcaagcttcgtttagtgaaccgtcagatcgcctggagacgccatccacgctgttttgacctccatagaagacaccgggaccgatccagcctccgcggattcgaatcccggccgggaacggtgcattggaacgcggattccccgtgccaagagtgacgtaagtaccgcctatagagtctataggcccacaaaaaatgctttcttcttttaatatacttttttgtttatcttatttctaatactttccctaatctctttctttcagggcaataatgatacaatgtatcatgcctctttgcaccattctaaagaataacagtgataatttctgggttaaggcaatagcaatatttctgcatataaatatttctgcatataaattgtaactgatgtaagaggtttcatattgctaatagcagctacaatccagctaccattctgcttttattttatggttgggataaggctggattattctgagtccaagctaggcccttttgctaatcatgttcatacctcttatcttcctcccacagctcctgggcaacgtgctggtctgtgtgctggcccatcactttggcaaagaattgggattcgaaccggtgccgccaccatgaacttcgggctcagcttgattttccttgtccttgttttaaaaggtgtccagtgtgaggttcatctggtggagtctgggggagccttagtgaagcctggagggtccctgaaactctcctgtgcagcctctggattcagtttcagtaaatatggcatgtcttgggttcgccagactccagacaagaggctggagtgggtcgcaaccattagtagtagtgggagtcgcacctactatccagacagtgtgaagggccaattcaccatctccagagacaatgccaagaacaccctgtacctgcaaatgagcagtctgaagtctgaggacacagccatgtattactgttcaattagctgggacggtgctatggactactggggtcaagggacctcagtcaccgtctcctcagccaaaacgacacccccatctgtctatccactggcccctggatctgctgcccaaactaactccatggtgaccctgggatgcctggtcaagggctatttccctgagccagtgacagtgacctggaactctggatccctgtccagcggtgtgcacaccttcccagctgtcctgcagtctgacctctacactctgagcagctcagtgactgtcccctccagcacctggcccagcgagaccgtcacctgcaacgttgcccacccggccagcagcaccaaggtggacaagaaaattgtgcccagggattgtggtgagctcaaaaccccacttggtgacacaactcacacatgcccacggtgcccagagcccaaatcttgtgacacacctcccccgtgcccacggtgcccagagcccaaatcttgtgacacacctcccccatgcccacggtgcccagcacctgaactcagaaagaggcgagagggcagaggaagtcttctaacatgcggtgacgtggaggagaatcccggccctatgaagttgcctgttaggctgttggtgctgatgttctggattcctgcttccagcagtgatgttttgatgacccaaactccactctccctgcctgtcagtcttggagatcaagcctccatctcttgcaaatctagtcagagcattgtacatagtaatggaaacacctatttagaatggtacctgcagaaaccaggccagtctccaaagctcctggtctacaaagtttccaatcgattttctggggtcccagacaggttcagtggcagtggatcagggacagatttcacactcaagatcagcagagtggaggctgaggatctgggaacttattactgctttcaaggttcacttgttccttgggcgttcggtggaggcaccaagctggaaatcaaacgggctgatgctgcaccaactgtatccatcttcccaccatccagtgagcagttaacatctggaggtgcctcagtcgtgtgcttcttgaacaacttctaccccaaagacatcaatgtcaagtggaagattgatggcagtgaacgacaaaatggcgtcctgaacagttggactgatcaggacagcaaagacagcacctacagcatgagcagcaccctcacgttgaccaaggacgagtatgaacgacataacagctatacctgtgaggccactcacaagacatcaacttcacccattgtcaagagcttcaacaggaatgagtgttagtaactcgaggacggggtgaactacgcctgaggatccgatctttttccctctgccaaaaattatggggacatcatgaagccccttgagcatctgacttctggctaataaaggaaatttattttcattgcaatagtgtgttggaattttttgtgtctctcactcggcctaggtagataagtagcatggcgggttaatcattaactacaaggaacccctagtgatggagttggccactccctctctgcgcgctcgctcgctcactgaggccgggcgaccaaaggtcgcccgacgcccgggctttgcccgggcggcctcagtgagcgagcgagcgcgcag

SEQ ID NO: 2172 - DNA, 3498 bp, Artificial Sequence
  Description of Artificial Sequence: Synthetic polynucleotide
ctgcgcgctcgctcgctcactgaggccgcccgggcaaagcccgggcgtcgggcgacctttggtcgcccggcctcagtgagcgagcgagcgcgcagagagggagtggccaactccatcactaggggttccttgtagttaatgattaacccgccatgctacttatctaccagggtaatggggatcctctagaactatagctagtcgacattgattattgactagttattaatagtaatcaattacggggtcattagttcatagcccatatatggagttccgcgttacataacttacggtaaatggcccgcctggctgaccgcccaacgacccccgcccattgacgtcaataatgacgtatgttcccatagtaacgccaatagggactttccattgacgtcaatgggtggagtatttacggtaaactgcccacttggcagtacatcaagtgtatcatatgccaagtacgccccctattgacgtcaatgacggtaaatggcccgcctggcattatgcccagtacatgaccttatgggactttcctacttggcagtacatctacgtattagtcatcgctattaccatgtcgaggccacgttctgcttcactctccccatctcccccccctccccacccccaattttgtatttatttattttttaattattttgtgcagcgatgggggcggggggggggggcgcgcgccaggcggggcggggcggggcgaggggcggggcggggcgaggcggagaggtgcggcggcagccaatcagagcggcgcgctccgaaagtttccttttatggcgaggcggcggcggcggcggccctataaaaagcgaagcgcgcggcgggcgggagcaagcttcgtttagtgaaccgtcagatcgcctggagacgccatccacgctgttttgacctccatagaagacaccgggaccgatccagcctccgcggattcgaatcccggccgggaacggtgcattggaacgcggattccccgtgccaagagtgacgtaagtaccgcctatagagtctataggcccacaaaaaatgctttcttcttttaatatacttttttgtttatcttatttctaatactttccctaatctctttctttcagggcaataatgatacaatgtatcatgcctctttgcaccattctaaagaataacagtgataatttctgggttaaggcaatagcaatatttctgcatataaatatttctgcatataaattgtaactgatgtaagaggtttcatattgctaatagcagctacaatccagctaccattctgcttttattttatggttgggataaggctggattattctgagtccaagctaggcccttttgctaatcatgttcatacctcttatcttcctcccacagctcctgggcaacgtgctggtctgtgtgctggcccatcactttggcaaagaattgggattcgaaccggtgccgccaccatgaacttcgggctcagcttgattttccttgtccttgttttaaaaggtgtccagtgtgaggttcatctggtggagtctgggggagccttagtgaagcctggagggtccctgaaactctcctgtgcagcctctggattcagtttcagtaaatatggcatgtcttgggttcgccagactccagacaagaggctggagtgggtcgcaaccattagtagtagtgggagtcgcacctactatccagacagtgtgaagggccaattcaccatctccagagacaatgccaagaacaccctgtacctgcaaatgagcagtctgaagtctgaggacacagccatgtattactgttcaattagctgggacggtgctatggactactggggtcaagggacctcagtcaccgtctcctcagccaaaacgacacccccatctgtctatccactggcccctggatctgctgcccaaactaactccatggtgaccctgggatgcctggtcaagggctatttccctgagccagtgacagtgacctggaactctggatccctgtccagcggtgtgcacaccttcccagctgtcctgcagtctgacctctacactctgagcagctcagtgactgtcccctccagcacctggcccagcgagaccgtcacctgcaacgttgcccacccggccagcagcaccaaggtggacaagaaaattgtgcccagggattgtggtgagctcaaaaccccacttggtgacacaactcacacatgcccacggtgcccagagcccaaatcttgtgacacacctcccccgtgcccacggtgcccagagcccaaatcttgtgacacaactcacacatgcccacggtgcccagagcccaaatcttgtgacacacctcccccgtgcccaaggtgcccagcacctgaactcagaaagaggcgagagggcagaggaagtcttctaacatgcggtgacgtggaggagaatcccggccctatgaagttgcctgttaggctgttggtgctgatgttctggattcctgcttccagcagtgatgttttgatgacccaaactccactctccctgcctgtcagtcttggagatcaagcctccatctcttgcaaatctagtcagagcattgtacatagtaatggaaacacctatttagaatggtacctgcagaaaccaggccagtctccaaagctcctggtctacaaagtttccaatcgattttctggggtcccagacaggttcagtggcagtggatcagggacagatttcacactcaagatcagcagagtggaggctgaggatctgggaacttattactgctttcaaggttcacttgttccttgggcgttcggtggaggcaccaagctggaaatcaaacgggctgatgctgcaccaactgtatccatcttcccaccatccagtgagcagttaacatctggaggtgcctcagtcgtgtgcttcttgaacaacttctaccccaaagacatcaatgtcaagtggaagattgatggcagtgaacgacaaaatggcgtcctgaacagttggactgatcaggacagcaaagacagcacctacagcatgagcagcaccctcacgttgaccaaggacgagtatgaacgacataacagctatacctgtgaggccactcacaagacatcaacttcacccattgtcaagagcttcaacaggaatgagtgttagtaactcgaggacggggtgaactacgcctgaggatgatctttttccctctgccaaaaattatggggacatcatgaagccccttgagcatctgacttctggctaataaaggaaatttattttcattgcaatagtgtgttggaattttttgtgtctctcactcggcctaggtagataagtagcatggcgggttaatcattaactacaaggaacccctagtgatggagttggccactccctctctgcgcgctcgctcgctcactgaggccgggcgaccaaaggtcgcccgacgcccgggctttgcccgggcggcctcagtgagcgagcgagcgcgcag

SEQ ID NO: 2173 - DNA, 3282 bp, Artificial Sequence
  Description of Artificial Sequence: Synthetic polynucleotide
ctgcgcgctcgctcgctcactgaggccgcccgggcaaagcccgggcgtcgggcgacctttggtcgcccggcctcagtgagcgagcgagcgcgcagagagggagtggccaactccatcactaggggttccttgtagttaatgattaacccgccatgctacttatctaccagggtaatggggatcctctagaactatagctagtcgacattgattattgactagttattaatagtaatcaattacggggtcattagttcatagcccatatatggagttccgcgttacataacttacggtaaatggcccgcctggctgaccgcccaacgacccccgcccattgacgtcaataatgacgtatgttcccatagtaacgccaatagggactttccattgacgtcaatgggtggagtatttacggtaaactgcccacttggcagtacatcaagtgtatcatatgccaagtacgccccctattgacgtcaatgacggtaaatggcccgcctggcattatgcccagtacatgaccttatgggactttcctacttggcagtacatctacgtattagtcatcgctattaccatgtcgaggccacgttctgcttcactctccccatctcccccccctccccacccccaattttgtatttatttattttttaattattttgtgcagcgatgggggcggggggggggggcgcgcgccaggcggggcggggcggggcgaggggcggggcggggcgaggcggagaggtgcggcggcagccaatcagagcggcgcgctccgaaagtttccttttatggcgaggcggcggcggcggcggccctataaaaagcgaagcgcgcggcgggcgggagcaagcttcgtttagtgaaccgtcagatcgcctggagacgccatccacgctgttttgacctccatagaagacaccgggaccgatccagcctccgcggattcgaatcccggccgggaacggtgcattggaacgcggattccccgtgccaagagtgacgtaagtaccgcctatagagtctataggcccacaaaaaatgctttcttcttttaatatacttttttgtttatcttatttctaatactttccctaatctctttctttcagggcaataatgatacaatgtatcatgcctctttgcaccattctaaagaataacagtgataatttctgggttaaggcaatagcaatatttctgcatataaatatttctgcatataaattgtaactgatgtaagaggtttcatattgctaatagcagctacaatccagctaccattctgcttttattttatggttgggataaggctggattattctgagtccaagctaggcccttttgctaatcatgttcatacctcttatcttcctcccacagctcctgggcaacgtgctggtctgtgtgctggcccatcactttggcaaagaattgggattcgaaccggtgccgccaccatgaacttcgggctcagcttgattttccttgtccttgttttaaaaggtgtccagtgtgaggttcatctggtggagtctgggggagccttagtgaagcctggagggtccctgaaactctcctgtgcagcctctggattcagtttcagtaaatatggcatgtcttgggttcgccagactccagacaagaggctggagtgggtcgcaaccattagtagtagtgggagtcgcacctactatccagacagtgtgaagggccaattcaccatctccagagacaatgccaagaacaccctgtacctgcaaatgagcagtctgaagtctgaggacacagccatgtattactgttcaattagctgggacggtgctatggactactggggtcaagggacctcagtcaccgtctcctcagccaaaacgacacccccatctgtctatccactggcccctggatctgctgcccaaactaactccatggtgaccctgggatgcctggtcaagggctatttccctgagccagtgacagtgacctggaactctggatccctgtccagcggtgtgcacaccttcccagctgtcctgcagtctgacctctacactctgagcagctcagtgactgtcccctccagcacctggcccagcgagaccgtcacctgcaacgttgcccacccggccagcagcaccaaggtggacaagaaaattagaaagaggcgagagggcagaggaagtcttctaacatgcggtgacgtggaggagaatcccggccctatgaagttgcctgttaggctgttggtgctgatgttctggattcctgcttccagcagtgatgttttgatgacccaaactccactctccctgcctgtcagtcttggagatcaagcctccatctcttgcaaatctagtcagagcattgtacatagtaatggaaacacctatttagaatggtacctgcagaaaccaggccagtctccaaagctcctggtctacaaagtttccaatcgattttctggggtcccagacaggttcagtggcagtggatcagggacagatttcacactcaagatcagcagagtggaggctgaggatctgggaacttattactgctttcaaggttcacttgttccttgggcgttcggtggaggcaccaagctggaaatcaaacgggctgatgctgcaccaactgtatccatcttcccaccatccagtgagcagttaacatctggaggtgcctcagtcgtgtgcttcttgaacaacttctaccccaaagacatcaatgtcaagtggaagattgatggcagtgaacgacaaaatggcgtcctgaacagttggactgatcaggacagcaaagacagcacctacagcatgagcagcaccctcacgttgaccaaggacgagtatgaacgacataacagctatacctgtgaggccactcacaagacatcaacttcacccattgtcaagagcttcaacaggaatgagtgttagtaactcgaggacggggtgaactacgcctgaggatgatctttttccctctgccaaaaattatggggacatcatgaagccccttgagcatctgacttctggctaataaaggaaatttattttcattgcaatagtgtgttggaattttttgtgtctctcactcggcctaggtagataagtagcatggcgggttaatcattaactacaaggaacccctagtgatggagttggccactccctctctgcgcgctcgctcgctcactgaggccgggcgaccaaaggtcgcccgacgcccgggctttgcccgggcggcctcagtgagcgagcgagcgcgcag

SEQ ID NO: 2174 - DNA, 3300 bp, Artificial Sequence
  Description of Artificial Sequence: Synthetic polynucleotide
ctgcgcgctcgctcgctcactgaggccgcccgggcaaagcccgggcgtcgggcgacctttggtcgcccggcctcagtgagcgagcgagcgcgcagagagggagtggccaactccatcactaggggttccttgtagttaatgattaacccgccatgctacttatctaccagggtaatggggatcctctagaactatagctagtcgacattgattattgactagttattaatagtaatcaattacggggtcattagttcatagcccatatatggagttccgcgttacataacttacggtaaatggcccgcctggctgaccgcccaacgacccccgcccattgacgtcaataatgacgtatgttcccatagtaacgccaatagggactttccattgacgtcaatgggtggagtatttacggtaaactgcccacttggcagtacatcaagtgtatcatatgccaagtacgccccctattgacgtcaatgacggtaaatggcccgcctggcattatgcccagtacatgaccttatgggactttcctacttggcagtacatctacgtattagtcatcgctattaccatgtcgaggccacgttctgcttcactctccccatctcccccccctccccacccccaattttgtatttatttattttttaattattttgtgcagcgatgggggcggggggggggggcgcgcgccaggcggggcggggcggggcgaggggcggggcggggcgaggcggagaggtgcggcggcagccaatcagagcggcgcgctccgaaagtttccttttatggcgaggcggcggcggcggcggccctataaaaagcgaagcgcgcggcgggcgggagcaagcttcgtttagtgaaccgtcagatcgcctggagacgccatccacgctgttttgacctccatagaagacaccgggaccgatccagcctccgcggattcgaatcccggccgggaacggtgcattggaacgcggattccccgtgccaagagtgacgtaagtaccgcctatagagtctataggcccacaaaaaatgctttcttcttttaatatacttttttgtttatcttatttctaatactttccctaatctctttctttcagggcaataatgatacaatgtatcatgcctctttgcaccattctaaagaataacagtgataatttctgggttaaggcaatagcaatatttctgcatataaatatttctgcatataaattgtaactgatgtaagaggtttcatattgctaatagcagctacaatccagctaccattctgcttttattttatggttgggataaggctggattattctgagtccaagctaggcccttttgctaatcatgttcatacctcttatcttcctcccacagctcctgggcaacgtgctggtctgtgtgctggcccatcactttggcaaagaattgggattcgaaccggtgccgccaccatgaacttcgggctcagcttgattttccttgtccttgttttaaaaggtgtccagtgtgaggttcatctggtggagtctgggggagccttagtgaagcctggagggtccctgaaactctcctgtgcagcctctggattcagtttcagtaaatatggcatgtcttgggttcgccagactccagacaagaggctggagtgggtcgcaaccattagtagtagtgggagtcgcacctactatccagacagtgtgaagggccaattcaccatctccagagacaatgccaagaacaccctgtacctgcaaatgagcagtctgaagtctgaggacacagccatgtattactgttcaattagctgggacggtgctatggactactggggtcaagggacctcagtcaccgtctcctcagccaaaacgacacccccatctgtctatccactggcccctggatctgctgcccaaactaactccatggtgaccctgggatgcctggtcaagggctatttccctgagccagtgacagtgacctggaactctggatccctgtccagcggtgtgcacaccttcccagctgtcctgcagtctgacctctacactctgagcagctcagtgactgtcccctccagcacctggcccagcgagaccgtcacctgcaacgttgcccacccggccagcagcaccaaggtggacaagaaaattgtgcccagggattgtggtagaaagaggcgagagggcagaggaagtcttctaacatgcggtgacgtggaggagaatcccggccctatgaagttgcctgttaggctgttggtgctgatgttctggattcctgcttccagcagtgatgttttgatgacccaaactccactctccctgcctgtcagtcttggagatcaagcctccatctcttgcaaatctagtcagagcattgtacatagtaatggaaacacctatttagaatggtacctgcagaaaccaggccagtctccaaagctcctggtctacaaagtttccaatcgattttctggggtcccagacaggttcagtggcagtggatcagggacagatttcacactcaagatcagcagagtggaggctgaggatctgggaacttattactgctttcaaggttcacttgttccttgggcgttcggtggaggcaccaagctggaaatcaaacgggctgatgctgcaccaactgtatccatcttcccaccatccagtgagcagttaacatctggaggtgcctcagtcgtgtgcttcttgaacaacttctaccccaaagacatcaatgtcaagtggaagattgatggcagtgaacgacaaaatggcgtcctgaacagttggactgatcaggacagcaaagacagcacctacagcatgagcagcaccctcacgttgaccaaggacgagtatgaacgacataacagctatacctgtgaggccactcacaagacatcaacttcacccattgtcaagagcttcaacaggaatgagtgttagtaactcgaggacggggtgaactacgcctgaggatgatctttttccctctgccaaaaattatggggacatcatgaagccccttgagcatctgacttctggctaataaaggaaatttattttcattgcaatagtgtgttggaattttttgtgtctctcactcggcctaggtagataagtagcatggcgggttaatcattaactacaaggaacccctagtgatggagttggccactccctctctgcgcgctcgctcgctcactgaggccgggcgaccaaaggtcgcccgacgcccgggctttgcccgggcggcctcagtgagcgagcgagcgcgcag

SEQ ID NO: 2175 - DNA, 3943 bp, Artificial Sequence
  Description of Artificial Sequence: Synthetic polynucleotide
ctgcgcgctcgctcgctcactgaggccgcccgggcaaagcccgggcgtcgggcgacctttggtcgcccggcctcagtgagcgagcgagcgcgcagagagggagtggccaactccatcactaggggttccttgtagttaatgattaacccgccatgctacttatctaccagggtaatggggatcctctagaactatagctagtcgacataacgcgtctagttattaatagtaatcaattacggggtcattagttcatagcccatatatggagttccgcgttacataacttacggtaaatggcccgcctggctgaccgcccaacgacccccgcccattgacgtcaataatgacgtatgttcccatagtaacgccaatagggactttccattgacgtcaatgggtggagtatttacggtaaactgcccacttggcagtacatcaagtgtatcatatgccaagtacgccccctattgacgtcaatgacggtaaatggcccgcctggcattatgcccagtacatgaccttatgggactttcctacttggcagtacatctacgtattagtcatcgctattaccatggtcgaggtgagccccacgttctgcttcactctccccatctcccccccctccccacccccaattttgtatttatttattttttaattattttgtgcagcgatgggggcggggggggggggggggcgcgcgccaggcggggcggggcggggcgaggggcggggcggggcgaggcggagaggtgcggcggcagccaatcagagcggcgcgctccgaaagtttccttttatggcgaggcggcggcggcggcggccctataaaaagcgaagcgcgcggcgggcgggagtcgctgcgcgctgccttcgccccgtgccccgctccgccgccgcctcgcgccgcccgccccggctctgactgaccgcgttactcccacaggtgagcgggcgggacggcccttctcctccgggctgtaattagcgcttggtttaatgacggcttgtttcttttctgtggctgcgtgaaagccttgaggggctccgggagggccctttgtgcggggggagcggctcggggggtgcgtgcgtgtgtgtgtgcgtggggagcgccgcgtgcggctccgcgctgcccggcggctgtgagcgctgcgggcgcggcgcggggctttgtgcgctccgcagtgtgcgcgaggggagcgcggccgggggcggtgccccgcggtgcggggggggctgcgaggggaacaaaggctgcgtgcggggtgtgtgcgtgggggggtgagcagggggtgtgggcgcgtcggtcgggctgcaaccccccctgcacccccctccccgagttgctgagcacggcccggcttcgggtgcggggctccgtacggggcgtggcgcggggctcgccgtgccgggcggggggtggcggcaggtgggggtgccgggcggggcggggccgcctcgggccggggagggctcgggggaggggcgcggcggcccccggagcgccggcggctgtcgaggcgcggcgagccgcagccattgccttttatggtaatcgtgcgagagggcgcagggacttcctttgtcccaaatctgtgcggagccgaaatctgggaggcgccgccgcaccccctctagcgggcgcggggcgaagcggtgcggcgccggcaggaaggaaatgggcggggagggccttcgtgcgtcgccgcgccgccgtccccttctccctctccagcctcggggctgtccgcggggggacggctgccttcgggggggacggggcagggcggggttcggcttctggcgtgtgaccggcggctctagagcctctgctaaccatgttcatgccttcttctttttcctacagctcctgggcaacgtgctggttattgtgctgtctcatcattttggcaaagaattcgggattcgaaccggtgccgccaccatgaacttcgggctcagcttgattttccttgtccttgttttaaaaggtgtccagtgtgaggttcatctggtggagtctgggggagccttagtgaagcctggagggtccctgaaactctcctgtgcagcctctggattcagtttcagtaaatatggcatgtcttgggttcgccagactccagacaagaggctggagtgggtcgcaaccattagtagtagtgggagtcgcacctactatccagacagtgtgaagggccaattcaccatctccagagacaatgccaagaacaccctgtacctgcaaatgagcagtctgaagtctgaggacacagccatgtattactgttcaattagctgggacggtgctatggactactggggtcaagggacctcagtcaccgtctcctcagccaaaacgacacccccatctgtctatccactggcccctggatctgctgcccaaactaactccatggtgaccctgggatgcctggtcaagggctatttccctgagccagtgacagtgacctggaactctggatccctgtccagcggtgtgcacaccttcccagctgtcctgcagtctgacctctacactctgagcagctcagtgactgtcccctccagcacctggcccagcgagaccgtcacctgcaacgttgcccacccggccagcagcaccaaggtggacaagaaaattgtgcccagggattgtggtgagctcaaaaccccacttggtgacacaactcacacatgcccacggtgcccagagcccaaatcttgtgacacacctcccccgtgcccacggtgcccagagcccaaatcttgtgacacacctcccccatgcccacggtgcccagcacctgaactcagaaagaggcgagagggcagaggaagtcttctaacatgcggtgacgtggaggagaatcccggccctatgaagttgcctgttaggctgttggtgctgatgttctggattcctgcttccagcagtgatgttttgatgacccaaactccactctccctgcctgtcagtcttggagatcaagcctccatctcttgcaaatctagtcagagcattgtacatagtaatggaaacacctatttagaatggtacctgcagaaaccaggccagtctccaaagctcctggtctacaaagtttccaatcgattttctggggtcccagacaggttcagtggcagtggatcagggacagatttcacactcaagatcagcagagtggaggctgaggatctgggaacttattactgctttcaaggttcacttgttccttgggcgttcggtggaggcaccaagctggaaatcaaacgggctgatgctgcaccaactgtatccatcttcccaccatccagtgagcagttaacatctggaggtgcctcagtcgtgtgcttcttgaacaacttctaccccaaagacatcaatgtcaagtggaagattgatggcagtgaacgacaaaatggcgtcctgaacagttggactgatcaggacagcaaagacagcacctacagcatgagcagcaccctcacgttgaccaaggacgagtatgaacgacataacagctatacctgtgaggccactcacaagacatcaacttcacccattgtcaagagcttcaacaggaatgagtgttagtaactcgaggacggggtgaactacgcctgaggatccgatctttttccctctgccaaaaattatggggacatcatgaagccccttgagcatctgacttctggctaataaaggaaatttattttcattgcaatagtgtgttggaattttttgtgtctctcactcggcctaggtagataagtagcatggcgggttaatcattaactacaaggaacccctagtgatggagttggccactccctctctgcgcgctcgctcgctcactgaggccgggcgaccaaaggtcgcccgacgcccgggctttgcccgggcggcctcagtgagcgagcgagcgcgcag

SEQ ID NO: 2176 - DNA, 3988 bp, Artificial Sequence
  Description of Artificial Sequence: Synthetic polynucleotide
ctgcgcgctcgctcgctcactgaggccgcccgggcaaagcccgggcgtcgggcgacctttggtcgcccggcctcagtgagcgagcgagcgcgcagagagggagtggccaactccatcactaggggttccttgtagttaatgattaacccgccatgctacttatctaccagggtaatggggatcctctagaactatagctagtcgacataacgcgtctagttattaatagtaatcaattacggggtcattagttcatagcccatatatggagttccgcgttacataacttacggtaaatggcccgcctggctgaccgcccaacgacccccgcccattgacgtcaataatgacgtatgttcccatagtaacgccaatagggactttccattgacgtcaatgggtggagtatttacggtaaactgcccacttggcagtacatcaagtgtatcatatgccaagtacgccccctattgacgtcaatgacggtaaatggcccgcctggcattatgcccagtacatgaccttatgggactttcctacttggcagtacatctacgtattagtcatcgctattaccatggtcgaggtgagccccacgttctgcttcactctccccatctcccccccctccccacccccaattttgtatttatttattttttaattattttgtgcagcgatgggggcggggggggggggggggcgcgcgccaggcggggcggggcggggcgaggggcggggcggggcgaggcggagaggtgcggcggcagccaatcagagcggcgcgctccgaaagtttccttttatggcgaggcggcggcggcggcggccctataaaaagcgaagcgcgcggcgggcgggagtcgctgcgcgctgccttcgccccgtgccccgctccgccgccgcctcgcgccgcccgccccggctctgactgaccgcgttactcccacaggtgagcgggcgggacggcccttctcctccgggctgtaattagcgcttggtttaatgacggcttgtttcttttctgtggctgcgtgaaagccttgaggggctccgggagggccctttgtgcggggggagcggctcggggggtgcgtgcgtgtgtgtgtgcgtggggagcgccgcgtgcggctccgcgctgcccggcggctgtgagcgctgcgggcgcggcgcggggctttgtgcgctccgcagtgtgcgcgaggggagcgcggccgggggcggtgccccgcggtgcggggggggctgcgaggggaacaaaggctgcgtgcggggtgtgtgcgtgggggggtgagcagggggtgtgggcgcgtcggtcgggctgcaaccccccctgcacccccctccccgagttgctgagcacggcccggcttcgggtgcggggctccgtacggggcgtggcgcggggctcgccgtgccgggcggggggtggcggcaggtgggggtgccgggcggggcggggccgcctcgggccggggagggctcgggggaggggcgcggcggcccccggagcgccggcggctgtcgaggcgcggcgagccgcagccattgccttttatggtaatcgtgcgagagggcgcagggacttcctttgtcccaaatctgtgcggagccgaaatctgggaggcgccgccgcaccccctctagcgggcgcggggcgaagcggtgcggcgccggcaggaaggaaatgggcggggagggccttcgtgcgtcgccgcgccgccgtccccttctccctctccagcctcggggctgtccgcggggggacggctgccttcgggggggacggggcagggcggggttcggcttctggcgtgtgaccggcggctctagagcctctgctaaccatgttcatgccttcttctttttcctacagctcctgggcaacgtgctggttattgtgctgtctcatcattttggcaaagaattcgggattcgaaccggtgccgccaccatgaacttcgggctcagcttgattttccttgtccttgttttaaaaggtgtccagtgtgaggttcatctggtggagtctgggggagccttagtgaagcctggagggtccctgaaactctcctgtgcagcctctggattcagtttcagtaaatatggcatgtcttgggttcgccagactccagacaagaggctggagtgggtcgcaaccattagtagtagtgggagtcgcacctactatccagacagtgtgaagggccaattcaccatctccagagacaatgccaagaacaccctgtacctgcaaatgagcagtctgaagtctgaggacacagccatgtattactgttcaattagctgggacggtgctatggactactggggtcaagggacctcagtcaccgtctcctcagccaaaacgacacccccatctgtctatccactggcccctggatctgctgcccaaactaactccatggtgaccctgggatgcctggtcaagggctatttccctgagccagtgacagtgacctggaactctggatccctgtccagcggtgtgcacaccttcccagctgtcctgcagtctgacctctacactctgagcagctcagtgactgtcccctccagcacctggcccagcgagaccgtcacctgcaacgttgcccacccggccagcagcaccaaggtggacaagaaaattgtgcccagggattgtggtgagctcaaaaccccacttggtgacacaactcacacatgcccacggtgcccagagcccaaatcttgtgacacacctcccccgtgcccacggtgcccagagcccaaatcttgtgacacaactcacacatgcccacggtgcccagagcccaaatcttgtgacacacctcccccgtgcccaaggtgcccagcacctgaactcagaaagaggcgagagggcagaggaagtcttctaacatgcggtgacgtggaggagaatcccggccctatgaagttgcctgttaggctgttggtgctgatgttctggattcctgcttccagcagtgatgttttgatgacccaaactccactctccctgcctgtcagtcttggagatcaagcctccatctcttgcaaatctagtcagagcattgtacatagtaatggaaacacctatttagaatggtacctgcagaaaccaggccagtctccaaagctcctggtctacaaagtttccaatcgattttctggggtcccagacaggttcagtggcagtggatcagggacagatttcacactcaagatcagcagagtggaggctgaggatctgggaacttattactgctttcaaggttcacttgttccttgggcgttcggtggaggcaccaagctggaaatcaaacgggctgatgctgcaccaactgtatccatcttcccaccatccagtgagcagttaacatctggaggtgcctcagtcgtgtgcttcttgaacaacttctaccccaaagacatcaatgtcaagtggaagattgatggcagtgaacgacaaaatggcgtcctgaacagttggactgatcaggacagcaaagacagcacctacagcatgagcagcaccctcacgttgaccaaggacgagtatgaacgacataacagctatacctgtgaggccactcacaagacatcaacttcacccattgtcaagagcttcaacaggaatgagtgttagtaactcgaggacggggtgaactacgcctgaggatccgatctttttccctctgccaaaaattatggggacatcatgaagccccttgagcatctgacttctggctaataaaggaaatttattttcattgcaatagtgtgttggaattttttgtgtctctcactcggcctaggtagataagtagcatggcgggttaatcattaactacaaggaacccctagtgatggagttggccactccctctctgcgcgctcgctcgctcactgaggccgggcgaccaaaggtcgcccgacgcccgggctttgcccgggcggcctcagtgagcgagcgagcgcgcag

SEQ ID NO: 2177 - DNA, 3772 bp, Artificial Sequence
  Description of Artificial Sequence: Synthetic polynucleotide
ctgcgcgctcgctcgctcactgaggccgcccgggcaaagcccgggcgtcgggcgacctttggtcgcccggcctcagtgagcgagcgagcgcgcagagagggagtggccaactccatcactaggggttccttgtagttaatgattaacccgccatgctacttatctaccagggtaatggggatcctctagaactatagctagtcgacataacgcgtctagttattaatagtaatcaattacggggtcattagttcatagcccatatatggagttccgcgttacataacttacggtaaatggcccgcctggctgaccgcccaacgacccccgcccattgacgtcaataatgacgtatgttcccatagtaacgccaatagggactttccattgacgtcaatgggtggagtatttacggtaaactgcccacttggcagtacatcaagtgtatcatatgccaagtacgccccctattgacgtcaatgacggtaaatggcccgcctggcattatgcccagtacatgaccttatgggactttcctacttggcagtacatctacgtattagtcatcgctattaccatggtcgaggtgagccccacgttctgcttcactctccccatctcccccccctccccacccccaattttgtatttatttattttttaattattttgtgcagcgatgggggcggggggggggggggggcgcgcgccaggcggggcggggcggggcgaggggcggggcggggcgaggcggagaggtgcggcggcagccaatcagagcggcgcgctccgaaagtttccttttatggcgaggcggcggcggcggcggccctataaaaagcgaagcgcgcggcgggcgggagtcgctgcgcgctgccttcgccccgtgccccgctccgccgccgcctcgcgccgcccgccccggctctgactgaccgcgttactcccacaggtgagcgggcgggacggcccttctcctccgggctgtaattagcgcttggtttaatgacggcttgtttcttttctgtggctgcgtgaaagccttgaggggctccgggagggccctttgtgcggggggagcggctcggggggtgcgtgcgtgtgtgtgtgcgtggggagcgccgcgtgcggctccgcgctgcccggcggctgtgagcgctgcgggcgcggcgcggggctttgtgcgctccgcagtgtgcgcgaggggagcgcggccgggggcggtgccccgcggtgcggggggggctgcgaggggaacaaaggctgcgtgcggggtgtgtgcgtgggggggtgagcagggggtgtgggcgcgtcggtcgggctgcaaccccccctgcacccccctccccgagttgctgagcacggcccggcttcgggtgcggggctccgtacggggcgtggcgcggggctcgccgtgccgggcggggggtggcggcaggtgggggtgccgggcggggcggggccgcctcgggccggggagggctcgggggaggggcgcggcggcccccggagcgccggcggctgtcgaggcgcggcgagccgcagccattgccttttatggtaatcgtgcgagagggcgcagggacttcctttgtcccaaatctgtgcggagccgaaatctgggaggcgccgccgcaccccctctagcgggcgcggggcgaagcggtgcggcgccggcaggaaggaaatgggcggggagggccttcgtgcgtcgccgcgccgccgtccccttctccctctccagcctcggggctgtccgcggggggacggctgccttcgggggggacggggcagggcggggttcggcttctggcgtgtgaccggcggctctagagcctctgctaaccatgttcatgccttcttctttttcctacagctcctgggcaacgtgctggttattgtgctgtctcatcattttggcaaagaattcgggattcgaaccggtgccgccaccatgaacttcgggctcagcttgattttccttgtccttgttttaaaaggtgtccagtgtgaggttcatctggtggagtctgggggagccttagtgaagcctggagggtccctgaaactctcctgtgcagcctctggattcagtttcagtaaatatggcatgtcttgggttcgccagactccagacaagaggctggagtgggtcgcaaccattagtagtagtgggagtcgcacctactatccagacagtgtgaagggccaattcaccatctccagagacaatgccaagaacaccctgtacctgcaaatgagcagtctgaagtctgaggacacagccatgtattactgttcaattagctgggacggtgctatggactactggggtcaagggacctcagtcaccgtctcctcagccaaaacgacacccccatctgtctatccactggcccctggatctgctgcccaaactaactccatggtgaccctgggatgcctggtcaagggctatttccctgagccagtgacagtgacctggaactctggatccctgtccagcggtgtgcacaccttcccagctgtcctgcagtctgacctctacactctgagcagctcagtgactgtcccctccagcacctggcccagcgagaccgtcacctgcaacgttgcccacccggccagcagcaccaaggtggacaagaaaattagaaagaggcgagagggcagaggaagtcttctaacatgcggtgacgtggaggagaatcccggccctatgaagttgcctgttaggctgttggtgctgatgttctggattcctgcttccagcagtgatgttttgatgacccaaactccactctccctgcctgtcagtcttggagatcaagcctccatctcttgcaaatctagtcagagcattgtacatagtaatggaaacacctatttagaatggtacctgcagaaaccaggccagtctccaaagctcctggtctacaaagtttccaatcgattttctggggtcccagacaggttcagtggcagtggatcagggacagatttcacactcaagatcagcagagtggaggctgaggatctgggaacttattactgctttcaaggttcacttgttccttgggcgttcggtggaggcaccaagctggaaatcaaacgggctgatgctgcaccaactgtatccatcttcccaccatccagtgagcagttaacatctggaggtgcctcagtcgtgtgcttcttgaacaacttctaccccaaagacatcaatgtcaagtggaagattgatggcagtgaacgacaaaatggcgtcctgaacagttggactgatcaggacagcaaagacagcacctacagcatgagcagcaccctcacgttgaccaaggacgagtatgaacgacataacagctatacctgtgaggccactcacaagacatcaacttcacccattgtcaagagcttcaacaggaatgagtgttagtaactcgaggacggggtgaactacgcctgaggatccgatctttttccctctgccaaaaattatggggacatcatgaagccccttgagcatctgacttctggctaataaaggaaatttattttcattgcaatagtgtgttggaattttttgtgtctctcactcggcctaggtagataagtagcatggcgggttaatcattaactacaaggaacccctagtgatggagttggccactccctctctgcgcgctcgctcgctcactgaggccgggcgaccaaaggtcgcccgacgcccgggctttgcccgggcggcctcagtgagcgagcgagcgcgcag

SEQ ID NO: 2178 - DNA, 3790 bp, Artificial Sequence
  Description of Artificial Sequence: Synthetic polynucleotide
ctgcgcgctcgctcgctcactgaggccgcccgggcaaagcccgggcgtcgggcgacctttggtcgcccggcctcagtgagcgagcgagcgcgcagagagggagtggccaactccatcactaggggttccttgtagttaatgattaacccgccatgctacttatctaccagggtaatggggatcctctagaactatagctagtcgacataacgcgtctagttattaatagtaatcaattacggggtcattagttcatagcccatatatggagttccgcgttacataacttacggtaaatggcccgcctggctgaccgcccaacgacccccgcccattgacgtcaataatgacgtatgttcccatagtaacgccaatagggactttccattgacgtcaatgggtggagtatttacggtaaactgcccacttggcagtacatcaagtgtatcatatgccaagtacgccccctattgacgtcaatgacggtaaatggcccgcctggcattatgcccagtacatgaccttatgggactttcctacttggcagtacatctacgtattagtcatcgctattaccatggtcgaggtgagccccacgttctgcttcactctccccatctcccccccctccccacccccaattttgtatttatttattttttaattattttgtgcagcgatgggggcggggggggggggggggcgcgcgccaggcggggcggggcggggcgaggggcggggcggggcgaggcggagaggtgcggcggcagccaatcagagcggcgcgctccgaaagtttccttttatggcgaggcggcggcggcggcggccctataaaaagcgaagcgcgcggcgggcgggagtcgctgcgcgctgccttcgccccgtgccccgctccgccgccgcctcgcgccgcccgccccggctctgactgaccgcgttactcccacaggtgagcgggcgggacggcccttctcctccgggctgtaattagcgcttggtttaatgacggcttgtttcttttctgtggctgcgtgaaagccttgaggggctccgggagggccctttgtgcggggggagcggctcggggggtgcgtgcgtgtgtgtgtgcgtggggagcgccgcgtgcggctccgcgctgcccggcggctgtgagcgctgcgggcgcggcgcggggctttgtgcgctccgcagtgtgcgcgaggggagcgcggccgggggcggtgccccgcggtgcggggggggctgcgaggggaacaaaggctgcgtgcggggtgtgtgcgtgggggggtgagcagggggtgtgggcgcgtcggtcgggctgcaaccccccctgcacccccctccccgagttgctgagcacggcccggcttcgggtgcggggctccgtacggggcgtggcgcggggctcgccgtgccgggcggggggtggcggcaggtgggggtgccgggcggggcggggccgcctcgggccggggagggctcgggggaggggcgcggcggcccccggagcgccggcggctgtcgaggcgcggcgagccgcagccattgccttttatggtaatcgtgcgagagggcgcagggacttcctttgtcccaaatctgtgcggagccgaaatctgggaggcgccgccgcaccccctctagcgggcgcggggcgaagcggtgcggcgccggcaggaaggaaatgggcggggagggccttcgtgcgtcgccgcgccgccgtccccttctccctctccagcctcggggctgtccgcggggggacggctgccttcgggggggacggggcagggcggggttcggcttctggcgtgtgaccggcggctctagagcctctgctaaccatgttcatgccttcttctttttcctacagctcctgggcaacgtgctggttattgtgctgtctcatcattttggcaaagaattcgggattcgaaccggtgccgccaccatgaacttcgggctcagcttgattttccttgtccttgttttaaaaggtgtccagtgtgaggttcatctggtggagtctgggggagccttagtgaagcctggagggtccctgaaactctcctgtgcagcctctggattcagtttcagtaaatatggcatgtcttgggttcgccagactccagacaagaggctggagtgggtcgcaaccattagtagtagtgggagtcgcacctactatccagacagtgtgaagggccaattcaccatctccagagacaatgccaagaacaccctgtacctgcaaatgagcagtctgaagtctgaggacacagccatgtattactgttcaattagctgggacggtgctatggactactggggtcaagggacctcagtcaccgtctcctcagccaaaacgacacccccatctgtctatccactggcccctggatctgctgcccaaactaactccatggtgaccctgggatgcctggtcaagggctatttccctgagccagtgacagtgacctggaactctggatccctgtccagcggtgtgcacaccttcccagctgtcctgcagtctgacctctacactctgagcagctcagtgactgtcccctccagcacctggcccagcgagaccgtcacctgcaacgttgcccacccggccagcagcaccaaggtggacaagaaaattgtgcccagggattgtggtagaaagaggcgagagggcagaggaagtcttctaacatgcggtgacgtggaggagaatcccggccctatgaagttgcctgttaggctgttggtgctgatgttctggattcctgcttccagcagtgatgttttgatgacccaaactccactctccctgcctgtcagtcttggagatcaagcctccatctcttgcaaatctagtcagagcattgtacatagtaatggaaacacctatttagaatggtacctgcagaaaccaggccagtctccaaagctcctggtctacaaagtttccaatcgattttctggggtcccagacaggttcagtggcagtggatcagggacagatttcacactcaagatcagcagagtggaggctgaggatctgggaacttattactgctttcaaggttcacttgttccttgggcgttcggtggaggcaccaagctggaaatcaaacgggctgatgctgcaccaactgtatccatcttcccaccatccagtgagcagttaacatctggaggtgcctcagtcgtgtgcttcttgaacaacttctaccccaaagacatcaatgtcaagtggaagattgatggcagtgaacgacaaaatggcgtcctgaacagttggactgatcaggacagcaaagacagcacctacagcatgagcagcaccctcacgttgaccaaggacgagtatgaacgacataacagctatacctgtgaggccactcacaagacatcaacttcacccattgtcaagagcttcaacaggaatgagtgttagtaactcgaggacggggtgaactacgcctgaggatccgatctttttccctctgccaaaaattatggggacatcatgaagccccttgagcatctgacttctggctaataaaggaaatttattttcattgcaatagtgtgttggaattttttgtgtctctcactcggcctaggtagataagtagcatggcgggttaatcattaactacaaggaacccctagtgatggagttggccactccctctctgcgcgctcgctcgctcactgaggccgggcgaccaaaggtcgcccgacgcccgggctttgcccgggcggcctcagtgagcgagcgagcgcgcag

SEQ ID NO: 2179 - DNA, 3324 bp, Artificial Sequence
  Description of Artificial Sequence: Synthetic polynucleotide
ctgcgcgctcgctcgctcactgaggccgcccgggcaaagcccgggcgtcgggcgacctttggtcgcccggcctcagtgagcgagcgagcgcgcagagagggagtggccaactccatcactaggggttccttgtagttaatgattaacccgccatgctacttatctaccagggtaatggggatcctctagaactatagctagtcgacattgattattgactagttattaatagtaatcaattacggggtcattagttcatagcccatatatggagttccgcgttacataacttacggtaaatggcccgcctggctgaccgcccaacgacccccgcccattgacgtcaataatgacgtatgttcccatagtaacgccaatagggactttccattgacgtcaatgggtggagtatttacggtaaactgcccacttggcagtacatcaagtgtatcatatgccaagtacgccccctattgacgtcaatgacggtaaatggcccgcctggcattatgcccagtacatgaccttatgggactttcctacttggcagtacatctacgtattagtcatcgctattaccatgtcgaggccacgttctgcttcactctccccatctcccccccctccccacccccaattttgtatttatttattttttaattattttgtgcagcgatgggggcggggggggggggcgcgcgccaggcggggcggggcggggcgaggggcggggcggggcgaggcggagaggtgcggcggcagccaatcagagcggcgcgctccgaaagtttccttttatggcgaggcggcggcggcggcggccctataaaaagcgaagcgcgcggcgggcgggagcaagcttcgtttagtgaaccgtcagatcgcctggagacgccatccacgctgttttgacctccatagaagacaccgggaccgatccagcctccgcggattcgaatcccggccgggaacggtgcattggaacgcggattccccgtgccaagagtgacgtaagtaccgcctatagagtctataggcccacaaaaaatgctttcttcttttaatatacttttttgtttatcttatttctaatactttccctaatctctttctttcagggcaataatgatacaatgtatcatgcctctttgcaccattctaaagaataacagtgataatttctgggttaaggcaatagcaatatttctgcatataaatatttctgcatataaattgtaactgatgtaagaggtttcatattgctaatagcagctacaatccagctaccattctgcttttattttatggttgggataaggctggattattctgagtccaagctaggcccttttgctaatcatgttcatacctcttatcttcctcccacagctcctgggcaacgtgctggtctgtgtgctggcccatcactttggcaaagaattgggattcgaaccggtgccgccaccatgaagttgcctgttaggctgttggtgctgatgttctggattcctgcttccagcagtgatgttttgatgacccaaactccactctccctgcctgtcagtcttggagatcaagcctccatctcttgcaaatctagtcagagcattgtacatagtaatggaaacacctatttagaatggtacctgcagaaaccaggccagtctccaaagctcctggtctacaaagtttccaatcgattttctggggtcccagacaggttcagtggcagtggatcagggacagatttcacactcaagatcagcagagtggaggctgaggatctgggaacttattactgctttcaaggttcacttgttccttgggcgttcggtggaggcaccaagctggaaatcaaacgggctgatgctgcaccaactgtatccatcttcccaccatccagtgagcagttaacatctggaggtgcctcagtcgtgtgcttcttgaacaacttctaccccaaagacatcaatgtcaagtggaagattgatggcagtgaacgacaaaatggcgtcctgaacagttggactgatcaggacagcaaagacagcacctacagcatgagcagcaccctcacgttgaccaaggacgagtatgaacgacataacagctatacctgtgaggccactcacaagacatcaacttcacccattgtcaagagcttcaacaggaatgagtgtgagggcagaggaagtcttctaacatgcggtgacgtggaggagaatcccggccctatgaacttcgggctcagcttgattttccttgtccttgttttaaaaggtgtccagtgtgaggttcatctggtggagtctgggggagccttagtgaagcctggagggtccctgaaactctcctgtgcagcctctggattcagtttcagtaaatatggcatgtcttgggttcgccagactccagacaagaggctggagtgggtcgcaaccattagtagtagtgggagtcgcacctactatccagacagtgtgaagggccaattcaccatctccagagacaatgccaagaacaccctgtacctgcaaatgagcagtctgaagtctgaggacacagccatgtattactgttcaattagctgggacggtgctatggactactggggtcaagggacctcagtcaccgtctcctcagccaaaacgacacccccatctgtctatccactggcccctggatctgctgcccaaactaactccatggtgaccctgggatgcctggtcaagggctatttccctgagccagtgacagtgacctggaactctggatccctgtccagcggtgtgcacaccttcccagctgtcctgcagtctgacctctacactctgagcagctcagtgactgtcccctccagcacctggcccagcgagaccgtcacctgcaacgttgcccacccggccagcagcaccaaggtggacaagaaaattgtgcccagggattgtggttaggcaattgaaggcgaattgttaattaagaattcactcctcatcgaggacggggtgaactacgcctgaggatgatctttttccctctgccaaaaattatggggacatcatgaagccccttgagcatctgacttctggctaataaaggaaatttattttcattgcaatagtgtgttggaattttttgtgtctctcactcggcctaggtagataagtagcatggcgggttaatcattaactacaaggaacccctagtgatggagttggccactccctctctgcgcgctcgctcgctcactgaggccgggcgaccaaaggtcgcccgacgcccgggctttgcccgggcggcctcagtgagcgagcgagcgcgcag

SEQ ID NO: 2180 - DNA, 3814 bp, Artificial Sequence
  Description of Artificial Sequence: Synthetic polynucleotide
ctgcgcgctcgctcgctcactgaggccgcccgggcaaagcccgggcgtcgggcgacctttggtcgcccggcctcagtgagcgagcgagcgcgcagagagggagtggccaactccatcactaggggttccttgtagttaatgattaacccgccatgctacttatctaccagggtaatggggatcctctagaactatagctagtcgacataacgcgtctagttattaatagtaatcaattacggggtcattagttcatagcccatatatggagttccgcgttacataacttacggtaaatggcccgcctggctgaccgcccaacgacccccgcccattgacgtcaataatgacgtatgttcccatagtaacgccaatagggactttccattgacgtcaatgggtggagtatttacggtaaactgcccacttggcagtacatcaagtgtatcatatgccaagtacgccccctattgacgtcaatgacggtaaatggcccgcctggcattatgcccagtacatgaccttatgggactttcctacttggcagtacatctacgtattagtcatcgctattaccatggtcgaggtgagccccacgttctgcttcactctccccatctcccccccctccccacccccaattttgtatttatttattttttaattattttgtgcagcgatgggggcggggggggggggggggcgcgcgccaggcggggcggggcggggcgaggggcggggcggggcgaggcggagaggtgcggcggcagccaatcagagcggcgcgctccgaaagtttccttttatggcgaggcggcggcggcggcggccctataaaaagcgaagcgcgcggcgggcgggagtcgctgcgcgctgccttcgccccgtgccccgctccgccgccgcctcgcgccgcccgccccggctctgactgaccgcgttactcccacaggtgagcgggcgggacggcccttctcctccgggctgtaattagcgcttggtttaatgacggcttgtttcttttctgtggctgcgtgaaagccttgaggggctccgggagggccctttgtgcggggggagcggctcggggggtgcgtgcgtgtgtgtgtgcgtggggagcgccgcgtgcggctccgcgctgcccggcggctgtgagcgctgcgggcgcggcgcggggctttgtgcgctccgcagtgtgcgcgaggggagcgcggccgggggcggtgccccgcggtgcggggggggctgcgaggggaacaaaggctgcgtgcggggtgtgtgcgtgggggggtgagcagggggtgtgggcgcgtcggtcgggctgcaaccccccctgcacccccctccccgagttgctgagcacggcccggcttcgggtgcggggctccgtacggggcgtggcgcggggctcgccgtgccgggcggggggtggcggcaggtgggggtgccgggcggggcggggccgcctcgggccggggagggctcgggggaggggcgcggcggcccccggagcgccggcggctgtcgaggcgcggcgagccgcagccattgccttttatggtaatcgtgcgagagggcgcagggacttcctttgtcccaaatctgtgcggagccgaaatctgggaggcgccgccgcaccccctctagcgggcgcggggcgaagcggtgcggcgccggcaggaaggaaatgggcggggagggccttcgtgcgtcgccgcgccgccgtccccttctccctctccagcctcggggctgtccgcggggggacggctgccttcgggggggacggggcagggcggggttcggcttctggcgtgtgaccggcggctctagagcctctgctaaccatgttcatgccttcttctttttcctacagctcctgggcaacgtgctggttattgtgctgtctcatcattttggcaaagaattcgggattcgaaccggtgccgccaccatgaagttgcctgttaggctgttggtgctgatgttctggattcctgcttccagcagtgatgttttgatgacccaaactccactctccctgcctgtcagtcttggagatcaagcctccatctcttgcaaatctagtcagagcattgtacatagtaatggaaacacctatttagaatggtacctgcagaaaccaggccagtctccaaagctcctggtctacaaagtttccaatcgattttctggggtcccagacaggttcagtggcagtggatcagggacagatttcacactcaagatcagcagagtggaggctgaggatctgggaacttattactgctttcaaggttcacttgttccttgggcgttcggtggaggcaccaagctggaaatcaaacgggctgatgctgcaccaactgtatccatcttcccaccatccagtgagcagttaacatctggaggtgcctcagtcgtgtgcttcttgaacaacttctaccccaaagacatcaatgtcaagtggaagattgatggcagtgaacgacaaaatggcgtcctgaacagttggactgatcaggacagcaaagacagcacctacagcatgagcagcaccctcacgttgaccaaggacgagtatgaacgacataacagctatacctgtgaggccactcacaagacatcaacttcacccattgtcaagagcttcaacaggaatgagtgtgagggcagaggaagtcttctaacatgcggtgacgtggaggagaatcccggccctatgaacttcgggctcagcttgattttccttgtccttgttttaaaaggtgtccagtgtgaggttcatctggtggagtctgggggagccttagtgaagcctggagggtccctgaaactctcctgtgcagcctctggattcagtttcagtaaatatggcatgtcttgggttcgccagactccagacaagaggctggagtgggtcgcaaccattagtagtagtgggagtcgcacctactatccagacagtgtgaagggccaattcaccatctccagagacaatgccaagaacaccctgtacctgcaaatgagcagtctgaagtctgaggacacagccatgtattactgttcaattagctgggacggtgctatggactactggggtcaagggacctcagtcaccgtctcctcagccaaaacgacacccccatctgtctatccactggcccctggatctgctgcccaaactaactccatggtgaccctgggatgcctggtcaagggctatttccctgagccagtgacagtgacctggaactctggatccctgtccagcggtgtgcacaccttcccagctgtcctgcagtctgacctctacactctgagcagctcagtgactgtcccctccagcacctggcccagcgagaccgtcacctgcaacgttgcccacccggccagcagcaccaaggtggacaagaaaattgtgcccagggattgtggttaggcaattgaaggcgaattgttaattaagaattcactcctcatcgaggacggggtgaactacgcctgaggatccgatctttttccctctgccaaaaattatggggacatcatgaagccccttgagcatctgacttctggctaataaaggaaatttattttcattgcaatagtgtgttggaattttttgtgtctctcactcggcctaggtagataagtagcatggcgggttaatcattaactacaaggaacccctagtgatggagttggccactccctctctgcgcgctcgctcgctcactgaggccgggcgaccaaaggtcgcccgacgcccgggctttgcccgggcggcctcagtgagcgagcgagcgcgcag

SEQ ID NO: 2181 - DNA, 2567 bp, Artificial Sequence
  Description of Artificial Sequence: Synthetic polynucleotide
ctgcgcgctcgctcgctcactgaggccgcccgggcaaagcccgggcgtcgggcgacctttggtcgcccggcctcagtgagcgagcgagcgcgcagagagggagtggccaactccatcactaggggttccttgtagttaatgattaacccgccatgctacttatctaccagggtaatggggatcctctagaactatagctagtcgacattgattattgactagttattaatagtaatcaattacggggtcattagttcatagcccatatatggagttccgcgttacataacttacggtaaatggcccgcctggctgaccgcccaacgacccccgcccattgacgtcaataatgacgtatgttcccatagtaacgccaatagggactttccattgacgtcaatgggtggagtatttacggtaaactgcccacttggcagtacatcaagtgtatcatatgccaagtacgccccctattgacgtcaatgacggtaaatggcccgcctggcattatgcccagtacatgaccttatgggactttcctacttggcagtacatctacgtattagtcatcgctattaccatgtcgaggccacgttctgcttcactctccccatctcccccccctccccacccccaattttgtatttatttattttttaattattttgtgcagcgatgggggcggggggggggggcgcgcgccaggcggggcggggcggggcgaggggcggggcggggcgaggcggagaggtgcggcggcagccaatcagagcggcgcgctccgaaagtttccttttatggcgaggcggcggcggcggcggccctataaaaagcgaagcgcgcggcgggcgggagcaagcttcgtttagtgaaccgtcagatcgcctggagacgccatccacgctgttttgacctccatagaagacaccgggaccgatccagcctccgcggattcgaatcccggccgggaacggtgcattggaacgcggattccccgtgccaagagtgacgtaagtaccgcctatagagtctataggcccacaaaaaatgctttcttcttttaatatacttttttgtttatcttatttctaatactttccctaatctctttctttcagggcaataatgatacaatgtatcatgcctctttgcaccattctaaagaataacagtgataatttctgggttaaggcaatagcaatatttctgcatataaatatttctgcatataaattgtaactgatgtaagaggtttcatattgctaatagcagctacaatccagctaccattctgcttttattttatggttgggataaggctggattattctgagtccaagctaggcccttttgctaatcatgttcatacctcttatcttcctcccacagctcctgggcaacgtgctggtctgtgtgctggcccatcactttggcaaagaattgggattcgaaccggtgccgccaccatgaacttcgggctcagcttgattttccttgtccttgttttaaaaggtgtccagtgtgaggttcatctggtggagtctgggggagccttagtgaagcctggagggtccctgaaactctcctgtgcagcctctggattcagtttcagtaaatatggcatgtcttgggttcgccagactccagacaagaggctggagtgggtcgcaaccattagtagtagtgggagtcgcacctactatccagacagtgtgaagggccaattcaccatctccagagacaatgccaagaacaccctgtacctgcaaatgagcagtctgaagtctgaggacacagccatgtattactgttcaattagctgggacggtgctatggactactggggtcaagggacctcagtcaccgtctcctcaggtggtggtggatccgatgttttgatgacccaaactccactctccctgcctgtcagtcttggagatcaagcctccatctcttgcaaatctagtcagagcattgtacatagtaatggaaacacctatttagaatggtacctgcagaaaccaggccagtctccaaagctcctggtctacaaagtttccaatcgattttctggggtcccagacaggttcagtggcagtggatcagggacagatttcacactcaagatcagcagagtggaggctgaggatctgggaacttattactgctttcaaggttcacttgttccttgggcgttcggtggaggcaccaagctggaaatcaaatacccatacgatgttccagattacgcttagtgacctgaggatgatctttttccctctgccaaaaattatggggacatcatgaagccccttgagcatctgacttctggctaataaaggaaatttattttcattgcaatagtgtgttggaattttttgtgtctctcactcggcctaggtagataagtagcatggcgggttaatcattaactacaaggaacccctagtgatggagttggccactccctctctgcgcgctcgctcgctcactgaggccgggcgaccaaaggtcgcccgacgcccgggctttgcccgggcggcctcagtgagcgagcgagcgcgcag

SEQ ID NO: 2182 - DNA, 2582 bp, Artificial Sequence
  Description of Artificial Sequence: Synthetic polynucleotide
ctgcgcgctcgctcgctcactgaggccgcccgggcaaagcccgggcgtcgggcgacctttggtcgcccggcctcagtgagcgagcgagcgcgcagagagggagtggccaactccatcactaggggttccttgtagttaatgattaacccgccatgctacttatctaccagggtaatggggatcctctagaactatagctagtcgacattgattattgactagttattaatagtaatcaattacggggtcattagttcatagcccatatatggagttccgcgttacataacttacggtaaatggcccgcctggctgaccgcccaacgacccccgcccattgacgtcaataatgacgtatgttcccatagtaacgccaatagggactttccattgacgtcaatgggtggagtatttacggtaaactgcccacttggcagtacatcaagtgtatcatatgccaagtacgccccctattgacgtcaatgacggtaaatggcccgcctggcattatgcccagtacatgaccttatgggactttcctacttggcagtacatctacgtattagtcatcgctattaccatgtcgaggccacgttctgcttcactctccccatctcccccccctccccacccccaattttgtatttatttattttttaattattttgtgcagcgatgggggcggggggggggggcgcgcgccaggcggggcggggcggggcgaggggcggggcggggcgaggcggagaggtgcggcggcagccaatcagagcggcgcgctccgaaagtttccttttatggcgaggcggcggcggcggcggccctataaaaagcgaagcgcgcggcgggcgggagcaagcttcgtttagtgaaccgtcagatcgcctggagacgccatccacgctgttttgacctccatagaagacaccgggaccgatccagcctccgcggattcgaatcccggccgggaacggtgcattggaacgcggattccccgtgccaagagtgacgtaagtaccgcctatagagtctataggcccacaaaaaatgctttcttcttttaatatacttttttgtttatcttatttctaatactttccctaatctctttctttcagggcaataatgatacaatgtatcatgcctctttgcaccattctaaagaataacagtgataatttctgggttaaggcaatagcaatatttctgcatataaatatttctgcatataaattgtaactgatgtaagaggtttcatattgctaatagcagctacaatccagctaccattctgcttttattttatggttgggataaggctggattattctgagtccaagctaggcccttttgctaatcatgttcatacctcttatcttcctcccacagctcctgggcaacgtgctggtctgtgtgctggcccatcactttggcaaagaattgggattcgaaccggtgccgccaccatgaacttcgggctcagcttgattttccttgtccttgttttaaaaggtgtccagtgtgaggttcatctggtggagtctgggggagccttagtgaagcctggagggtccctgaaactctcctgtgcagcctctggattcagtttcagtaaatatggcatgtcttgggttcgccagactccagacaagaggctggagtgggtcgcaaccattagtagtagtgggagtcgcacctactatccagacagtgtgaagggccaattcaccatctccagagacaatgccaagaacaccctgtacctgcaaatgagcagtctgaagtctgaggacacagccatgtattactgttcaattagctgggacggtgctatggactactggggtcaagggacctcagtcaccgtctcctcaggtggtggtggatccggtggtggtggatccgatgttttgatgacccaaactccactctccctgcctgtcagtcttggagatcaagcctccatctcttgcaaatctagtcagagcattgtacatagtaatggaaacacctatttagaatggtacctgcagaaaccaggccagtctccaaagctcctggtctacaaagtttccaatcgattttctggggtcccagacaggttcagtggcagtggatcagggacagatttcacactcaagatcagcagagtggaggctgaggatctgggaacttattactgctttcaaggttcacttgttccttgggcgttcggtggaggcaccaagctggaaatcaaatacccatacgatgttccagattacgcttagtgacctgaggatgatctttttccctctgccaaaaattatggggacatcatgaagccccttgagcatctgacttctggctaataaaggaaatttattttcattgcaatagtgtgttggaattttttgtgtctctcactcggcctaggtagataagtagcatggcgggttaatcattaactacaaggaacccctagtgatggagttggccactccctctctgcgcgctcgctcgctcactgaggccgggcgaccaaaggtcgcccgacgcccgggctttgcccgggcggcctcagtgagcgagcgagcgcgcag

SEQ ID NO: 2183 - DNA, 2597 bp, Artificial Sequence
  Description of Artificial Sequence: Synthetic polynucleotide
ctgcgcgctcgctcgctcactgaggccgcccgggcaaagcccgggcgtcgggcgacctttggtcgcccggcctcagtgagcgagcgagcgcgcagagagggagtggccaactccatcactaggggttccttgtagttaatgattaacccgccatgctacttatctaccagggtaatggggatcctctagaactatagctagtcgacattgattattgactagttattaatagtaatcaattacggggtcattagttcatagcccatatatggagttccgcgttacataacttacggtaaatggcccgcctggctgaccgcccaacgacccccgcccattgacgtcaataatgacgtatgttcccatagtaacgccaatagggactttccattgacgtcaatgggtggagtatttacggtaaactgcccacttggcagtacatcaagtgtatcatatgccaagtacgccccctattgacgtcaatgacggtaaatggcccgcctggcattatgcccagtacatgaccttatgggactttcctacttggcagtacatctacgtattagtcatcgctattaccatgtcgaggccacgttctgcttcactctccccatctcccccccctccccacccccaattttgtatttatttattttttaattattttgtgcagcgatgggggcggggggggggggcgcgcgccaggcggggcggggcggggcgaggggcggggcggggcgaggcggagaggtgcggcggcagccaatcagagcggcgcgctccgaaagtttccttttatggcgaggcggcggcggcggcggccctataaaaagcgaagcgcgcggcgggcgggagcaagcttcgtttagtgaaccgtcagatcgcctggagacgccatccacgctgttttgacctccatagaagacaccgggaccgatccagcctccgcggattcgaatcccggccgggaacggtgcattggaacgcggattccccgtgccaagagtgacgtaagtaccgcctatagagtctataggcccacaaaaaatgctttcttcttttaatatacttttttgtttatcttatttctaatactttccctaatctctttctttcagggcaataatgatacaatgtatcatgcctctttgcaccattctaaagaataacagtgataatttctgggttaaggcaatagcaatatttctgcatataaatatttctgcatataaattgtaactgatgtaagaggtttcatattgctaatagcagctacaatccagctaccattctgcttttattttatggttgggataaggctggattattctgagtccaagctaggcccttttgctaatcatgttcatacctcttatcttcctcccacagctcctgggcaacgtgctggtctgtgtgctggcccatcactttggcaaagaattgggattcgaaccggtgccgccaccatgaacttcgggctcagcttgattttccttgtccttgttttaaaaggtgtccagtgtgaggttcatctggtggagtctgggggagccttagtgaagcctggagggtccctgaaactctcctgtgcagcctctggattcagtttcagtaaatatggcatgtcttgggttcgccagactccagacaagaggctggagtgggtcgcaaccattagtagtagtgggagtcgcacctactatccagacagtgtgaagggccaattcaccatctccagagacaatgccaagaacaccctgtacctgcaaatgagcagtctgaagtctgaggacacagccatgtattactgttcaattagctgggacggtgctatggactactggggtcaagggacctcagtcaccgtctcctcaggtggtggtggtagcggcggcggcggctctggtggtggtggatccgatgttttgatgacccaaactccactctccctgcctgtcagtcttggagatcaagcctccatctcttgcaaatctagtcagagcattgtacatagtaatggaaacacctatttagaatggtacctgcagaaaccaggccagtctccaaagctcctggtctacaaagtttccaatcgattttctggggtcccagacaggttcagtggcagtggatcagggacagatttcacactcaagatcagcagagtggaggctgaggatctgggaacttattactgctttcaaggttcacttgttccttgggcgttcggtggaggcaccaagctggaaatcaaatacccatacgatgttccagattacgcttagtgacctgaggatgatctttttccctctgccaaaaattatggggacatcatgaagccccttgagcatctgacttctggctaataaaggaaatttattttcattgcaatagtgtgttggaattttttgtgtctctcactcggcctaggtagataagtagcatggcgggttaatcattaactacaaggaacccctagtgatggagttggccactccctctctgcgcgctcgctcgctcactgaggccgggcgaccaaaggtcgcccgacgcccgggctttgcccgggcggcctcagtgagcgagcgagcgcgcag

SEQ ID NO: 2184 - DNA, 2612 bp, Artificial Sequence
  Description of Artificial Sequence: Synthetic polynucleotide
ctgcgcgctcgctcgctcactgaggccgcccgggcaaagcccgggcgtcgggcgacctttggtcgcccggcctcagtgagcgagcgagcgcgcagagagggagtggccaactccatcactaggggttccttgtagttaatgattaacccgccatgctacttatctaccagggtaatggggatcctctagaactatagctagtcgacattgattattgactagttattaatagtaatcaattacggggtcattagttcatagcccatatatggagttccgcgttacataacttacggtaaatggcccgcctggctgaccgcccaacgacccccgcccattgacgtcaataatgacgtatgttcccatagtaacgccaatagggactttccattgacgtcaatgggtggagtatttacggtaaactgcccacttggcagtacatcaagtgtatcatatgccaagtacgccccctattgacgtcaatgacggtaaatggcccgcctggcattatgcccagtacatgaccttatgggactttcctacttggcagtacatctacgtattagtcatcgctattaccatgtcgaggccacgttctgcttcactctccccatctcccccccctccccacccccaattttgtatttatttattttttaattattttgtgcagcgatgggggcggggggggggggcgcgcgccaggcggggcggggcggggcgaggggcggggcggggcgaggcggagaggtgcggcggcagccaatcagagcggcgcgctccgaaagtttccttttatggcgaggcggcggcggcggcggccctataaaaagcgaagcgcgcggcgggcgggagcaagcttcgtttagtgaaccgtcagatcgcctggagacgccatccacgctgttttgacctccatagaagacaccgggaccgatccagcctccgcggattcgaatcccggccgggaacggtgcattggaacgcggattccccgtgccaagagtgacgtaagtaccgcctatagagtctataggcccacaaaaaatgctttcttcttttaatatacttttttgtttatcttatttctaatactttccctaatctctttctttcagggcaataatgatacaatgtatcatgcctctttgcaccattctaaagaataacagtgataatttctgggttaaggcaatagcaatatttctgcatataaatatttctgcatataaattgtaactgatgtaagaggtttcatattgctaatagcagctacaatccagctaccattctgcttttattttatggttgggataaggctggattattctgagtccaagctaggcccttttgctaatcatgttcatacctcttatcttcctcccacagctcctgggcaacgtgctggtctgtgtgctggcccatcactttggcaaagaattgggattcgaaccggtgccgccaccatgaacttcgggctcagcttgattttccttgtccttgttttaaaaggtgtccagtgtgaggttcatctggtggagtctgggggagccttagtgaagcctggagggtccctgaaactctcctgtgcagcctctggattcagtttcagtaaatatggcatgtcttgggttcgccagactccagacaagaggctggagtgggtcgcaaccattagtagtagtgggagtcgcacctactatccagacagtgtgaagggccaattcaccatctccagagacaatgccaagaacaccctgtacctgcaaatgagcagtctgaagtctgaggacacagccatgtattactgttcaattagctgggacggtgctatggactactggggtcaagggacctcagtcaccgtctcctcaggtggtggtggtagcggcggcggcggctctggtggtggtggatccggtggtggtggatccgatgttttgatgacccaaactccactctccctgcctgtcagtcttggagatcaagcctccatctcttgcaaatctagtcagagcattgtacatagtaatggaaacacctatttagaatggtacctgcagaaaccaggccagtctccaaagctcctggtctacaaagtttccaatcgattttctggggtcccagacaggttcagtggcagtggatcagggacagatttcacactcaagatcagcagagtggaggctgaggatctgggaacttattactgctttcaaggttcacttgttccttgggcgttcggtggaggcaccaagctggaaatcaaatacccatacgatgttccagattacgcttagtgacctgaggatgatctttttccctctgccaaaaattatggggacatcatgaagccccttgagcatctgacttctggctaataaaggaaatttattttcattgcaatagtgtgttggaattttttgtgtctctcactcggcctaggtagataagtagcatggcgggttaatcattaactacaaggaacccctagtgatggagttggccactccctctctgcgcgctcgctcgctcactgaggccgggcgaccaaaggtcgcccgacgcccgggctttgcccgggcggcctcagtgagcgagcgagcgcgcag

SEQ ID NO: 2185 - DNA, 2627 bp, Artificial Sequence
  Description of Artificial Sequence: Synthetic polynucleotide
ctgcgcgctcgctcgctcactgaggccgcccgggcaaagcccgggcgtcgggcgacctttggtcgcccggcctcagtgagcgagcgagcgcgcagagagggagtggccaactccatcactaggggttccttgtagttaatgattaacccgccatgctacttatctaccagggtaatggggatcctctagaactatagctagtcgacattgattattgactagttattaatagtaatcaattacggggtcattagttcatagcccatatatggagttccgcgttacataacttacggtaaatggcccgcctggctgaccgcccaacgacccccgcccattgacgtcaataatgacgtatgttcccatagtaacgccaatagggactttccattgacgtcaatgggtggagtatttacggtaaactgcccacttggcagtacatcaagtgtatcatatgccaagtacgccccctattgacgtcaatgacggtaaatggcccgcctggcattatgcccagtacatgaccttatgggactttcctacttggcagtacatctacgtattagtcatcgctattaccatgtcgaggccacgttctgcttcactctccccatctcccccccctccccacccccaattttgtatttatttattttttaattattttgtgcagcgatgggggcggggggggggggcgcgcgccaggcggggcggggcggggcgaggggcggggcggggcgaggcggagaggtgcggcggcagccaatcagagcggcgcgctccgaaagtttccttttatggcgaggcggcggcggcggcggccctataaaaagcgaagcgcgcggcgggcgggagcaagcttcgtttagtgaaccgtcagatcgcctggagacgccatccacgctgttttgacctccatagaagacaccgggaccgatccagcctccgcggattcgaatcccggccgggaacggtgcattggaacgcggattccccgtgccaagagtgacgtaagtaccgcctatagagtctataggcccacaaaaaatgctttcttcttttaatatacttttttgtttatcttatttctaatactttccctaatctctttctttcagggcaataatgatacaatgtatcatgcctctttgcaccattctaaagaataacagtgataatttctgggttaaggcaatagcaatatttctgcatataaatatttctgcatataaattgtaactgatgtaagaggtttcatattgctaatagcagctacaatccagctaccattctgcttttattttatggttgggataaggctggattattctgagtccaagctaggcccttttgctaatcatgttcatacctcttatcttcctcccacagctcctgggcaacgtgctggtctgtgtgctggcccatcactttggcaaagaattgggattcgaaccggtgccgccaccatgaacttcgggctcagcttgattttccttgtccttgttttaaaaggtgtccagtgtgaggttcatctggtggagtctgggggagccttagtgaagcctggagggtccctgaaactctcctgtgcagcctctggattcagtttcagtaaatatggcatgtcttgggttcgccagactccagacaagaggctggagtgggtcgcaaccattagtagtagtgggagtcgcacctactatccagacagtgtgaagggccaattcaccatctccagagacaatgccaagaacaccctgtacctgcaaatgagcagtctgaagtctgaggacacagccatgtattactgttcaattagctgggacggtgctatggactactggggtcaagggacctcagtcaccgtctcctcaggtggtggtggtagcggcggcggcggctctggtggtggtggatccggtggtggtggatccggtggtggtggatccgatgttttgatgacccaaactccactctccctgcctgtcagtcttggagatcaagcctccatctcttgcaaatctagtcagagcattgtacatagtaatggaaacacctatttagaatggtacctgcagaaaccaggccagtctccaaagctcctggtctacaaagtttccaatcgattttctggggtcccagacaggttcagtggcagtggatcagggacagatttcacactcaagatcagcagagtggaggctgaggatctgggaacttattactgctttcaaggttcacttgttccttgggcgttcggtggaggcaccaagctggaaatcaaatacccatacgatgttccagattacgcttagtgacctgaggatgatctttttccctctgccaaaaattatggggacatcatgaagccccttgagcatctgacttctggctaataaaggaaatttattttcattgcaatagtgtgttggaattttttgtgtctctcactcggcctaggtagataagtagcatggcgggttaatcattaactacaaggaacccctagtgatggagttggccactccctctctgcgcgctcgctcgctcactgaggccgggcgaccaaaggtcgcccgacgcccgggctttgcccgggcggcctcagtgagcgagcgagcgcgcag

SEQ ID NO: 2186 - DNA, 2642 bp, Artificial Sequence
  Description of Artificial Sequence: Synthetic polynucleotide
ctgcgcgctcgctcgctcactgaggccgcccgggcaaagcccgggcgtcgggcgacctttggtcgcccggcctcagtgagcgagcgagcgcgcagagagggagtggccaactccatcactaggggttccttgtagttaatgattaacccgccatgctacttatctaccagggtaatggggatcctctagaactatagctagtcgacattgattattgactagttattaatagtaatcaattacggggtcattagttcatagcccatatatggagttccgcgttacataacttacggtaaatggcccgcctggctgaccgcccaacgacccccgcccattgacgtcaataatgacgtatgttcccatagtaacgccaatagggactttccattgacgtcaatgggtggagtatttacggtaaactgcccacttggcagtacatcaagtgtatcatatgccaagtacgccccctattgacgtcaatgacggtaaatggcccgcctggcattatgcccagtacatgaccttatgggactttcctacttggcagtacatctacgtattagtcatcgctattaccatgtcgaggccacgttctgcttcactctccccatctcccccccctccccacccccaattttgtatttatttattttttaattattttgtgcagcgatgggggcggggggggggggcgcgcgccaggcggggcggggcggggcgaggggcggggcggggcgaggcggagaggtgcggcggcagccaatcagagcggcgcgctccgaaagtttccttttatggcgaggcggcggcggcggcggccctataaaaagcgaagcgcgcggcgggcgggagcaagcttcgtttagtgaaccgtcagatcgcctggagacgccatccacgctgttttgacctccatagaagacaccgggaccgatccagcctccgcggattcgaatcccggccgggaacggtgcattggaacgcggattccccgtgccaagagtgacgtaagtaccgcctatagagtctataggcccacaaaaaatgctttcttcttttaatatacttttttgtttatcttatttctaatactttccctaatctctttctttcagggcaataatgatacaatgtatcatgcctctttgcaccattctaaagaataacagtgataatttctgggttaaggcaatagcaatatttctgcatataaatatttctgcatataaattgtaactgatgtaagaggtttcatattgctaatagcagctacaatccagctaccattctgcttttattttatggttgggataaggctggattattctgagtccaagctaggcccttttgctaatcatgttcatacctcttatcttcctcccacagctcctgggcaacgtgctggtctgtgtgctggcccatcactttggcaaagaattgggattcgaaccggtgccgccaccatgaacttcgggctcagcttgattttccttgtccttgttttaaaaggtgtccagtgtgaggttcatctggtggagtctgggggagccttagtgaagcctggagggtccctgaaactctcctgtgcagcctctggattcagtttcagtaaatatggcatgtcttgggttcgccagactccagacaagaggctggagtgggtcgcaaccattagtagtagtgggagtcgcacctactatccagacagtgtgaagggccaattcaccatctccagagacaatgccaagaacaccctgtacctgcaaatgagcagtctgaagtctgaggacacagccatgtattactgttcaattagctgggacggtgctatggactactggggtcaagggacctcagtcaccgtctcctcaggtggtggtggtagcggcggcggcggctctggtggtggtggatccggtggtggtggatccggtggtggtggatccggtggtggtggatccgatgttttgatgacccaaactccactctccctgcctgtcagtcttggagatcaagcctccatctcttgcaaatctagtcagagcattgtacatagtaatggaaacacctatttagaatggtacctgcagaaaccaggccagtctccaaagctcctggtctacaaagtttccaatcgattttctggggtcccagacaggttcagtggcagtggatcagggacagatttcacactcaagatcagcagagtggaggctgaggatctgggaacttattactgctttcaaggttcacttgttccttgggcgttcggtggaggcaccaagctggaaatcaaatacccatacgatgttccagattacgcttagtgacctgaggatgatctttttccctctgccaaaaattatggggacatcatgaagccccttgagcatctgacttctggctaataaaggaaatttattttcattgcaatagtgtgttggaattttttgtgtctctcactcggcctaggtagataagtagcatggcgggttaatcattaactacaaggaacccctagtgatggagttggccactccctctctgcgcgctcgctcgctcactgaggccgggcgaccaaaggtcgcccgacgcccgggctttgcccgggcggcctcagtgagcgagcgagcgcgcag

SEQ ID NO: 2187 - DNA, 3055 bp, Artificial Sequence
  Description of Artificial Sequence: Synthetic polynucleotide
ctgcgcgctcgctcgctcactgaggccgcccgggcaaagcccgggcgtcgggcgacctttggtcgcccggcctcagtgagcgagcgagcgcgcagagagggagtggccaactccatcactaggggttccttgtagttaatgattaacccgccatgctacttatctaccagggtaatggggatcctctagaactatagctagtcgacataacgcgtctagttattaatagtaatcaattacggggtcattagttcatagcccatatatggagttccgcgttacataacttacggtaaatggcccgcctggctgaccgcccaacgacccccgcccattgacgtcaataatgacgtatgttcccatagtaacgccaatagggactttccattgacgtcaatgggtggagtatttacggtaaactgcccacttggcagtacatcaagtgtatcatatgccaagtacgccccctattgacgtcaatgacggtaaatggcccgcctggcattatgcccagtacatgaccttatgggactttcctacttggcagtacatctacgtattagtcatcgctattaccatggtcgaggtgagccccacgttctgcttcactctccccatctcccccccctccccacccccaattttgtatttatttattttttaattattttgtgcagcgatgggggcggggggggggggggggcgcgcgccaggcggggcggggcggggcgaggggcggggcggggcgaggcggagaggtgcggcggcagccaatcagagcggcgcgctccgaaagtttccttttatggcgaggcggcggcggcggcggccctataaaaagcgaagcgcgcggcgggcgggagtcgctgcgcgctgccttcgccccgtgccccgctccgccgccgcctcgcgccgcccgccccggctctgactgaccgcgttactcccacaggtgagcgggcgggacggcccttctcctccgggctgtaattagcgcttggtttaatgacggcttgtttcttttctgtggctgcgtgaaagccttgaggggctccgggagggccctttgtgcggggggagcggctcggggggtgcgtgcgtgtgtgtgtgcgtggggagcgccgcgtgcggctccgcgctgcccggcggctgtgagcgctgcgggcgcggcgcggggctttgtgcgctccgcagtgtgcgcgaggggagcgcggccgggggcggtgccccgcggtgcggggggggctgcgaggggaacaaaggctgcgtgcggggtgtgtgcgtgggggggtgagcagggggtgtgggcgcgtcggtcgggctgcaaccccccctgcacccccctccccgagttgctgagcacggcccggcttcgggtgcggggctccgtacggggcgtggcgcggggctcgccgtgccgggcggggggtggcggcaggtgggggtgccgggcggggcggggccgcctcgggccggggagggctcgggggaggggcgcggcggcccccggagcgccggcggctgtcgaggcgcggcgagccgcagccattgccttttatggtaatcgtgcgagagggcgcagggacttcctttgtcccaaatctgtgcggagccgaaatctgggaggcgccgccgcaccccctctagcgggcgcggggcgaagcggtgcggcgccggcaggaaggaaatgggcggggagggccttcgtgcgtcgccgcgccgccgtccccttctccctctccagcctcggggctgtccgcggggggacggctgccttcgggggggacggggcagggcggggttcggcttctggcgtgtgaccggcggctctagagcctctgctaaccatgttcatgccttcttctttttcctacagctcctgggcaacgtgctggttattgtgctgtctcatcattttggcaaagaattcgggattcgaaccggtgccgccaccatgaacttcgggctcagcttgattttccttgtccttgttttaaaaggtgtccagtgtgaggttcatctggtggagtctgggggagccttagtgaagcctggagggtccctgaaactctcctgtgcagcctctggattcagtttcagtaaatatggcatgtcttgggttcgccagactccagacaagaggctggagtgggtcgcaaccattagtagtagtgggagtcgcacctactatccagacagtgtgaagggccaattcaccatctccagagacaatgccaagaacaccctgtacctgcaaatgagcagtctgaagtctgaggacacagccatgtattactgttcaattagctgggacggtgctatggactactggggtcaagggacctcagtcaccgtctcctcaggtggtggtggatccgatgttttgatgacccaaactccactctccctgcctgtcagtcttggagatcaagcctccatctcttgcaaatctagtcagagcattgtacatagtaatggaaacacctatttagaatggtacctgcagaaaccaggccagtctccaaagctcctggtctacaaagtttccaatcgattttctggggtcccagacaggttcagtggcagtggatcagggacagatttcacactcaagatcagcagagtggaggctgaggatctgggaacttattactgctttcaaggttcacttgttccttgggcgttcggtggaggcaccaagctggaaatcaaatacccatacgatgttccagattacgcttagtgacctgaggatgatctttttccctctgccaaaaattatggggacatcatgaagccccttgagcatctgacttctggctaataaaggaaatttattttcattgcaatagtgtgttggaattttttgtgtctctcactcggcctaggtagataagtagcatggcgggttaatcattaactacaaggaacccctagtgatggagttggccactccctctctgcgcgctcgctcgctcactgaggccgggcgaccaaaggtcgcccgacgcccgggctttgcccgggcggcctcagtgagcgagcgagcgcgcag

SEQ ID NO: 2188 - DNA, 3070 bp, Artificial Sequence
  Description of Artificial Sequence: Synthetic polynucleotide
ctgcgcgctcgctcgctcactgaggccgcccgggcaaagcccgggcgtcgggcgacctttggtcgcccggcctcagtgagcgagcgagcgcgcagagagggagtggccaactccatcactaggggttccttgtagttaatgattaacccgccatgctacttatctaccagggtaatggggatcctctagaactatagctagtcgacataacgcgtctagttattaatagtaatcaattacggggtcattagttcatagcccatatatggagttccgcgttacataacttacggtaaatggcccgcctggctgaccgcccaacgacccccgcccattgacgtcaataatgacgtatgttcccatagtaacgccaatagggactttccattgacgtcaatgggtggagtatttacggtaaactgcccacttggcagtacatcaagtgtatcatatgccaagtacgccccctattgacgtcaatgacggtaaatggcccgcctggcattatgcccagtacatgaccttatgggactttcctacttggcagtacatctacgtattagtcatcgctattaccatggtcgaggtgagccccacgttctgcttcactctccccatctcccccccctccccacccccaattttgtatttatttattttttaattattttgtgcagcgatgggggcggggggggggggggggcgcgcgccaggcggggcggggcggggcgaggggcggggcggggcgaggcggagaggtgcggcggcagccaatcagagcggcgcgctccgaaagtttccttttatggcgaggcggcggcggcggcggccctataaaaagcgaagcgcgcggcgggcgggagtcgctgcgcgctgccttcgccccgtgccccgctccgccgccgcctcgcgccgcccgccccggctctgactgaccgcgttactcccacaggtgagcgggcgggacggcccttctcctccgggctgtaattagcgcttggtttaatgacggcttgtttcttttctgtggctgcgtgaaagccttgaggggctccgggagggccctttgtgcggggggagcggctcggggggtgcgtgcgtgtgtgtgtgcgtggggagcgccgcgtgcggctccgcgctgcccggcggctgtgagcgctgcgggcgcggcgcggggctttgtgcgctccgcagtgtgcgcgaggggagcgcggccgggggcggtgccccgcggtgcggggggggctgcgaggggaacaaaggctgcgtgcggggtgtgtgcgtgggggggtgagcagggggtgtgggcgcgtcggtcgggctgcaaccccccctgcacccccctccccgagttgctgagcacggcccggcttcgggtgcggggctccgtacggggcgtggcgcggggctcgccgtgccgggcggggggtggcggcaggtgggggtgccgggcggggcggggccgcctcgggccggggagggctcgggggaggggcgcggcggcccccggagcgccggcggctgtcgaggcgcggcgagccgcagccattgccttttatggtaatcgtgcgagagggcgcagggacttcctttgtcccaaatctgtgcggagccgaaatctgggaggcgccgccgcaccccctctagcgggcgcggggcgaagcggtgcggcgccggcaggaaggaaatgggcggggagggccttcgtgcgtcgccgcgccgccgtccccttctccctctccagcctcggggctgtccgcggggggacggctgccttcgggggggacggggcagggcggggttcggcttctggcgtgtgaccggcggctctagagcctctgctaaccatgttcatgccttcttctttttcctacagctcctgggcaacgtgctggttattgtgctgtctcatcattttggcaaagaattcgggattcgaaccggtgccgccaccatgaacttcgggctcagcttgattttccttgtccttgttttaaaaggtgtccagtgtgaggttcatctggtggagtctgggggagccttagtgaagcctggagggtccctgaaactctcctgtgcagcctctggattcagtttcagtaaatatggcatgtcttgggttcgccagactccagacaagaggctggagtgggtcgcaaccattagtagtagtgggagtcgcacctactatccagacagtgtgaagggccaattcaccatctccagagacaatgccaagaacaccctgtacctgcaaatgagcagtctgaagtctgaggacacagccatgtattactgttcaattagctgggacggtgctatggactactggggtcaagggacctcagtcaccgtctcctcaggtggtggtggtagcggcggcggcggctctgatgttttgatgacccaaactccactctccctgcctgtcagtcttggagatcaagcctccatctcttgcaaatctagtcagagcattgtacatagtaatggaaacacctatttagaatggtacctgcagaaaccaggccagtctccaaagctcctggtctacaaagtttccaatcgattttctggggtcccagacaggttcagtggcagtggatcagggacagatttcacactcaagatcagcagagtggaggctgaggatctgggaacttattactgctttcaaggttcacttgttccttgggcgttcggtggaggcaccaagctggaaatcaaatacccatacgatgttccagattacgcttagtgacctgaggatgatctttttccctctgccaaaaattatggggacatcatgaagccccttgagcatctgacttctggctaataaaggaaatttattttcattgcaatagtgtgttggaattttttgtgtctctcactcggcctaggtagataagtagcatggcgggttaatcattaactacaaggaacccctagtgatggagttggccactccctctctgcgcgctcgctcgctcactgaggccgggcgaccaaaggtcgcccgacgcccgggctttgcccgggcggcctcagtgagcgagcgagcgcgcag

SEQ ID NO: 2189 - DNA, 3085 bp, Artificial Sequence
  Description of Artificial Sequence: Synthetic polynucleotide
ctgcgcgctcgctcgctcactgaggccgcccgggcaaagcccgggcgtcgggcgacctttggtcgcccggcctcagtgagcgagcgagcgcgcagagagggagtggccaactccatcactaggggttccttgtagttaatgattaacccgccatgctacttatctaccagggtaatggggatcctctagaactatagctagtcgacataacgcgtctagttattaatagtaatcaattacggggtcattagttcatagcccatatatggagttccgcgttacataacttacggtaaatggcccgcctggctgaccgcccaacgacccccgcccattgacgtcaataatgacgtatgttcccatagtaacgccaatagggactttccattgacgtcaatgggtggagtatttacggtaaactgcccacttggcagtacatcaagtgtatcatatgccaagtacgccccctattgacgtcaatgacggtaaatggcccgcctggcattatgcccagtacatgaccttatgggactttcctacttggcagtacatctacgtattagtcatcgctattaccatggtcgaggtgagccccacgttctgcttcactctccccatctcccccccctccccacccccaattttgtatttatttattttttaattattttgtgcagcgatgggggcggggggggggggggggcgcgcgccaggcggggcggggcggggcgaggggcggggcggggcgaggcggagaggtgcggcggcagccaatcagagcggcgcgctccgaaagtttccttttatggcgaggcggcggcggcggcggccctataaaaagcgaagcgcgcggcgggcgggagtcgctgcgcgctgccttcgccccgtgccccgctccgccgccgcctcgcgccgcccgccccggctctgactgaccgcgttactcccacaggtgagcgggcgggacggcccttctcctccgggctgtaattagcgcttggtttaatgacggcttgtttcttttctgtggctgcgtgaaagccttgaggggctccgggagggccctttgtgcggggggagcggctcggggggtgcgtgcgtgtgtgtgtgcgtggggagcgccgcgtgcggctccgcgctgcccggcggctgtgagcgctgcgggcgcggcgcggggctttgtgcgctccgcagtgtgcgcgaggggagcgcggccgggggcggtgccccgcggtgcggggggggctgcgaggggaacaaaggctgcgtgcggggtgtgtgcgtgggggggtgagcagggggtgtgggcgcgtcggtcgggctgcaaccccccctgcacccccctccccgagttgctgagcacggcccggcttcgggtgcggggctccgtacggggcgtggcgcggggctcgccgtgccgggcggggggtggcggcaggtgggggtgccgggcggggcggggccgcctcgggccggggagggctcgggggaggggcgcggcggcccccggagcgccggcggctgtcgaggcgcggcgagccgcagccattgccttttatggtaatcgtgcgagagggcgcagggacttcctttgtcccaaatctgtgcggagccgaaatctgggaggcgccgccgcaccccctctagcgggcgcggggcgaagcggtgcggcgccggcaggaaggaaatgggcggggagggccttcgtgcgtcgccgcgccgccgtccccttctccctctccagcctcggggctgtccgcggggggacggctgccttcgggggggacggggcagggcggggttcggcttctggcgtgtgaccggcggctctagagcctctgctaaccatgttcatgccttcttctttttcctacagctcctgggcaacgtgctggttattgtgctgtctcatcattttggcaaagaattcgggattcgaaccggtgccgccaccatgaacttcgggctcagcttgattttccttgtccttgttttaaaaggtgtccagtgtgaggttcatctggtggagtctgggggagccttagtgaagcctggagggtccctgaaactctcctgtgcagcctctggattcagtttcagtaaatatggcatgtcttgggttcgccagactccagacaagaggctggagtgggtcgcaaccattagtagtagtgggagtcgcacctactatccagacagtgtgaagggccaattcaccatctccagagacaatgccaagaacaccctgtacctgcaaatgagcagtctgaagtctgaggacacagccatgtattactgttcaattagctgggacggtgctatggactactggggtcaagggacctcagtcaccgtctcctcaggtggtggtggtagcggcggcggcggctctggtggtggtggatccgatgttttgatgacccaaactccactctccctgcctgtcagtcttggagatcaagcctccatctcttgcaaatctagtcagagcattgtacatagtaatggaaacacctatttagaatggtacctgcagaaaccaggccagtctccaaagctcctggtctacaaagtttccaatcgattttctggggtcccagacaggttcagtggcagtggatcagggacagatttcacactcaagatcagcagagtggaggctgaggatctgggaacttattactgctttcaaggttcacttgttccttgggcgttcggtggaggcaccaagctggaaatcaaatacccatacgatgttccagattacgcttagtgacctgaggatgatctttttccctctgccaaaaattatggggacatcatgaagccccttgagcatctgacttctggctaataaaggaaatttattttcattgcaatagtgtgttggaattttttgtgtctctcactcggcctaggtagataagtagcatggcgggttaatcattaactacaaggaacccctagtgatggagttggccactccctctctgcgcgctcgctcgctcactgaggccgggcgaccaaaggtcgcccgacgcccgggctttgcccgggcggcctcagtgagcgagcgagcgcgcag

SEQ ID NO: 2190 - DNA, 3100 bp, Artificial Sequence
  Description of Artificial Sequence: Synthetic polynucleotide
ctgcgcgctcgctcgctcactgaggccgcccgggcaaagcccgggcgtcgggcgacctttggtcgcccggcctcagtgagcgagcgagcgcgcagagagggagtggccaactccatcactaggggttccttgtagttaatgattaacccgccatgctacttatctaccagggtaatggggatcctctagaactatagctagtcgacataacgcgtctagttattaatagtaatcaattacggggtcattagttcatagcccatatatggagttccgcgttacataacttacggtaaatggcccgcctggctgaccgcccaacgacccccgcccattgacgtcaataatgacgtatgttcccatagtaacgccaatagggactttccattgacgtcaatgggtggagtatttacggtaaactgcccacttggcagtacatcaagtgtatcatatgccaagtacgccccctattgacgtcaatgacggtaaatggcccgcctggcattatgcccagtacatgaccttatgggactttcctacttggcagtacatctacgtattagtcatcgctattaccatggtcgaggtgagccccacgttctgcttcactctccccatctcccccccctccccacccccaattttgtatttatttattttttaattattttgtgcagcgatgggggcggggggggggggggggcgcgcgccaggcggggcggggcggggcgaggggcggggcggggcgaggcggagaggtgcggcggcagccaatcagagcggcgcgctccgaaagtttccttttatggcgaggcggcggcggcggcggccctataaaaagcgaagcgcgcggcgggcgggagtcgctgcgcgctgccttcgccccgtgccccgctccgccgccgcctcgcgccgcccgccccggctctgactgaccgcgttactcccacaggtgagcgggcgggacggcccttctcctccgggctgtaattagcgcttggtttaatgacggcttgtttcttttctgtggctgcgtgaaagccttgaggggctccgggagggccctttgtgcggggggagcggctcggggggtgcgtgcgtgtgtgtgtgcgtggggagcgccgcgtgcggctccgcgctgcccggcggctgtgagcgctgcgggcgcggcgcggggctttgtgcgctccgcagtgtgcgcgaggggagcgcggccgggggcggtgccccgcggtgcggggggggctgcgaggggaacaaaggctgcgtgcggggtgtgtgcgtgggggggtgagcagggggtgtgggcgcgtcggtcgggctgcaaccccccctgcacccccctccccgagttgctgagcacggcccggcttcgggtgcggggctccgtacggggcgtggcgcggggctcgccgtgccgggcggggggtggcggcaggtgggggtgccgggcggggcggggccgcctcgggccggggagggctcgggggaggggcgcggcggcccccggagcgccggcggctgtcgaggcgcggcgagccgcagccattgccttttatggtaatcgtgcgagagggcgcagggacttcctttgtcccaaatctgtgcggagccgaaatctgggaggcgccgccgcaccccctctagcgggcgcggggcgaagcggtgcggcgccggcaggaaggaaatgggcggggagggccttcgtgcgtcgccgcgccgccgtccccttctccctctccagcctcggggctgtccgcggggggacggctgccttcgggggggacggggcagggcggggttcggcttctggcgtgtgaccggcggctctagagcctctgctaaccatgttcatgccttcttctttttcctacagctcctgggcaacgtgctggttattgtgctgtctcatcattttggcaaagaattcgggattcgaaccggtgccgccaccatgaacttcgggctcagcttgattttccttgtccttgttttaaaaggtgtccagtgtgaggttcatctggtggagtctgggggagccttagtgaagcctggagggtccctgaaactctcctgtgcagcctctggattcagtttcagtaaatatggcatgtcttgggttcgccagactccagacaagaggctggagtgggtcgcaaccattagtagtagtgggagtcgcacctactatccagacagtgtgaagggccaattcaccatctccagagacaatgccaagaacaccctgtacctgcaaatgagcagtctgaagtctgaggacacagccatgtattactgttcaattagctgggacggtgctatggactactggggtcaagggacctcagtcaccgtctcctcaggtggtggtggtagcggcggcggcggctctggtggtggtggatccggtggtggtggatccgatgttttgatgacccaaactccactctccctgcctgtcagtcttggagatcaagcctccatctcttgcaaatctagtcagagcattgtacatagtaatggaaacacctatttagaatggtacctgcagaaaccaggccagtctccaaagctcctggtctacaaagtttccaatcgattttctggggtcccagacaggttcagtggcagtggatcagggacagatttcacactcaagatcagcagagtggaggctgaggatctgggaacttattactgctttcaaggttcacttgttccttgggcgttcggtggaggcaccaagctggaaatcaaatacccatacgatgttccagattacgcttagtgacctgaggatgatctttttccctctgccaaaaattatggggacatcatgaagccccttgagcatctgacttctggctaataaaggaaatttattttcattgcaatagtgtgttggaattttttgtgtctctcactcggcctaggtagataagtagcatggcgggttaatcattaactacaaggaacccctagtgatggagttggccactccctctctgcgcgctcgctcgctcactgaggccgggcgaccaaaggtcgcccgacgcccgggctttgcccgggcggcctcagtgagcgagcgagcgcgcag

SEQ ID NO: 2191 - DNA, 3115 bp, Artificial Sequence
  Description of Artificial Sequence: Synthetic polynucleotide
ctgcgcgctcgctcgctcactgaggccgcccgggcaaagcccgggcgtcgggcgacctttggtcgcccggcctcagtgagcgagcgagcgcgcagagagggagtggccaactccatcactaggggttccttgtagttaatgattaacccgccatgctacttatctaccagggtaatggggatcctctagaactatagctagtcgacataacgcgtctagttattaatagtaatcaattacggggtcattagttcatagcccatatatggagttccgcgttacataacttacggtaaatggcccgcctggctgaccgcccaacgacccccgcccattgacgtcaataatgacgtatgttcccatagtaacgccaatagggactttccattgacgtcaatgggtggagtatttacggtaaactgcccacttggcagtacatcaagtgtatcatatgccaagtacgccccctattgacgtcaatgacggtaaatggcccgcctggcattatgcccagtacatgaccttatgggactttcctacttggcagtacatctacgtattagtcatcgctattaccatggtcgaggtgagccccacgttctgcttcactctccccatctcccccccctccccacccccaattttgtatttatttattttttaattattttgtgcagcgatgggggcggggggggggggggggcgcgcgccaggcggggcggggcggggcgaggggcggggcggggcgaggcggagaggtgcggcggcagccaatcagagcggcgcgctccgaaagtttccttttatggcgaggcggcggcggcggcggccctataaaaagcgaagcgcgcggcgggcgggagtcgctgcgcgctgccttcgccccgtgccccgctccgccgccgcctcgcgccgcccgccccggctctgactgaccgcgttactcccacaggtgagcgggcgggacggcccttctcctccgggctgtaattagcgcttggtttaatgacggcttgtttcttttctgtggctgcgtgaaagccttgaggggctccgggagggccctttgtgcggggggagcggctcggggggtgcgtgcgtgtgtgtgtgcgtggggagcgccgcgtgcggctccgcgctgcccggcggctgtgagcgctgcgggcgcggcgcggggctttgtgcgctccgcagtgtgcgcgaggggagcgcggccgggggcggtgccccgcggtgcggggggggctgcgaggggaacaaaggctgcgtgcggggtgtgtgcgtgggggggtgagcagggggtgtgggcgcgtcggtcgggctgcaaccccccctgcacccccctccccgagttgctgagcacggcccggcttcgggtgcggggctccgtacggggcgtggcgcggggctcgccgtgccgggcggggggtggcggcaggtgggggtgccgggcggggcggggccgcctcgggccggggagggctcgggggaggggcgcggcggcccccggagcgccggcggctgtcgaggcgcggcgagccgcagccattgccttttatggtaatcgtgcgagagggcgcagggacttcctttgtcccaaatctgtgcggagccgaaatctgggaggcgccgccgcaccccctctagcgggcgcggggcgaagcggtgcggcgccggcaggaaggaaatgggcggggagggccttcgtgcgtcgccgcgccgccgtccccttctccctctccagcctcggggctgtccgcggggggacggctgccttcgggggggacggggcagggcggggttcggcttctggcgtgtgaccggcggctctagagcctctgctaaccatgttcatgccttcttctttttcctacagctcctgggcaacgtgctggttattgtgctgtctcatcattttggcaaagaattcgggattcgaaccggtgccgccaccatgaacttcgggctcagcttgattttccttgtccttgttttaaaaggtgtccagtgtgaggttcatctggtggagtctgggggagccttagtgaagcctggagggtccctgaaactctcctgtgcagcctctggattcagtttcagtaaatatggcatgtcttgggttcgccagactccagacaagaggctggagtgggtcgcaaccattagtagtagtgggagtcgcacctactatccagacagtgtgaagggccaattcaccatctccagagacaatgccaagaacaccctgtacctgcaaatgagcagtctgaagtctgaggacacagccatgtattactgttcaattagctgggacggtgctatggactactggggtcaagggacctcagtcaccgtctcctcaggtggtggtggtagcggcggcggcggctctggtggtggtggatccggtggtggtggatccggtggtggtggatccgatgttttgatgacccaaactccactctccctgcctgtcagtcttggagatcaagcctccatctcttgcaaatctagtcagagcattgtacatagtaatggaaacacctatttagaatggtacctgcagaaaccaggccagtctccaaagctcctggtctacaaagtttccaatcgattttctggggtcccagacaggttcagtggcagtggatcagggacagatttcacactcaagatcagcagagtggaggctgaggatctgggaacttattactgctttcaaggttcacttgttccttgggcgttcggtggaggcaccaagctggaaatcaaatacccatacgatgttccagattacgcttagtgacctgaggatgatctttttccctctgccaaaaattatggggacatcatgaagccccttgagcatctgacttctggctaataaaggaaatttattttcattgcaatagtgtgttggaattttttgtgtctctcactcggcctaggtagataagtagcatggcgggttaatcattaactacaaggaacccctagtgatggagttggccactccctctctgcgcgctcgctcgctcactgaggccgggcgaccaaaggtcgcccgacgcccgggctttgcccgggcggcctcagtgagcgagcgagcgcgcag

SEQ ID NO: 2192 - DNA, 3130 bp, Artificial Sequence
  Description of Artificial Sequence: Synthetic polynucleotide
ctgcgcgctcgctcgctcactgaggccgcccgggcaaagcccgggcgtcgggcgacctttggtcgcccggcctcagtgagcgagcgagcgcgcagagagggagtggccaactccatcactaggggttccttgtagttaatgattaacccgccatgctacttatctaccagggtaatggggatcctctagaactatagctagtcgacataacgcgtctagttattaatagtaatcaattacggggtcattagttcatagcccatatatggagttccgcgttacataacttacggtaaatggcccgcctggctgaccgcccaacgacccccgcccattgacgtcaataatgacgtatgttcccatagtaacgccaatagggactttccattgacgtcaatgggtggagtatttacggtaaactgcccacttggcagtacatcaagtgtatcatatgccaagtacgccccctattgacgtcaatgacggtaaatggcccgcctggcattatgcccagtacatgaccttatgggactttcctacttggcagtacatctacgtattagtcatcgctattaccatggtcgaggtgagccccacgttctgcttcactctccccatctcccccccctccccacccccaattttgtatttatttattttttaattattttgtgcagcgatgggggcggggggggggggggggcgcgcgccaggcggggcggggcggggcgaggggcggggcggggcgaggcggagaggtgcggcggcagccaatcagagcggcgcgctccgaaagtttccttttatggcgaggcggcggcggcggcggccctataaaaagcgaagcgcgcggcgggcgggagtcgctgcgcgctgccttcgccccgtgccccgctccgccgccgcctcgcgccgcccgccccggctctgactgaccgcgttactcccacaggtgagcgggcgggacggcccttctcctccgggctgtaattagcgcttggtttaatgacggcttgtttcttttctgtggctgcgtgaaagccttgaggggctccgggagggccctttgtgcggggggagcggctcggggggtgcgtgcgtgtgtgtgtgcgtggggagcgccgcgtgcggctccgcgctgcccggcggctgtgagcgctgcgggcgcggcgcggggctttgtgcgctccgcagtgtgcgcgaggggagcgcggccgggggcggtgccccgcggtgcggggggggctgcgaggggaacaaaggctgcgtgcggggtgtgtgcgtgggggggtgagcagggggtgtgggcgcgtcggtcgggctgcaaccccccctgcacccccctccccgagttgctgagcacggcccggcttcgggtgcggggctccgtacggggcgtggcgcggggctcgccgtgccgggcggggggtggcggcaggtgggggtgccgggcggggcggggccgcctcgggccggggagggctcgggggaggggcgcggcggcccccggagcgccggcggctgtcgaggcgcggcgagccgcagccattgccttttatggtaatcgtgcgagagggcgcagggacttcctttgtcccaaatctgtgcggagccgaaatctgggaggcgccgccgcaccccctctagcgggcgcggggcgaagcggtgcggcgccggcaggaaggaaatgggcggggagggccttcgtgcgtcgccgcgccgccgtccccttctccctctccagcctcggggctgtccgcggggggacggctgccttcgggggggacggggcagggcggggttcggcttctggcgtgtgaccggcggctctagagcctctgctaaccatgttcatgccttcttctttttcctacagctcctgggcaacgtgctggttattgtgctgtctcatcattttggcaaagaattcgggattcgaaccggtgccgccaccatgaacttcgggctcagcttgattttccttgtccttgttttaaaaggtgtccagtgtgaggttcatctggtggagtctgggggagccttagtgaagcctggagggtccctgaaactctcctgtgcagcctctggattcagtttcagtaaatatggcatgtcttgggttcgccagactccagacaagaggctggagtgggtcgcaaccattagtagtagtgggagtcgcacctactatccagacagtgtgaagggccaattcaccatctccagagacaatgccaagaacaccctgtacctgcaaatgagcagtctgaagtctgaggacacagccatgtattactgttcaattagctgggacggtgctatggactactggggtcaagggacctcagtcaccgtctcctcaggtggtggtggtagcggcggcggcggctctggtggtggtggatccggtggtggtggatccggtggtggtggatccggtggtggtggatccgatgttttgatgacccaaactccactctccctgcctgtcagtcttggagatcaagcctccatctcttgcaaatctagtcagagcattgtacatagtaatggaaacacctatttagaatggtacctgcagaaaccaggccagtctccaaagctcctggtctacaaagtttccaatcgattttctggggtcccagacaggttcagtggcagtggatcagggacagatttcacactcaagatcagcagagtggaggctgaggatctgggaacttattactgctttcaaggttcacttgttccttgggcgttcggtggaggcaccaagctggaaatcaaatacccatacgatgttccagattacgcttagtgacctgaggatgatctttttccctctgccaaaaattatggggacatcatgaagccccttgagcatctgacttctggctaataaaggaaatttattttcattgcaatagtgtgttggaattttttgtgtctctcactcggcctaggtagataagtagcatggcgggttaatcattaactacaaggaacccctagtgatggagttggccactccctctctgcgcgctcgctcgctcactgaggccgggcgaccaaaggtcgcccgacgcccgggctttgcccgggcggcctcagtgagcgagcgagcgcgcag

SEQ ID NO: 2193 - DNA, 3160 bp, Artificial Sequence
  Description of Artificial Sequence: Synthetic polynucleotide
ctgcgcgctcgctcgctcactgaggccgcccgggcaaagcccgggcgtcgggcgacctttggtcgcccggcctcagtgagcgagcgagcgcgcagagagggagtggccaactccatcactaggggttccttgtagttaatgattaacccgccatgctacttatctaccagggtaatggggatcctctagaactatagctagtcgacataacgcgtctagttattaatagtaatcaattacggggtcattagttcatagcccatatatggagttccgcgttacataacttacggtaaatggcccgcctggctgaccgcccaacgacccccgcccattgacgtcaataatgacgtatgttcccatagtaacgccaatagggactttccattgacgtcaatgggtggagtatttacggtaaactgcccacttggcagtacatcaagtgtatcatatgccaagtacgccccctattgacgtcaatgacggtaaatggcccgcctggcattatgcccagtacatgaccttatgggactttcctacttggcagtacatctacgtattagtcatcgctattaccatggtcgaggtgagccccacgttctgcttcactctccccatctcccccccctccccacccccaattttgtatttatttattttttaattattttgtgcagcgatgggggcggggggggggggggggcgcgcgccaggcggggcggggcggggcgaggggcggggcggggcgaggcggagaggtgcggcggcagccaatcagagcggcgcgctccgaaagtttccttttatggcgaggcggcggcggcggcggccctataaaaagcgaagcgcgcggcgggcgggagtcgctgcgcgctgccttcgccccgtgccccgctccgccgccgcctcgcgccgcccgccccggctctgactgaccgcgttactcccacaggtgagcgggcgggacggcccttctcctccgggctgtaattagcgcttggtttaatgacggcttgtttcttttctgtggctgcgtgaaagccttgaggggctccgggagggccctttgtgcggggggagcggctcggggggtgcgtgcgtgtgtgtgtgcgtggggagcgccgcgtgcggctccgcgctgcccggcggctgtgagcgctgcgggcgcggcgcggggctttgtgcgctccgcagtgtgcgcgaggggagcgcggccgggggcggtgccccgcggtgcggggggggctgcgaggggaacaaaggctgcgtgcggggtgtgtgcgtgggggggtgagcagggggtgtgggcgcgtcggtcgggctgcaaccccccctgcacccccctccccgagttgctgagcacggcccggcttcgggtgcggggctccgtacggggcgtggcgcggggctcgccgtgccgggcggggggtggcggcaggtgggggtgccgggcggggcggggccgcctcgggccggggagggctcgggggaggggcgcggcggcccccggagcgccggcggctgtcgaggcgcggcgagccgcagccattgccttttatggtaatcgtgcgagagggcgcagggacttcctttgtcccaaatctgtgcggagccgaaatctgggaggcgccgccgcaccccctctagcgggcgcggggcgaagcggtgcggcgccggcaggaaggaaatgggcggggagggccttcgtgcgtcgccgcgccgccgtccccttctccctctccagcctcggggctgtccgcggggggacggctgccttcgggggggacggggcagggcggggttcggcttctggcgtgtgaccggcggctctagagcctctgctaaccatgttcatgccttcttctttttcctacagctcctgggcaacgtgctggttattgtgctgtctcatcattttggcaaagaattcgggattcgaaccggtgccgccaccatgaacttcgggctcagcttgattttccttgtccttgttttaaaaggtgtccagtgtgaggttcatctggtggagtctgggggagccttagtgaagcctggagggtccctgaaactctcctgtgcagcctctggattcagtttcagtaaatatggcatgtcttgggttcgccagactccagacaagaggctggagtgggtcgcaaccattagtagtagtgggagtcgcacctactatccagacagtgtgaagggccaattcaccatctccagagacaatgccaagaacaccctgtacctgcaaatgagcagtctgaagtctgaggacacagccatgtattactgttcaattagctgggacggtgctatggactactggggtcaagggacctcagtcaccgtctcctcaggtggtggtggtagcggcggcggcggctctggtggtggtggatccggtggtggtggatccggtggtggtggatccggtggtggtggatccggtggtggtggatccggtggtggtggatccgatgttttgatgacccaaactccactctccctgcctgtcagtcttggagatcaagcctccatctcttgcaaatctagtcagagcattgtacatagtaatggaaacacctatttagaatggtacctgcagaaaccaggccagtctccaaagctcctggtctacaaagtttccaatcgattttctggggtcccagacaggttcagtggcagtggatcagggacagatttcacactcaagatcagcagagtggaggctgaggatctgggaacttattactgctttcaaggttcacttgttccttgggcgttcggtggaggcaccaagctggaaatcaaatacccatacgatgttccagattacgcttagtgacctgaggatgatctttttccctctgccaaaaattatggggacatcatgaagccccttgagcatctgacttctggctaataaaggaaatttattttcattgcaatagtgtgttggaattttttgtgtctctcactcggcctaggtagataagtagcatggcgggttaatcattaactacaaggaacccctagtgatggagttggccactccctctctgcgcgctcgctcgctcactgaggccgggcgaccaaaggtcgcccgacgcccgggctttgcccgggcggcctcagtgagcgagcgagcgcgcag

SEQ ID NO: 2194 - DNA, 2569 bp, Artificial Sequence
  Description of Artificial Sequence: Synthetic polynucleotide
ctgcgcgctcgctcgctcactgaggccgcccgggcaaagcccgggcgtcgggcgacctttggtcgcccggcctcagtgagcgagcgagcgcgcagagagggagtggccaactccatcactaggggttccttgtagttaatgattaacccgccatgctacttatctaccagggtaatggggatcctctagaactatagctagtcgacattgattattgactagttattaatagtaatcaattacggggtcattagttcatagcccatatatggagttccgcgttacataacttacggtaaatggcccgcctggctgaccgcccaacgacccccgcccattgacgtcaataatgacgtatgttcccatagtaacgccaatagggactttccattgacgtcaatgggtggagtatttacggtaaactgcccacttggcagtacatcaagtgtatcatatgccaagtacgccccctattgacgtcaatgacggtaaatggcccgcctggcattatgcccagtacatgaccttatgggactttcctacttggcagtacatctacgtattagtcatcgctattaccatgtcgaggccacgttctgcttcactctccccatctcccccccctccccacccccaattttgtatttatttattttttaattattttgtgcagcgatgggggcggggggggggggcgcgcgccaggcggggcggggcggggcgaggggcggggcggggcgaggcggagaggtgcggcggcagccaatcagagcggcgcgctccgaaagtttccttttatggcgaggcggcggcggcggcggccctataaaaagcgaagcgcgcggcgggcgggagcaagcttcgtttagtgaaccgtcagatcgcctggagacgccatccacgctgttttgacctccatagaagacaccgggaccgatccagcctccgcggattcgaatcccggccgggaacggtgcattggaacgcggattccccgtgccaagagtgacgtaagtaccgcctatagagtctataggcccacaaaaaatgctttcttcttttaatatacttttttgtttatcttatttctaatactttccctaatctctttctttcagggcaataatgatacaatgtatcatgcctctttgcaccattctaaagaataacagtgataatttctgggttaaggcaatagcaatatttctgcatataaatatttctgcatataaattgtaactgatgtaagaggtttcatattgctaatagcagctacaatccagctaccattctgcttttattttatggttgggataaggctggattattctgagtccaagctaggcccttttgctaatcatgttcatacctcttatcttcctcccacagctcctgggcaacgtgctggtctgtgtgctggcccatcactttggcaaagaattgggattcgaaccggtgccgccaccatgaagttgcctgttaggctgttggtgctgatgttctggattcctgcttccagcagtgatgttttgatgacccaaactccactctccctgcctgtcagtcttggagatcaagcctccatctcttgcaaatctagtcagagcattgtacatagtaatggaaacacctatttagaatggtacctgcagaaaccaggccagtctccaaagctcctggtctacaaagtttccaatcgattttctggggtcccagacaggttcagtggcagtggatcagggacagatttcacactcaagatcagcagagtggaggctgaggatctgggaacttattactgctttcaaggttcacttgttccttgggcgttcggtggaggcaccaagctggaaatcaaaggtggtggtggatccgaggttcatctggtggagtctgggggagccttagtgaagcctggagggtccctgaaactctcctgtgcagcctctggattcagtttcagtaaatatggcatgtcttgggttcgccagactccagacaagaggctggagtgggtcgcaaccattagtagtagtgggagtcgcacctactatccagacagtgtgaagggccaattcaccatctccagagacaatgccaagaacaccctgtacctgcaaatgagcagtctgaagtctgaggacacagccatgtattactgttcaattagctgggacggtgctatggactactggggtcaagggacctcagtcaccgtctcctcatacccatacgatgttccagattacgcttagtgacctgaggatccgatctttttccctctgccaaaaattatggggacatcatgaagccccttgagcatctgacttctggctaataaaggaaatttattttcattgcaatagtgtgttggaattttttgtgtctctcactcggcctaggtagataagtagcatggcgggttaatcattaactacaaggaacccctagtgatggagttggccactccctctctgcgcgctcgctcgctcactgaggccgggcgaccaaaggtcgcccgacgcccgggctttgcccgggcggcctcagtgagcgagcgagcgcgcag

SEQ ID NO: 2195 - DNA, 2584 bp, Artificial Sequence
  Description of Artificial Sequence: Synthetic polynucleotide
ctgcgcgctcgctcgctcactgaggccgcccgggcaaagcccgggcgtcgggcgacctttggtcgcccggcctcagtgagcgagcgagcgcgcagagagggagtggccaactccatcactaggggttccttgtagttaatgattaacccgccatgctacttatctaccagggtaatggggatcctctagaactatagctagtcgacattgattattgactagttattaatagtaatcaattacggggtcattagttcatagcccatatatggagttccgcgttacataacttacggtaaatggcccgcctggctgaccgcccaacgacccccgcccattgacgtcaataatgacgtatgttcccatagtaacgccaatagggactttccattgacgtcaatgggtggagtatttacggtaaactgcccacttggcagtacatcaagtgtatcatatgccaagtacgccccctattgacgtcaatgacggtaaatggcccgcctggcattatgcccagtacatgaccttatgggactttcctacttggcagtacatctacgtattagtcatcgctattaccatgtcgaggccacgttctgcttcactctccccatctcccccccctccccacccccaattttgtatttatttattttttaattattttgtgcagcgatgggggcggggggggggggcgcgcgccaggcggggcggggcggggcgaggggcggggcggggcgaggcggagaggtgcggcggcagccaatcagagcggcgcgctccgaaagtttccttttatggcgaggcggcggcggcggcggccctataaaaagcgaagcgcgcggcgggcgggagcaagcttcgtttagtgaaccgtcagatcgcctggagacgccatccacgctgttttgacctccatagaagacaccgggaccgatccagcctccgcggattcgaatcccggccgggaacggtgcattggaacgcggattccccgtgccaagagtgacgtaagtaccgcctatagagtctataggcccacaaaaaatgctttcttcttttaatatacttttttgtttatcttatttctaatactttccctaatctctttctttcagggcaataatgatacaatgtatcatgcctctttgcaccattctaaagaataacagtgataatttctgggttaaggcaatagcaatatttctgcatataaatatttctgcatataaattgtaactgatgtaagaggtttcatattgctaatagcagctacaatccagctaccattctgcttttattttatggttgggataaggctggattattctgagtccaagctaggcccttttgctaatcatgttcatacctcttatcttcctcccacagctcctgggcaacgtgctggtctgtgtgctggcccatcactttggcaaagaattgggattcgaaccggtgccgccaccatgaagttgcctgttaggctgttggtgctgatgttctggattcctgcttccagcagtgatgttttgatgacccaaactccactctccctgcctgtcagtcttggagatcaagcctccatctcttgcaaatctagtcagagcattgtacatagtaatggaaacacctatttagaatggtacctgcagaaaccaggccagtctccaaagctcctggtctacaaagtttccaatcgattttctggggtcccagacaggttcagtggcagtggatcagggacagatttcacactcaagatcagcagagtggaggctgaggatctgggaacttattactgctttcaaggttcacttgttccttgggcgttcggtggaggcaccaagctggaaatcaaaggtggtggtggatccggtggtggtggatccgaggttcatctggtggagtctgggggagccttagtgaagcctggagggtccctgaaactctcctgtgcagcctctggattcagtttcagtaaatatggcatgtcttgggttcgccagactccagacaagaggctggagtgggtcgcaaccattagtagtagtgggagtcgcacctactatccagacagtgtgaagggccaattcaccatctccagagacaatgccaagaacaccctgtacctgcaaatgagcagtctgaagtctgaggacacagccatgtattactgttcaattagctgggacggtgctatggactactggggtcaagggacctcagtcaccgtctcctcatacccatacgatgttccagattacgcttagtgacctgaggatccgatctttttccctctgccaaaaattatggggacatcatgaagccccttgagcatctgacttctggctaataaaggaaatttattttcattgcaatagtgtgttggaattttttgtgtctctcactcggcctaggtagataagtagcatggcgggttaatcattaactacaaggaacccctagtgatggagttggccactccctctctgcgcgctcgctcgctcactgaggccgggcgaccaaaggtcgcccgacgcccgggctttgcccgggcggcctcagtgagcgagcgagcgcgcag

SEQ ID NO: 2196 - DNA, 2599 bp, Artificial Sequence
  Description of Artificial Sequence: Synthetic polynucleotide
ctgcgcgctcgctcgctcactgaggccgcccgggcaaagcccgggcgtcgggcgacctttggtcgcccggcctcagtgagcgagcgagcgcgcagagagggagtggccaactccatcactaggggttccttgtagttaatgattaacccgccatgctacttatctaccagggtaatggggatcctctagaactatagctagtcgacattgattattgactagttattaatagtaatcaattacggggtcattagttcatagcccatatatggagttccgcgttacataacttacggtaaatggcccgcctggctgaccgcccaacgacccccgcccattgacgtcaataatgacgtatgttcccatagtaacgccaatagggactttccattgacgtcaatgggtggagtatttacggtaaactgcccacttggcagtacatcaagtgtatcatatgccaagtacgccccctattgacgtcaatgacggtaaatggcccgcctggcattatgcccagtacatgaccttatgggactttcctacttggcagtacatctacgtattagtcatcgctattaccatgtcgaggccacgttctgcttcactctccccatctcccccccctccccacccccaattttgtatttatttattttttaattattttgtgcagcgatgggggcggggggggggggcgcgcgccaggcggggcggggcggggcgaggggcggggcggggcgaggcggagaggtgcggcggcagccaatcagagcggcgcgctccgaaagtttccttttatggcgaggcggcggcggcggcggccctataaaaagcgaagcgcgcggcgggcgggagcaagcttcgtttagtgaaccgtcagatcgcctggagacgccatccacgctgttttgacctccatagaagacaccgggaccgatccagcctccgcggattcgaatcccggccgggaacggtgcattggaacgcggattccccgtgccaagagtgacgtaagtaccgcctatagagtctataggcccacaaaaaatgctttcttcttttaatatacttttttgtttatcttatttctaatactttccctaatctctttctttcagggcaataatgatacaatgtatcatgcctctttgcaccattctaaagaataacagtgataatttctgggttaaggcaatagcaatatttctgcatataaatatttctgcatataaattgtaactgatgtaagaggtttcatattgctaatagcagctacaatccagctaccattctgcttttattttatggttgggataaggctggattattctgagtccaagctaggcccttttgctaatcatgttcatacctcttatcttcctcccacagctcctgggcaacgtgctggtctgtgtgctggcccatcactttggcaaagaattgggattcgaaccggtgccgccaccatgaagttgcctgttaggctgttggtgctgatgttctggattcctgcttccagcagtgatgttttgatgacccaaactccactctccctgcctgtcagtcttggagatcaagcctccatctcttgcaaatctagtcagagcattgtacatagtaatggaaacacctatttagaatggtacctgcagaaaccaggccagtctccaaagctcctggtctacaaagtttccaatcgattttctggggtcccagacaggttcagtggcagtggatcagggacagatttcacactcaagatcagcagagtggaggctgaggatctgggaacttattactgctttcaaggttcacttgttccttgggcgttcggtggaggcaccaagctggaaatcaaaggtggtggtggtagcggcggcggcggctctggtggtggtggatccgaggttcatctggtggagtctgggggagccttagtgaagcctggagggtccctgaaactctcctgtgcagcctctggattcagtttcagtaaatatggcatgtcttgggttcgccagactccagacaagaggctggagtgggtcgcaaccattagtagtagtgggagtcgcacctactatccagacagtgtgaagggccaattcaccatctccagagacaatgccaagaacaccctgtacctgcaaatgagcagtctgaagtctgaggacacagccatgtattactgttcaattagctgggacggtgctatggactactggggtcaagggacctcagtcaccgtctcctcatacccatacgatgttccagattacgcttagtgacctgaggatccgatctttttccctctgccaaaaattatggggacatcatgaagccccttgagcatctgacttctggctaataaaggaaatttattttcattgcaatagtgtgttggaattttttgtgtctctcactcggcctaggtagataagtagcatggcgggttaatcattaactacaaggaacccctagtgatggagttggccactccctctctgcgcgctcgctcgctcactgaggccgggcgaccaaaggtcgcccgacgcccgggctttgcccgggcggcctcagtgagcgagcgagcgcgcag

SEQ ID NO: 2197 - DNA, 2614 bp, Artificial Sequence
  Description of Artificial Sequence: Synthetic polynucleotide
ctgcgcgctcgctcgctcactgaggccgcccgggcaaagcccgggcgtcgggcgacctttggtcgcccggcctcagtgagcgagcgagcgcgcagagagggagtggccaactccatcactaggggttccttgtagttaatgattaacccgccatgctacttatctaccagggtaatggggatcctctagaactatagctagtcgacattgattattgactagttattaatagtaatcaattacggggtcattagttcatagcccatatatggagttccgcgttacataacttacggtaaatggcccgcctggctgaccgcccaacgacccccgcccattgacgtcaataatgacgtatgttcccatagtaacgccaatagggactttccattgacgtcaatgggtggagtatttacggtaaactgcccacttggcagtacatcaagtgtatcatatgccaagtacgccccctattgacgtcaatgacggtaaatggcccgcctggcattatgcccagtacatgaccttatgggactttcctacttggcagtacatctacgtattagtcatcgctattaccatgtcgaggccacgttctgcttcactctccccatctcccccccctccccacccccaattttgtatttatttattttttaattattttgtgcagcgatgggggcggggggggggggcgcgcgccaggcggggcggggcggggcgaggggcggggcggggcgaggcggagaggtgcggcggcagccaatcagagcggcgcgctccgaaagtttccttttatggcgaggcggcggcggcggcggccctataaaaagcgaagcgcgcggcgggcgggagcaagcttcgtttagtgaaccgtcagatcgcctggagacgccatccacgctgttttgacctccatagaagacaccgggaccgatccagcctccgcggattcgaatcccggccgggaacggtgcattggaacgcggattccccgtgccaagagtgacgtaagtaccgcctatagagtctataggcccacaaaaaatgctttcttcttttaatatacttttttgtttatcttatttctaatactttccctaatctctttctttcagggcaataatgatacaatgtatcatgcctctttgcaccattctaaagaataacagtgataatttctgggttaaggcaatagcaatatttctgcatataaatatttctgcatataaattgtaactgatgtaagaggtttcatattgctaatagcagctacaatccagctaccattctgcttttattttatggttgggataaggctggattattctgagtccaagctaggcccttttgctaatcatgttcatacctcttatcttcctcccacagctcctgggcaacgtgctggtctgtgtgctggcccatcactttggcaaagaattgggattcgaaccggtgccgccaccatgaagttgcctgttaggctgttggtgctgatgttctggattcctgcttccagcagtgatgttttgatgacccaaactccactctccctgcctgtcagtcttggagatcaagcctccatctcttgcaaatctagtcagagcattgtacatagtaatggaaacacctatttagaatggtacctgcagaaaccaggccagtctccaaagctcctggtctacaaagtttccaatcgattttctggggtcccagacaggttcagtggcagtggatcagggacagatttcacactcaagatcagcagagtggaggctgaggatctgggaacttattactgctttcaaggttcacttgttccttgggcgttcggtggaggcaccaagctggaaatcaaaggtggtggtggtagcggcggcggcggctctggtggtggtggatccggtggtggtggatccgaggttcatctggtggagtctgggggagccttagtgaagcctggagggtccctgaaactctcctgtgcagcctctggattcagtttcagtaaatatggcatgtcttgggttcgccagactccagacaagaggctggagtgggtcgcaaccattagtagtagtgggagtcgcacctactatccagacagtgtgaagggccaattcaccatctccagagacaatgccaagaacaccctgtacctgcaaatgagcagtctgaagtctgaggacacagccatgtattactgttcaattagctgggacggtgctatggactactggggtcaagggacctcagtcaccgtctcctcatacccatacgatgttccagattacgcttagtgacctgaggatccgatctttttccctctgccaaaaattatggggacatcatgaagccccttgagcatctgacttctggctaataaaggaaatttattttcattgcaatagtgtgttggaattttttgtgtctctcactcggcctaggtagataagtagcatggcgggttaatcattaactacaaggaacccctagtgatggagttggccactccctctctgcgcgctcgctcgctcactgaggccgggcgaccaaaggtcgcccgacgcccgggctttgcccgggcggcctcagtgagcgagcgagcgcgcag

SEQ ID NO: 2198 - DNA, 2627 bp, Artificial Sequence
  Description of Artificial Sequence: Synthetic polynucleotide
ctgcgcgctcgctcgctcactgaggccgcccgggcaaagcccgggcgtcgggcgacctttggtcgcccggcctcagtgagcgagcgagcgcgcagagagggagtggccaactccatcactaggggttccttgtagttaatgattaacccgccatgctacttatctaccagggtaatggggatcctctagaactatagctagtcgacattgattattgactagttattaatagtaatcaattacggggtcattagttcatagcccatatatggagttccgcgttacataacttacggtaaatggcccgcctggctgaccgcccaacgacccccgcccattgacgtcaataatgacgtatgttcccatagtaacgccaatagggactttccattgacgtcaatgggtggagtatttacggtaaactgcccacttggcagtacatcaagtgtatcatatgccaagtacgccccctattgacgtcaatgacggtaaatggcccgcctggcattatgcccagtacatgaccttatgggactttcctacttggcagtacatctacgtattagtcatcgctattaccatgtcgaggccacgttctgcttcactctccccatctcccccccctccccacccccaattttgtatttatttattttttaattattttgtgcagcgatgggggcggggggggggggcgcgcgccaggcggggcggggcggggcgaggggcggggcggggcgaggcggagaggtgcggcggcagccaatcagagcggcgcgctccgaaagtttccttttatggcgaggcggcggcggcggcggccctataaaaagcgaagcgcgcggcgggcgggagcaagcttcgtttagtgaaccgtcagatcgcctggagacgccatccacgctgttttgacctccatagaagacaccgggaccgatccagcctccgcggattcgaatcccggccgggaacggtgcattggaacgcggattccccgtgccaagagtgacgtaagtaccgcctatagagtctataggcccacaaaaaatgctttcttcttttaatatacttttttgtttatcttatttctaatactttccctaatctctttctttcagggcaataatgatacaatgtatcatgcctctttgcaccattctaaagaataacagtgataatttctgggttaaggcaatagcaatatttctgcatataaatatttctgcatataaattgtaactgatgtaagaggtttcatattgctaatagcagctacaatccagctaccattctgcttttattttatggttgggataaggctggattattctgagtccaagctaggcccttttgctaatcatgttcatacctcttatcttcctcccacagctcctgggcaacgtgctggtctgtgtgctggcccatcactttggcaaagaattgggattcgaaccggtgccgccaccatgaagttgcctgttaggctgttggtgctgatgttctggattcctgcttccagcagtgatgttttgatgacccaaactccactctccctgcctgtcagtcttggagatcaagcctccatctcttgcaaatctagtcagagcattgtacatagtaatggaaacacctatttagaatggtacctgcagaaaccaggccagtctccaaagctcctggtctacaaagtttccaatcgattttctggggtcccagacaggttcagtggcagtggatcagggacagatttcacactcaagatcagcagagtggaggctgaggatctgggaacttattactgctttcaaggttcacttgttccttgggcgttcggtggaggcaccaagctggaaatcaaaggtggtggtggtagcggcggcggcggctctggtggtggtggatccggtggtggtggatccggtggtggtggatccgaggttcatctggtggagtctgggggagccttagtgaagcctggagggtccctgaaactctcctgtgcagcctctggattcagtttcagtaaatatggcatgtcttgggttcgccagactccagacaagaggctggagtgggtcgcaaccattagtagtagtgggagtcgcacctactatccagacagtgtgaagggccaattcaccatctccagagacaatgccaagaacaccctgtacctgcaaatgagcagtctgaagtctgaggacacagccatgtattactgttcaattagctgggacggtgctatggactactggggtcaagggacctcagtcaccgtctcctcatacccatacgatgttccagattacgcttagtgacctgaggatgatctttttccctctgccaaaaattatggggacatcatgaagccccttgagcatctgacttctggctaataaaggaaatttattttcattgcaatagtgtgttggaattttttgtgtctctcactcggcctaggtagataagtagcatggcgggttaatcattaactacaaggaacccctagtgatggagttggccactccctctctgcgcgctcgctcgctcactgaggccgggcgaccaaaggtcgcccgacgcccgggctttgcccgggcggcctcagtgagcgagcgagcgcgcag

SEQ ID NO: 2199 - DNA, 2642 bp, Artificial Sequence
  Description of Artificial Sequence: Synthetic polynucleotide
ctgcgcgctcgctcgctcactgaggccgcccgggcaaagcccgggcgtcgggcgacctttggtcgcccggcctcagtgagcgagcgagcgcgcagagagggagtggccaactccatcactaggggttccttgtagttaatgattaacccgccatgctacttatctaccagggtaatggggatcctctagaactatagctagtcgacattgattattgactagttattaatagtaatcaattacggggtcattagttcatagcccatatatggagttccgcgttacataacttacggtaaatggcccgcctggctgaccgcccaacgacccccgcccattgacgtcaataatgacgtatgttcccatagtaacgccaatagggactttccattgacgtcaatgggtggagtatttacggtaaactgcccacttggcagtacatcaagtgtatcatatgccaagtacgccccctattgacgtcaatgacggtaaatggcccgcctggcattatgcccagtacatgaccttatgggactttcctacttggcagtacatctacgtattagtcatcgctattaccatgtcgaggccacgttctgcttcactctccccatctcccccccctccccacccccaattttgtatttatttattttttaattattttgtgcagcgatgggggcggggggggggggcgcgcgccaggcggggcggggcggggcgaggggcggggcggggcgaggcggagaggtgcggcggcagccaatcagagcggcgcgctccgaaagtttccttttatggcgaggcggcggcggcggcggccctataaaaagcgaagcgcgcggcgggcgggagcaagcttcgtttagtgaaccgtcagatcgcctggagacgccatccacgctgttttgacctccatagaagacaccgggaccgatccagcctccgcggattcgaatcccggccgggaacggtgcattggaacgcggattccccgtgccaagagtgacgtaagtaccgcctatagagtctataggcccacaaaaaatgctttcttcttttaatatacttttttgtttatcttatttctaatactttccctaatctctttctttcagggcaataatgatacaatgtatcatgcctctttgcaccattctaaagaataacagtgataatttctgggttaaggcaatagcaatatttctgcatataaatatttctgcatataaattgtaactgatgtaagaggtttcatattgctaatagcagctacaatccagctaccattctgcttttattttatggttgggataaggctggattattctgagtccaagctaggcccttttgctaatcatgttcatacctcttatcttcctcccacagctcctgggcaacgtgctggtctgtgtgctggcccatcactttggcaaagaattgggattcgaaccggtgccgccaccatgaagttgcctgttaggctgttggtgctgatgttctggattcctgcttccagcagtgatgttttgatgacccaaactccactctccctgcctgtcagtcttggagatcaagcctccatctcttgcaaatctagtcagagcattgtacatagtaatggaaacacctatttagaatggtacctgcagaaaccaggccagtctccaaagctcctggtctacaaagtttccaatcgattttctggggtcccagacaggttcagtggcagtggatcagggacagatttcacactcaagatcagcagagtggaggctgaggatctgggaacttattactgctttcaaggttcacttgttccttgggcgttcggtggaggcaccaagctggaaatcaaaggtggtggtggtagcggcggcggcggctctggtggtggtggatccggtggtggtggatccggtggtggtggatccggtggtggtggatccgaggttcatctggtggagtctgggggagccttagtgaagcctggagggtccctgaaactctcctgtgcagcctctggattcagtttcagtaaatatggcatgtcttgggttcgccagactccagacaagaggctggagtgggtcgcaaccattagtagtagtgggagtcgcacctactatccagacagtgtgaagggccaattcaccatctccagagacaatgccaagaacaccctgtacctgcaaatgagcagtctgaagtctgaggacacagccatgtattactgttcaattagctgggacggtgctatggactactggggtcaagggacctcagtcaccgtctcctcatacccatacgatgttccagattacgcttagtgacctgaggatgatctttttccctctgccaaaaattatggggacatcatgaagccccttgagcatctgacttctggctaataaaggaaatttattttcattgcaatagtgtgttggaattttttgtgtctctcactcggcctaggtagataagtagcatggcgggttaatcattaactacaaggaacccctagtgatggagttggccactccctctctgcgcgctcgctcgctcactgaggccgggcgaccaaaggtcgcccgacgcccgggctttgcccgggcggcctcagtgagcgagcgagcgcgcag

SEQ ID NO: 2200 - DNA, 3055 bp, Artificial Sequence
  Description of Artificial Sequence: Synthetic polynucleotide
ctgcgcgctcgctcgctcactgaggccgcccgggcaaagcccgggcgtcgggcgacctttggtcgcccggcctcagtgagcgagcgagcgcgcagagagggagtggccaactccatcactaggggttccttgtagttaatgattaacccgccatgctacttatctaccagggtaatggggatcctctagaactatagctagtcgacataacgcgtctagttattaatagtaatcaattacggggtcattagttcatagcccatatatggagttccgcgttacataacttacggtaaatggcccgcctggctgaccgcccaacgacccccgcccattgacgtcaataatgacgtatgttcccatagtaacgccaatagggactttccattgacgtcaatgggtggagtatttacggtaaactgcccacttggcagtacatcaagtgtatcatatgccaagtacgccccctattgacgtcaatgacggtaaatggcccgcctggcattatgcccagtacatgaccttatgggactttcctacttggcagtacatctacgtattagtcatcgctattaccatggtcgaggtgagccccacgttctgcttcactctccccatctcccccccctccccacccccaattttgtatttatttattttttaattattttgtgcagcgatgggggcggggggggggggggggcgcgcgccaggcggggcggggcggggcgaggggcggggcggggcgaggcggagaggtgcggcggcagccaatcagagcggcgcgctccgaaagtttccttttatggcgaggcggcggcggcggcggccctataaaaagcgaagcgcgcggcgggcgggagtcgctgcgcgctgccttcgccccgtgccccgctccgccgccgcctcgcgccgcccgccccggctctgactgaccgcgttactcccacaggtgagcgggcgggacggcccttctcctccgggctgtaattagcgcttggtttaatgacggcttgtttcttttctgtggctgcgtgaaagccttgaggggctccgggagggccctttgtgcggggggagcggctcggggggtgcgtgcgtgtgtgtgtgcgtggggagcgccgcgtgcggctccgcgctgcccggcggctgtgagcgctgcgggcgcggcgcggggctttgtgcgctccgcagtgtgcgcgaggggagcgcggccgggggcggtgccccgcggtgcggggggggctgcgaggggaacaaaggctgcgtgcggggtgtgtgcgtgggggggtgagcagggggtgtgggcgcgtcggtcgggctgcaaccccccctgcacccccctccccgagttgctgagcacggcccggcttcgggtgcggggctccgtacggggcgtggcgcggggctcgccgtgccgggcggggggtggcggcaggtgggggtgccgggcggggcggggccgcctcgggccggggagggctcgggggaggggcgcggcggcccccggagcgccggcggctgtcgaggcgcggcgagccgcagccattgccttttatggtaatcgtgcgagagggcgcagggacttcctttgtcccaaatctgtgcggagccgaaatctgggaggcgccgccgcaccccctctagcgggcgcggggcgaagcggtgcggcgccggcaggaaggaaatgggcggggagggccttcgtgcgtcgccgcgccgccgtccccttctccctctccagcctcggggctgtccgcggggggacggctgccttcgggggggacggggcagggcggggttcggcttctggcgtgtgaccggcggctctagagcctctgctaaccatgttcatgccttcttctttttcctacagctcctgggcaacgtgctggttattgtgctgtctcatcattttggcaaagaattcgggattcgaaccggtgccgccaccatgaagttgcctgttaggctgttggtgctgatgttctggattcctgcttccagcagtgatgttttgatgacccaaactccactctccctgcctgtcagtcttggagatcaagcctccatctcttgcaaatctagtcagagcattgtacatagtaatggaaacacctatttagaatggtacctgcagaaaccaggccagtctccaaagctcctggtctacaaagtttccaatcgattttctggggtcccagacaggttcagtggcagtggatcagggacagatttcacactcaagatcagcagagtggaggctgaggatctgggaacttattactgctttcaaggttcacttgttccttgggcgttcggtggaggcaccaagctggaaatcaaaggtggtggtggatccgaggttcatctggtggagtctgggggagccttagtgaagcctggagggtccctgaaactctcctgtgcagcctctggattcagtttcagtaaatatggcatgtcttgggttcgccagactccagacaagaggctggagtgggtcgcaaccattagtagtagtgggagtcgcacctactatccagacagtgtgaagggccaattcaccatctccagagacaatgccaagaacaccctgtacctgcaaatgagcagtctgaagtctgaggacacagccatgtattactgttcaattagctgggacggtgctatggactactggggtcaagggacctcagtcaccgtctcctcatacccatacgatgttccagattacgcttagtgacctgaggatgatctttttccctctgccaaaaattatggggacatcatgaagccccttgagcatctgacttctggctaataaaggaaatttattttcattgcaatagtgtgttggaattttttgtgtctctcactcggcctaggtagataagtagcatggcgggttaatcattaactacaaggaacccctagtgatggagttggccactccctctctgcgcgctcgctcgctcactgaggccgggcgaccaaaggtcgcccgacgcccgggctttgcccgggcggcctcagtgagcgagcgagcgcgcag

SEQ ID NO: 2201 - DNA, 3070 bp, Artificial Sequence
  Description of Artificial Sequence: Synthetic polynucleotide
ctgcgcgctcgctcgctcactgaggccgcccgggcaaagcccgggcgtcgggcgacctttggtcgcccggcctcagtgagcgagcgagcgcgcagagagggagtggccaactccatcactaggggttccttgtagttaatgattaacccgccatgctacttatctaccagggtaatggggatcctctagaactatagctagtcgacataacgcgtctagttattaatagtaatcaattacggggtcattagttcatagcccatatatggagttccgcgttacataacttacggtaaatggcccgcctggctgaccgcccaacgacccccgcccattgacgtcaataatgacgtatgttcccatagtaacgccaatagggactttccattgacgtcaatgggtggagtatttacggtaaactgcccacttggcagtacatcaagtgtatcatatgccaagtacgccccctattgacgtcaatgacggtaaatggcccgcctggcattatgcccagtacatgaccttatgggactttcctacttggcagtacatctacgtattagtcatcgctattaccatggtcgaggtgagccccacgttctgcttcactctccccatctcccccccctccccacccccaattttgtatttatttattttttaattattttgtgcagcgatgggggcggggggggggggggggcgcgcgccaggcggggcggggcggggcgaggggcggggcggggcgaggcggagaggtgcggcggcagccaatcagagcggcgcgctccgaaagtttccttttatggcgaggcggcggcggcggcggccctataaaaagcgaagcgcgcggcgggcgggagtcgctgcgcgctgccttcgccccgtgccccgctccgccgccgcctcgcgccgcccgccccggctctgactgaccgcgttactcccacaggtgagcgggcgggacggcccttctcctccgggctgtaattagcgcttggtttaatgacggcttgtttcttttctgtggctgcgtgaaagccttgaggggctccgggagggccctttgtgcggggggagcggctcggggggtgcgtgcgtgtgtgtgtgcgtggggagcgccgcgtgcggctccgcgctgcccggcggctgtgagcgctgcgggcgcggcgcggggctttgtgcgctccgcagtgtgcgcgaggggagcgcggccgggggcggtgccccgcggtgcggggggggctgcgaggggaacaaaggctgcgtgcggggtgtgtgcgtgggggggtgagcagggggtgtgggcgcgtcggtcgggctgcaaccccccctgcacccccctccccgagttgctgagcacggcccggcttcgggtgcggggctccgtacggggcgtggcgcggggctcgccgtgccgggcggggggtggcggcaggtgggggtgccgggcggggcggggccgcctcgggccggggagggctcgggggaggggcgcggcggcccccggagcgccggcggctgtcgaggcgcggcgagccgcagccattgccttttatggtaatcgtgcgagagggcgcagggacttcctttgtcccaaatctgtgcggagccgaaatctgggaggcgccgccgcaccccctctagcgggcgcggggcgaagcggtgcggcgccggcaggaaggaaatgggcggggagggccttcgtgcgtcgccgcgccgccgtccccttctccctctccagcctcggggctgtccgcggggggacggctgccttcgggggggacggggcagggcggggttcggcttctggcgtgtgaccggcggctctagagcctctgctaaccatgttcatgccttcttctttttcctacagctcctgggcaacgtgctggttattgtgctgtctcatcattttggcaaagaattcgggattcgaaccggtgccgccaccatgaagttgcctgttaggctgttggtgctgatgttctggattcctgcttccagcagtgatgttttgatgacccaaactccactctccctgcctgtcagtcttggagatcaagcctccatctcttgcaaatctagtcagagcattgtacatagtaatggaaacacctatttagaatggtacctgcagaaaccaggccagtctccaaagctcctggtctacaaagtttccaatcgattttctggggtcccagacaggttcagtggcagtggatcagggacagatttcacactcaagatcagcagagtggaggctgaggatctgggaacttattactgctttcaaggttcacttgttccttgggcgttcggtggaggcaccaagctggaaatcaaaggtggtggtggatccggtggtggtggatccgaggttcatctggtggagtctgggggagccttagtgaagcctggagggtccctgaaactctcctgtgcagcctctggattcagtttcagtaaatatggcatgtcttgggttcgccagactccagacaagaggctggagtgggtcgcaaccattagtagtagtgggagtcgcacctactatccagacagtgtgaagggccaattcaccatctccagagacaatgccaagaacaccctgtacctgcaaatgagcagtctgaagtctgaggacacagccatgtattactgttcaattagctgggacggtgctatggactactggggtcaagggacctcagtcaccgtctcctcatacccatacgatgttccagattacgcttagtgacctgaggatgatctttttccctctgccaaaaattatggggacatcatgaagccccttgagcatctgacttctggctaataaaggaaatttattttcattgcaatagtgtgttggaattttttgtgtctctcactcggcctaggtagataagtagcatggcgggttaatcattaactacaaggaacccctagtgatggagttggccactccctctctgcgcgctcgctcgctcactgaggccgggcgaccaaaggtcgcccgacgcccgggctttgcccgggcggcctcagtgagcgagcgagcgcgcag

SEQ ID NO: 2202 - DNA, 3084 bp, Artificial Sequence
  Description of Artificial Sequence: Synthetic polynucleotide
ctgcgcgctcgctcgctcactgaggccgcccgggcaaagcccgggcgtcgggcgacctttggtcgcccggcctcagtgagcgagcgagcgcgcagagagggagtggccaactccatcactaggggttccttgtagttaatgattaacccgccatgctacttatctaccagggtaatggggatcctctagaactatagctagtcgacataacgcgtctagttattaatagtaatcaattacggggtcattagttcatagcccatatatggagttccgcgttacataacttacggtaaatggcccgcctggctgaccgcccaacgacccccgcccattgacgtcaataatgacgtatgttcccatagtaacgccaatagggactttccattgacgtcaatgggtggagtatttacggtaaactgcccacttggcagtacatcaagtgtatcatatgccaagtacgccccctattgacgtcaatgacggtaaatggcccgcctggcattatgcccagtacatgaccttatgggactttcctacttggcagtacatctacgtattagtcatcgctattaccatggtcgaggtgagccccacgttctgcttcactctccccatctcccccccctccccacccccaattttgtatttatttattttttaattattttgtgcagcgatgggggcggggggggggggggggcgcgcgccaggcggggcggggcggggcgaggggcggggcggggcgaggcggagaggtgcggcggcagccaatcagagcggcgcgctccgaaagtttccttttatggcgaggcggcggcggcggcggccctataaaaagcgaagcgcgcggcgggcgggagtcgctgcgcgctgccttcgccccgtgccccgctccgccgccgcctcgcgccgcccgccccggctctgactgaccgcgttactcccacaggtgagcgggcgggacggcccttctcctccgggctgtaattagcgcttggtttaatgacggcttgtttcttttctgtggctgcgtgaaagccttgaggggctccgggagggccctttgtgcggggggagcggctcggggggtgcgtgcgtgtgtgtgtgcgtggggagcgccgcgtgcggctccgcgctgcccggcggctgtgagcgctgcgggcgcggcgcggggctttgtgcgctccgcagtgtgcgcgaggggagcgcggccgggggcggtgccccgcggtgcggggggggctgcgaggggaacaaaggctgcgtgcggggtgtgtgcgtgggggggtgagcagggggtgtgggcgcgtcggtcgggctgcaaccccccctgcacccccctccccgagttgctgagcacggcccggcttcgggtgcggggctccgtacggggcgtggcgcggggctcgccgtgccgggcggggggtggcggcaggtgggggtgccgggcggggcggggccgcctcgggccggggagggctcgggggaggggcgcggcggcccccggagcgccggcggctgtcgaggcgcggcgagccgcagccattgccttttatggtaatcgtgcgagagggcgcagggacttcctttgtcccaaatctgtgcggagccgaaatctgggaggcgccgccgcaccccctctagcgggcgcggggcgaagcggtgcggcgccggcaggaaggaaatgggcggggagggccttcgtgcgtcgccgcgccgccgtccccttctccctctccagcctcggggctgtccgcggggggacggctgccttcgggggggacggggcagggcggggttcggcttctggcgtgtgaccggcggctctagagcctctgctaaccatgttcatgccttcttctttttcctacagctcctgggcaacgtgctggttattgtgctgtctcatcattttggcaaagaattgggattcgaaccggtgccgccaccatgaagttgcctgttaggctgttggtgctgatgttctggattcctgcttccagcagtgatgttttgatgacccaaactccactctccctgcctgtcagtcttggagatcaagcctccatctcttgcaaatctagtcagagcattgtacatagtaatggaaacacctatttagaatggtacctgcagaaaccaggccagtctccaaagctcctggtctacaaagtttccaatcgattttctggggtcccagacaggttcagtggcagtggatcagggacagatttcacactcaagatcagcagagtggaggctgaggatctgggaacttattactgctttcaaggttcacttgttccttgggcgttcggtggaggcaccaagctggaaatcaaaggtggtggtggatccggtggtggtggatccggtggtggtggatccgaggttcatctggtggagtctgggggagccttagtgaagcctggagggtccctgaaactctcctgtgcagcctctggattcagtttcagtaaatatggcatgtcttgggttcgccagactccagacaagaggctggagtgggtcgcaaccattagtagtagtgggagtcgcacctactatccagacagtgtgaagggccaattcaccatctccagagacaatgccaagaacaccctgtacctgcaaatgagcagtctgaagtctgaggacacagccatgtattactgttcaattagctgggacggtgctatggactactggggtcaagggacctcagtcaccgtctcctcatacccatacgatgttccagattacgcttagtgacctgaggatgatctttttccctctgccaaaaattatggggacatcatgaagccccttgagcatctgacttctggctaataaaggaaatttattttcattgcaatagtgtgttggaattttttgtgtctctcactcggcctaggtagataagtagcatggcgggttaatcattaactacaaggaacccctagtgatggagttggccactccctctctgcgcgctcgctcgctcactgaggccgggcgaccaaaggtcgcccgacgcccgggctttgcccgggcggcctcagtgagcgagcgagcgcgcag

SEQ ID NO: 2203 - DNA, 3100 bp, Artificial Sequence
  Description of Artificial Sequence: Synthetic polynucleotide
ctgcgcgctcgctcgctcactgaggccgcccgggcaaagcccgggcgtcgggcgacctttggtcgcccggcctcagtgagcgagcgagcgcgcagagagggagtggccaactccatcactaggggttccttgtagttaatgattaacccgccatgctacttatctaccagggtaatggggatcctctagaactatagctagtcgacataacgcgtctagttattaatagtaatcaattacggggtcattagttcatagcccatatatggagttccgcgttacataacttacggtaaatggcccgcctggctgaccgcccaacgacccccgcccattgacgtcaataatgacgtatgttcccatagtaacgccaatagggactttccattgacgtcaatgggtggagtatttacggtaaactgcccacttggcagtacatcaagtgtatcatatgccaagtacgccccctattgacgtcaatgacggtaaatggcccgcctggcattatgcccagtacatgaccttatgggactttcctacttggcagtacatctacgtattagtcatcgctattaccatggtcgaggtgagccccacgttctgcttcactctccccatctcccccccctccccacccccaattttgtatttatttattttttaattattttgtgcagcgatgggggcggggggggggggggggcgcgcgccaggcggggcggggcggggcgaggggcggggcggggcgaggcggagaggtgcggcggcagccaatcagagcggcgcgctccgaaagtttccttttatggcgaggcggcggcggcggcggccctataaaaagcgaagcgcgcggcgggcgggagtcgctgcgcgctgccttcgccccgtgccccgctccgccgccgcctcgcgccgcccgccccggctctgactgaccgcgttactcccacaggtgagcgggcgggacggcccttctcctccgggctgtaattagcgcttggtttaatgacggcttgtttcttttctgtggctgcgtgaaagccttgaggggctccgggagggccctttgtgcggggggagcggctcggggggtgcgtgcgtgtgtgtgtgcgtggggagcgccgcgtgcggctccgcgctgcccggcggctgtgagcgctgcgggcgcggcgcggggctttgtgcgctccgcagtgtgcgcgaggggagcgcggccgggggcggtgccccgcggtgcggggggggctgcgaggggaacaaaggctgcgtgcggggtgtgtgcgtgggggggtgagcagggggtgtgggcgcgtcggtcgggctgcaaccccccctgcacccccctccccgagttgctgagcacggcccggcttcgggtgcggggctccgtacggggcgtggcgcggggctcgccgtgccgggcggggggtggcggcaggtgggggtgccgggcggggcggggccgcctcgggccggggagggctcgggggaggggcgcggcggcccccggagcgccggcggctgtcgaggcgcggcgagccgcagccattgccttttatggtaatcgtgcgagagggcgcagggacttcctttgtcccaaatctgtgcggagccgaaatctgggaggcgccgccgcaccccctctagcgggcgcggggcgaagcggtgcggcgccggcaggaaggaaatgggcggggagggccttcgtgcgtcgccgcgccgccgtccccttctccctctccagcctcggggctgtccgcggggggacggctgccttcgggggggacggggcagggcggggttcggcttctggcgtgtgaccggcggctctagagcctctgctaaccatgttcatgccttcttctttttcctacagctcctgggcaacgtgctggttattgtgctgtctcatcattttggcaaagaatttgggattcgaaccggtgccgccaccatgaagttgcctgttaggctgttggtgctgatgttctggattcctgcttccagcagtgatgttttgatgacccaaactccactctccctgcctgtcagtcttggagatcaagcctccatctcttgcaaatctagtcagagcattgtacatagtaatggaaacacctatttagaatggtacctgcagaaaccaggccagtctccaaagctcctggtctacaaagtttccaatcgattttctggggtcccagacaggttcagtggcagtggatcagggacagatttcacactcaagatcagcagagtggaggctgaggatctgggaacttattactgctttcaaggttcacttgttccttgggcgttcggtggaggcaccaagctggaaatcaaaggtggtggtggatccggtggtggtggatccggtggtggtggatccggtggtggtggatccgaggttcatctggtggagtctgggggagccttagtgaagcctggagggtccctgaaactctcctgtgcagcctctggattcagtttcagtaaatatggcatgtcttgggttcgccagactccagacaagaggctggagtgggtcgcaaccattagtagtagtgggagtcgcacctactatccagacagtgtgaagggccaattcaccatctccagagacaatgccaagaacaccctgtacctgcaaatgagcagtctgaagtctgaggacacagccatgtattactgttcaattagctgggacggtgctatggactactggggtcaagggacctcagtcaccgtctcctcatacccatacgatgttccagattacgcttagtgacctgaggatgatctttttccctctgccaaaaattatggggacatcatgaagccccttgagcatctgacttctggctaataaaggaaatttattttcattgcaatagtgtgttggaattttttgtgtctctcactcggcctaggtagataagtagcatggcgggttaatcattaactacaaggaacccctagtgatggagttggccactccctctctgcgcgctcgctcgctcactgaggccgggcgaccaaaggtcgcccgacgcccgggctttgcccgggcggcctcagtgagcgagcgagcgcgcag

SEQ ID NO: 2204 - DNA, 3115 bp, Artificial Sequence
  Description of Artificial Sequence: Synthetic polynucleotide
ctgcgcgctcgctcgctcactgaggccgcccgggcaaagcccgggcgtcgggcgacctttggtcgcccggcctcagtgagcgagcgagcgcgcagagagggagtggccaactccatcactaggggttccttgtagttaatgattaacccgccatgctacttatctaccagggtaatggggatcctctagaactatagctagtcgacataacgcgtctagttattaatagtaatcaattacggggtcattagttcatagcccatatatggagttccgcgttacataacttacggtaaatggcccgcctggctgaccgcccaacgacccccgcccattgacgtcaataatgacgtatgttcccatagtaacgccaatagggactttccattgacgtcaatgggtggagtatttacggtaaactgcccacttggcagtacatcaagtgtatcatatgccaagtacgccccctattgacgtcaatgacggtaaatggcccgcctggcattatgcccagtacatgaccttatgggactttcctacttggcagtacatctacgtattagtcatcgctattaccatggtcgaggtgagccccacgttctgcttcactctccccatctcccccccctccccacccccaattttgtatttatttattttttaattattttgtgcagcgatgggggcggggggggggggggggcgcgcgccaggcggggcggggcggggcgaggggcggggcggggcgaggcggagaggtgcggcggcagccaatcagagcggcgcgctccgaaagtttccttttatggcgaggcggcggcggcggcggccctataaaaagcgaagcgcgcggcgggcgggagtcgctgcgcgctgccttcgccccgtgccccgctccgccgccgcctcgcgccgcccgccccggctctgactgaccgcgttactcccacaggtgagcgggcgggacggcccttctcctccgggctgtaattagcgcttggtttaatgacggcttgtttcttttctgtggctgcgtgaaagccttgaggggctccgggagggccctttgtgcggggggagcggctcggggggtgcgtgcgtgtgtgtgtgcgtggggagcgccgcgtgcggctccgcgctgcccggcggctgtgagcgctgcgggcgcggcgcggggctttgtgcgctccgcagtgtgcgcgaggggagcgcggccgggggcggtgccccgcggtgcggggggggctgcgaggggaacaaaggctgcgtgcggggtgtgtgcgtgggggggtgagcagggggtgtgggcgcgtcggtcgggctgcaaccccccctgcacccccctccccgagttgctgagcacggcccggcttcgggtgcggggctccgtacggggcgtggcgcggggctcgccgtgccgggcggggggtggcggcaggtgggggtgccgggcggggcggggccgcctcgggccggggagggctcgggggaggggcgcggcggcccccggagcgccggcggctgtcgaggcgcggcgagccgcagccattgccttttatggtaatcgtgcgagagggcgcagggacttcctttgtcccaaatctgtgcggagccgaaatctgggaggcgccgccgcaccccctctagcgggcgcggggcgaagcggtgcggcgccggcaggaaggaaatgggcggggagggccttcgtgcgtcgccgcgccgccgtccccttctccctctccagcctcggggctgtccgcggggggacggctgccttcgggggggacggggcagggcggggttcggcttctggcgtgtgaccggcggctctagagcctctgctaaccatgttcatgccttcttctttttcctacagctcctgggcaacgtgctggttattgtgctgtctcatcattttggcaaagaatttgggattcgaaccggtgccgccaccatgaagttgcctgttaggctgttggtgctgatgttctggattcctgcttccagcagtgatgttttgatgacccaaactccactctccctgcctgtcagtcttggagatcaagcctccatctcttgcaaatctagtcagagcattgtacatagtaatggaaacacctatttagaatggtacctgcagaaaccaggccagtctccaaagctcctggtctacaaagtttccaatcgattttctggggtcccagacaggttcagtggcagtggatcagggacagatttcacactcaagatcagcagagtggaggctgaggatctgggaacttattactgctttcaaggttcacttgttccttgggcgttcggtggaggcaccaagctggaaatcaaaggtggtggtggatccggtggtggtggatccggtggtggtggatccggtggtggtggatccggtggtggtggatccgaggttcatctggtggagtctgggggagccttagtgaagcctggagggtccctgaaactctcctgtgcagcctctggattcagtttcagtaaatatggcatgtcttgggttcgccagactccagacaagaggctggagtgggtcgcaaccattagtagtagtgggagtcgcacctactatccagacagtgtgaagggccaattcaccatctccagagacaatgccaagaacaccctgtacctgcaaatgagcagtctgaagtctgaggacacagccatgtattactgttcaattagctgggacggtgctatggactactggggtcaagggacctcagtcaccgtctcctcatacccatacgatgttccagattacgcttagtgacctgaggatgatctttttccctctgccaaaaattatggggacatcatgaagccccttgagcatctgacttctggctaataaaggaaatttattttcattgcaatagtgtgttggaattttttgtgtctctcactcggcctaggtagataagtagcatggcgggttaatcattaactacaaggaacccctagtgatggagttggccactccctctctgcgcgctcgctcgctcactgaggccgggcgaccaaaggtcgcccgacgcccgggctttgcccgggcggcctcagtgagcgagcgagcgcgcag

SEQ ID NO: 2205 - DNA, 3130 bp, Artificial Sequence
  Description of Artificial Sequence: Synthetic polynucleotide
ctgcgcgctcgctcgctcactgaggccgcccgggcaaagcccgggcgtcgggcgacctttggtcgcccggcctcagtgagcgagcgagcgcgcagagagggagtggccaactccatcactaggggttccttgtagttaatgattaacccgccatgctacttatctaccagggtaatggggatcctctagaactatagctagtcgacataacgcgtctagttattaatagtaatcaattacggggtcattagttcatagcccatatatggagttccgcgttacataacttacggtaaatggcccgcctggctgaccgcccaacgacccccgcccattgacgtcaataatgacgtatgttcccatagtaacgccaatagggactttccattgacgtcaatgggtggagtatttacggtaaactgcccacttggcagtacatcaagtgtatcatatgccaagtacgccccctattgacgtcaatgacggtaaatggcccgcctggcattatgcccagtacatgaccttatgggactttcctacttggcagtacatctacgtattagtcatcgctattaccatggtcgaggtgagccccacgttctgcttcactctccccatctcccccccctccccacccccaattttgtatttatttattttttaattattttgtgcagcgatgggggcggggggggggggggggcgcgcgccaggcggggcggggcggggcgaggggcggggcggggcgaggcggagaggtgcggcggcagccaatcagagcggcgcgctccgaaagtttccttttatggcgaggcggcggcggcggcggccctataaaaagcgaagcgcgcggcgggcgggagtcgctgcgcgctgccttcgccccgtgccccgctccgccgccgcctcgcgccgcccgccccggctctgactgaccgcgttactcccacaggtgagcgggcgggacggcccttctcctccgggctgtaattagcgcttggtttaatgacggcttgtttcttttctgtggctgcgtgaaagccttgaggggctccgggagggccctttgtgcggggggagcggctcggggggtgcgtgcgtgtgtgtgtgcgtggggagcgccgcgtgcggctccgcgctgcccggcggctgtgagcgctgcgggcgcggcgcggggctttgtgcgctccgcagtgtgcgcgaggggagcgcggccgggggcggtgccccgcggtgcggggggggctgcgaggggaacaaaggctgcgtgcggggtgtgtgcgtgggggggtgagcagggggtgtgggcgcgtcggtcgggctgcaaccccccctgcacccccctccccgagttgctgagcacggcccggcttcgggtgcggggctccgtacggggcgtggcgcggggctcgccgtgccgggcggggggtggcggcaggtgggggtgccgggcggggcggggccgcctcgggccggggagggctcgggggaggggcgcggcggcccccggagcgccggcggctgtcgaggcgcggcgagccgcagccattgccttttatggtaatcgtgcgagagggcgcagggacttcctttgtcccaaatctgtgcggagccgaaatctgggaggcgccgccgcaccccctctagcgggcgcggggcgaagcggtgcggcgccggcaggaaggaaatgggcggggagggccttcgtgcgtcgccgcgccgccgtccccttctccctctccagcctcggggctgtccgcggggggacggctgccttcgggggggacggggcagggcggggttcggcttctggcgtgtgaccggcggctctagagcctctgctaaccatgttcatgccttcttctttttcctacagctcctgggcaacgtgctggttattgtgctgtctcatcattttggcaaagaatttgggattcgaaccggtgccgccaccatgaagttgcctgttaggctgttggtgctgatgttctggattcctgcttccagcagtgatgttttgatgacccaaactccactctccctgcctgtcagtcttggagatcaagcctccatctcttgcaaatctagtcagagcattgtacatagtaatggaaacacctatttagaatggtacctgcagaaaccaggccagtctccaaagctcctggtctacaaagtttccaatcgattttctggggtcccagacaggttcagtggcagtggatcagggacagatttcacactcaagatcagcagagtggaggctgaggatctgggaacttattactgctttcaaggttcacttgttccttgggcgttcggtggaggcaccaagctggaaatcaaaggtggtggtggatccggtggtggtggatccggtggtggtggatccggtggtggtggatccggtggtggtggatccggtggtggtggatccgaggttcatctggtggagtctgggggagccttagtgaagcctggagggtccctgaaactctcctgtgcagcctctggattcagtttcagtaaatatggcatgtcttgggttcgccagactccagacaagaggctggagtgggtcgcaaccattagtagtagtgggagtcgcacctactatccagacagtgtgaagggccaattcaccatctccagagacaatgccaagaacaccctgtacctgcaaatgagcagtctgaagtctgaggacacagccatgtattactgttcaattagctgggacggtgctatggactactggggtcaagggacctcagtcaccgtctcctcatacccatacgatgttccagattacgcttagtgacctgaggatgatctttttccctctgccaaaaattatggggacatcatgaagccccttgagcatctgacttctggctaataaaggaaatttattttcattgcaatagtgtgttggaattttttgtgtctctcactcggcctaggtagataagtagcatggcgggttaatcattaactacaaggaacccctagtgatggagttggccactccctctctgcgcgctcgctcgctcactgaggccgggcgaccaaaggtcgcccgacgcccgggctttgcccgggcggcctcagtgagcgagcgagcgcgcag

SEQ ID NO: 2206 - DNA, 3097 bp, Artificial Sequence
  Description of Artificial Sequence: Synthetic polynucleotide
ctgcgcgctcgctcgctcactgaggccgcccgggcaaagcccgggcgtcgggcgacctttggtcgcccggcctcagtgagcgagcgagcgcgcagagagggagtggccaactccatcactaggggttccttgtagttaatgattaacccgccatgctacttatctaccagggtaatggggatcctctagaactatagctagtcgacataacgcgtctagttattaatagtaatcaattacggggtcattagttcatagcccatatatggagttccgcgttacataacttacggtaaatggcccgcctggctgaccgcccaacgacccccgcccattgacgtcaataatgacgtatgttcccatagtaacgccaatagggactttccattgacgtcaatgggtggagtatttacggtaaactgcccacttggcagtacatcaagtgtatcatatgccaagtacgccccctattgacgtcaatgacggtaaatggcccgcctggcattatgcccagtacatgaccttatgggactttcctacttggcagtacatctacgtattagtcatcgctattaccatggtcgaggtgagccccacgttctgcttcactctccccatctcccccccctccccacccccaattttgtatttatttattttttaattattttgtgcagcgatgggggcggggggggggggggggcgcgcgccaggcggggcggggcggggcgaggggcggggcggggcgaggcggagaggtgcggcggcagccaatcagagcggcgcgctccgaaagtttccttttatggcgaggcggcggcggcggcggccctataaaaagcgaagcgcgcggcgggcgggagtcgctgcgcgctgccttcgccccgtgccccgctccgccgccgcctcgcgccgcccgccccggctctgactgaccgcgttactcccacaggtgagcgggcgggacggcccttctcctccgggctgtaattagcgcttggtttaatgacggcttgtttcttttctgtggctgcgtgaaagccttgaggggctccgggagggccctttgtgcggggggagcggctcggggggtgcgtgcgtgtgtgtgtgcgtggggagcgccgcgtgcggctccgcgctgcccggcggctgtgagcgctgcgggcgcggcgcggggctttgtgcgctccgcagtgtgcgcgaggggagcgcggccgggggcggtgccccgcggtgcggggggggctgcgaggggaacaaaggctgcgtgcggggtgtgtgcgtgggggggtgagcagggggtgtgggcgcgtcggtcgggctgcaaccccccctgcacccccctccccgagttgctgagcacggcccggcttcgggtgcggggctccgtacggggcgtggcgcggggctcgccgtgccgggcggggggtggcggcaggtgggggtgccgggcggggcggggccgcctcgggccggggagggctcgggggaggggcgcggcggcccccggagcgccggcggctgtcgaggcgcggcgagccgcagccattgccttttatggtaatcgtgcgagagggcgcagggacttcctttgtcccaaatctgtgcggagccgaaatctgggaggcgccgccgcaccccctctagcgggcgcggggcgaagcggtgcggcgccggcaggaaggaaatgggcggggagggccttcgtgcgtcgccgcgccgccgtccccttctccctctccagcctcggggctgtccgcggggggacggctgccttcgggggggacggggcagggcggggttcggcttctggcgtgtgaccggcggctctagagcctctgctaaccatgttcatgccttcttctttttcctacagctcctgggcaacgtgctggttattgtgctgtctcatcattttggcaaagaattcgggattcgaaccggtgccgccaccatgaagttgcctgttaggctgttggtgctgatgttctggattcctgcttccagcagtgaggtgaagctggtggagagcggcggcgacctggtgaagcctggcggcagcctgaagctgagctgcgccgccagcggcttcaccttcagcagctacgccatgagctgggtgagacagaaccctgagaagagactggagtgggtggccagcatcagcaagggcggcaacacctactaccctaacagcgtgaagggcagattcaccatcagcagagacaacgccagaaacatcctgtacctgcagatgagcagcctgagaagcgaggacaccgccctgtactactgcgccagaggctggggcgactacggctggttcgcctactggggccaggtgaccctggtgaccgtgagcgccggtggtggtggatccggtggtggtggatccggtggtggtggatccgacatcaagatgacccagagccctagcagcatgtacgccagcctgggcgagagagtgaccatcacctgcaaggccagccaggacatcaacagatacctgaactggttccagcagaagcctggcaagagccctaagaccctgatctacagagccaacagactgctggacggcgtgcctagcagattcagcggcagcggcagcggccaggactacagcctgaccatcagcagcctggactacgaggacatgggcatctactactgcctgcagtacgacgagttccctctgaccttcggcgacggcaccaagctggagctgaagtacccatacgatgttccagattacgcttagtaactcgaggacggggtgaactacgcctgaggatccgatctttttccctctgccaaaaattatggggacatcatgaagccccttgagcatctgacttctggctaataaaggaaatttattttcattgcaatagtgtgttggaattttttgtgtctctcactcggcctaggtagataagtagcatggcgggttaatcattaactacaaggaacccctagtgatggagttggccactccctctctgcgcgctcgctcgctcactgaggccgggcgaccaaaggtcgcccgacgcccgggctttgcccgggcggcctcagtgagcgagcgagcgcgcag

SEQ ID NO: 2207 - DNA, 3082 bp, Artificial Sequence
  Description of Artificial Sequence: Synthetic polynucleotide
ctgcgcgctcgctcgctcactgaggccgcccgggcaaagcccgggcgtcgggcgacctttggtcgcccggcctcagtgagcgagcgagcgcgcagagagggagtggccaactccatcactaggggttccttgtagttaatgattaacccgccatgctacttatctaccagggtaatggggatcctctagaactatagctagtcgacataacgcgtctagttattaatagtaatcaattacggggtcattagttcatagcccatatatggagttccgcgttacataacttacggtaaatggcccgcctggctgaccgcccaacgacccccgcccattgacgtcaataatgacgtatgttcccatagtaacgccaatagggactttccattgacgtcaatgggtggagtatttacggtaaactgcccacttggcagtacatcaagtgtatcatatgccaagtacgccccctattgacgtcaatgacggtaaatggcccgcctggcattatgcccagtacatgaccttatgggactttcctacttggcagtacatctacgtattagtcatcgctattaccatggtcgaggtgagccccacgttctgcttcactctccccatctcccccccctccccacccccaattttgtatttatttattttttaattattttgtgcagcgatgggggcggggggggggggggggcgcgcgccaggcggggcggggcggggcgaggggcggggcggggcgaggcggagaggtgcggcggcagccaatcagagcggcgcgctccgaaagtttccttttatggcgaggcggcggcggcggcggccctataaaaagcgaagcgcgcggcgggcgggagtcgctgcgcgctgccttcgccccgtgccccgctccgccgccgcctcgcgccgcccgccccggctctgactgaccgcgttactcccacaggtgagcgggcgggacggcccttctcctccgggctgtaattagcgcttggtttaatgacggcttgtttcttttctgtggctgcgtgaaagccttgaggggctccgggagggccctttgtgcggggggagcggctcggggggtgcgtgcgtgtgtgtgtgcgtggggagcgccgcgtgcggctccgcgctgcccggcggctgtgagcgctgcgggcgcggcgcggggctttgtgcgctccgcagtgtgcgcgaggggagcgcggccgggggcggtgccccgcggtgcggggggggctgcgaggggaacaaaggctgcgtgcggggtgtgtgcgtgggggggtgagcagggggtgtgggcgcgtcggtcgggctgcaaccccccctgcacccccctccccgagttgctgagcacggcccggcttcgggtgcggggctccgtacggggcgtggcgcggggctcgccgtgccgggcggggggtggcggcaggtgggggtgccgggcggggcggggccgcctcgggccggggagggctcgggggaggggcgcggcggcccccggagcgccggcggctgtcgaggcgcggcgagccgcagccattgccttttatggtaatcgtgcgagagggcgcagggacttcctttgtcccaaatctgtgcggagccgaaatctgggaggcgccgccgcaccccctctagcgggcgcggggcgaagcggtgcggcgccggcaggaaggaaatgggcggggagggccttcgtgcgtcgccgcgccgccgtccccttctccctctccagcctcggggctgtccgcggggggacggctgccttcgggggggacggggcagggcggggttcggcttctggcgtgtgaccggcggctctagagcctctgctaaccatgttcatgccttcttctttttcctacagctcctgggcaacgtgctggttattgtgctgtctcatcattttggcaaagaattcgggattcgaaccggtgccgccaccatgaacttcgggctcagcttgattttccttgtccttgttttaaaaggtgtccagtgtgaggtgaagctggtggagagcggcggcgacctggtgaagcctggcggcagcctgaagctgagctgcgccgccagcggcttcaccttcagcagctacgccatgagctgggtgagacagaaccctgagaagagactggagtgggtggccagcatcagcaagggcggcaacacctactaccctaacagcgtgaagggcagattcaccatcagcagagacaacgccagaaacatcctgtacctgcagatgagcagcctgagaagcgaggacaccgccctgtactactgcgccagaggctggggcgactacggctggttcgcctactggggccaggtgaccctggtgaccgtgagcgccggtggtggtggatccggtggtggtggatccgacatcaagatgacccagagccctagcagcatgtacgccagcctgggcgagagagtgaccatcacctgcaaggccagccaggacatcaacagatacctgaactggttccagcagaagcctggcaagagccctaagaccctgatctacagagccaacagactgctggacggcgtgcctagcagattcagcggcagcggcagcggccaggactacagcctgaccatcagcagcctggactacgaggacatgggcatctactactgcctgcagtacgacgagttccctctgaccttcggcgacggcaccaagctggagctgaagtacccatacgatgttccagattacgcttagtaactcgaggacggggtgaactacgcctgaggatccgatctttttccctctgccaaaaattatggggacatcatgaagccccttgagcatctgacttctggctaataaaggaaatttattttcattgcaatagtgtgttggaattttttgtgtctctcactcggcctaggtagataagtagcatggcgggttaatcattaactacaaggaacccctagtgatggagttggccactccctctctgcgcgctcgctcgctcactgaggccgggcgaccaaaggtcgcccgacgcccgggctttgcccgggcggcctcagtgagcgagcgagcgcgcag

SEQ ID NO: 2208 - DNA, 3097 bp, Artificial Sequence
  Description of Artificial Sequence: Synthetic polynucleotide
ctgcgcgctcgctcgctcactgaggccgcccgggcaaagcccgggcgtcgggcgacctttggtcgcccggcctcagtgagcgagcgagcgcgcagagagggagtggccaactccatcactaggggttccttgtagttaatgattaacccgccatgctacttatctaccagggtaatggggatcctctagaactatagctagtcgacataacgcgtctagttattaatagtaatcaattacggggtcattagttcatagcccatatatggagttccgcgttacataacttacggtaaatggcccgcctggctgaccgcccaacgacccccgcccattgacgtcaataatgacgtatgttcccatagtaacgccaatagggactttccattgacgtcaatgggtggagtatttacggtaaactgcccacttggcagtacatcaagtgtatcatatgccaagtacgccccctattgacgtcaatgacggtaaatggcccgcctggcattatgcccagtacatgaccttatgggactttcctacttggcagtacatctacgtattagtcatcgctattaccatggtcgaggtgagccccacgttctgcttcactctccccatctcccccccctccccacccccaattttgtatttatttattttttaattattttgtgcagcgatgggggcggggggggggggggggcgcgcgccaggcggggcggggcggggcgaggggcggggcggggcgaggcggagaggtgcggcggcagccaatcagagcggcgcgctccgaaagtttccttttatggcgaggcggcggcggcggcggccctataaaaagcgaagcgcgcggcgggcgggagtcgctgcgcgctgccttcgccccgtgccccgctccgccgccgcctcgcgccgcccgccccggctctgactgaccgcgttactcccacaggtgagcgggcgggacggcccttctcctccgggctgtaattagcgcttggtttaatgacggcttgtttcttttctgtggctgcgtgaaagccttgaggggctccgggagggccctttgtgcggggggagcggctcggggggtgcgtgcgtgtgtgtgtgcgtggggagcgccgcgtgcggctccgcgctgcccggcggctgtgagcgctgcgggcgcggcgcggggctttgtgcgctccgcagtgtgcgcgaggggagcgcggccgggggcggtgccccgcggtgcggggggggctgcgaggggaacaaaggctgcgtgcggggtgtgtgcgtgggggggtgagcagggggtgtgggcgcgtcggtcgggctgcaaccccccctgcacccccctccccgagttgctgagcacggcccggcttcgggtgcggggctccgtacggggcgtggcgcggggctcgccgtgccgggcggggggtggcggcaggtgggggtgccgggcggggcggggccgcctcgggccggggagggctcgggggaggggcgcggcggcccccggagcgccggcggctgtcgaggcgcggcgagccgcagccattgccttttatggtaatcgtgcgagagggcgcagggacttcctttgtcccaaatctgtgcggagccgaaatctgggaggcgccgccgcaccccctctagcgggcgcggggcgaagcggtgcggcgccggcaggaaggaaatgggcggggagggccttcgtgcgtcgccgcgccgccgtccccttctccctctccagcctcggggctgtccgcggggggacggctgccttcgggggggacggggcagggcggggttcggcttctggcgtgtgaccggcggctctagagcctctgctaaccatgttcatgccttcttctttttcctacagctcctgggcaacgtgctggttattgtgctgtctcatcattttggcaaagaattcgggattcgaaccggtgccgccaccatgaacttcgggctcagcttgattttccttgtccttgttttaaaaggtgtccagtgtgaggtgaagctggtggagagcggcggcgacctggtgaagcctggcggcagcctgaagctgagctgcgccgccagcggcttcaccttcagcagctacgccatgagctgggtgagacagaaccctgagaagagactggagtgggtggccagcatcagcaagggcggcaacacctactaccctaacagcgtgaagggcagattcaccatcagcagagacaacgccagaaacatcctgtacctgcagatgagcagcctgagaagcgaggacaccgccctgtactactgcgccagaggctggggcgactacggctggttcgcctactggggccaggtgaccctggtgaccgtgagcgccggtggtggtggatccggtggtggtggatccggtggtggtggatccgacatcaagatgacccagagccctagcagcatgtacgccagcctgggcgagagagtgaccatcacctgcaaggccagccaggacatcaacagatacctgaactggttccagcagaagcctggcaagagccctaagaccctgatctacagagccaacagactgctggacggcgtgcctagcagattcagcggcagcggcagcggccaggactacagcctgaccatcagcagcctggactacgaggacatgggcatctactactgcctgcagtacgacgagttccctctgaccttcggcgacggcaccaagctggagctgaagtacccatacgatgttccagattacgcttagtaactcgaggacggggtgaactacgcctgaggatccgatctttttccctctgccaaaaattatggggacatcatgaagccccttgagcatctgacttctggctaataaaggaaatttattttcattgcaatagtgtgttggaattttttgtgtctctcactcggcctaggtagataagtagcatggcgggttaatcattaactacaaggaacccctagtgatggagttggccactccctctctgcgcgctcgctcgctcactgaggccgggcgaccaaaggtcgcccgacgcccgggctttgcccgggcggcctcagtgagcgagcgagcgcgcag

SEQ ID NO: 2209 - DNA, 3112 bp, Artificial Sequence
  Description of Artificial Sequence: Synthetic polynucleotide
ctgcgcgctcgctcgctcactgaggccgcccgggcaaagcccgggcgtcgggcgacctttggtcgcccggcctcagtgagcgagcgagcgcgcagagagggagtggccaactccatcactaggggttccttgtagttaatgattaacccgccatgctacttatctaccagggtaatggggatcctctagaactatagctagtcgacataacgcgtctagttattaatagtaatcaattacggggtcattagttcatagcccatatatggagttccgcgttacataacttacggtaaatggcccgcctggctgaccgcccaacgacccccgcccattgacgtcaataatgacgtatgttcccatagtaacgccaatagggactttccattgacgtcaatgggtggagtatttacggtaaactgcccacttggcagtacatcaagtgtatcatatgccaagtacgccccctattgacgtcaatgacggtaaatggcccgcctggcattatgcccagtacatgaccttatgggactttcctacttggcagtacatctacgtattagtcatcgctattaccatggtcgaggtgagccccacgttctgcttcactctccccatctcccccccctccccacccccaattttgtatttatttattttttaattattttgtgcagcgatgggggcggggggggggggggggcgcgcgccaggcggggcggggcggggcgaggggcggggcggggcgaggcggagaggtgcggcggcagccaatcagagcggcgcgctccgaaagtttccttttatggcgaggcggcggcggcggcggccctataaaaagcgaagcgcgcggcgggcgggagtcgctgcgcgctgccttcgccccgtgccccgctccgccgccgcctcgcgccgcccgccccggctctgactgaccgcgttactcccacaggtgagcgggcgggacggcccttctcctccgggctgtaattagcgcttggtttaatgacggcttgtttcttttctgtggctgcgtgaaagccttgaggggctccgggagggccctttgtgcggggggagcggctcggggggtgcgtgcgtgtgtgtgtgcgtggggagcgccgcgtgcggctccgcgctgcccggcggctgtgagcgctgcgggcgcggcgcggggctttgtgcgctccgcagtgtgcgcgaggggagcgcggccgggggcggtgccccgcggtgcggggggggctgcgaggggaacaaaggctgcgtgcggggtgtgtgcgtgggggggtgagcagggggtgtgggcgcgtcggtcgggctgcaaccccccctgcacccccctccccgagttgctgagcacggcccggcttcgggtgcggggctccgtacggggcgtggcgcggggctcgccgtgccgggcggggggtggcggcaggtgggggtgccgggcggggcggggccgcctcgggccggggagggctcgggggaggggcgcggcggcccccggagcgccggcggctgtcgaggcgcggcgagccgcagccattgccttttatggtaatcgtgcgagagggcgcagggacttcctttgtcccaaatctgtgcggagccgaaatctgggaggcgccgccgcaccccctctagcgggcgcggggcgaagcggtgcggcgccggcaggaaggaaatgggcggggagggccttcgtgcgtcgccgcgccgccgtccccttctccctctccagcctcggggctgtccgcggggggacggctgccttcgggggggacggggcagggcggggttcggcttctggcgtgtgaccggcggctctagagcctctgctaaccatgttcatgccttcttctttttcctacagctcctgggcaacgtgctggttattgtgctgtctcatcattttggcaaagaattcgggattcgaaccggtgccgccaccatgaacttcgggctcagcttgattttccttgtccttgttttaaaaggtgtccagtgtgaggtgaagctggtggagagcggcggcgacctggtgaagcctggcggcagcctgaagctgagctgcgccgccagcggcttcaccttcagcagctacgccatgagctgggtgagacagaaccctgagaagagactggagtgggtggccagcatcagcaagggcggcaacacctactaccctaacagcgtgaagggcagattcaccatcagcagagacaacgccagaaacatcctgtacctgcagatgagcagcctgagaagcgaggacaccgccctgtactactgcgccagaggctggggcgactacggctggttcgcctactggggccaggtgaccctggtgaccgtgagcgccggtggtggtggatccggtggtggtggatccggtggtggtggatccggtggtggtggatccgacatcaagatgacccagagccctagcagcatgtacgccagcctgggcgagagagtgaccatcacctgcaaggccagccaggacatcaacagatacctgaactggttccagcagaagcctggcaagagccctaagaccctgatctacagagccaacagactgctggacggcgtgcctagcagattcagcggcagcggcagcggccaggactacagcctgaccatcagcagcctggactacgaggacatgggcatctactactgcctgcagtacgacgagttccctctgaccttcggcgacggcaccaagctggagctgaagtacccatacgatgttccagattacgcttagtaactcgaggacggggtgaactacgcctgaggatccgatctttttccctctgccaaaaattatggggacatcatgaagccccttgagcatctgacttctggctaataaaggaaatttattttcattgcaatagtgtgttggaattttttgtgtctctcactcggcctaggtagataagtagcatggcgggttaatcattaactacaaggaacccctagtgatggagttggccactccctctctgcgcgctcgctcgctcactgaggccgggcgaccaaaggtcgcccgacgcccgggctttgcccgggcggcctcagtgagcgagcgagcgcgcag

SEQ ID NO: 2210 - DNA, 3097 bp, Artificial Sequence
  Description of Artificial Sequence: Synthetic polynucleotide
ctgcgcgctcgctcgctcactgaggccgcccgggcaaagcccgggcgtcgggcgacctttggtcgcccggcctcagtgagcgagcgagcgcgcagagagggagtggccaactccatcactaggggttccttgtagttaatgattaacccgccatgctacttatctaccagggtaatggggatcctctagaactatagctagtcgacataacgcgtctagttattaatagtaatcaattacggggtcattagttcatagcccatatatggagttccgcgttacataacttacggtaaatggcccgcctggctgaccgcccaacgacccccgcccattgacgtcaataatgacgtatgttcccatagtaacgccaatagggactttccattgacgtcaatgggtggagtatttacggtaaactgcccacttggcagtacatcaagtgtatcatatgccaagtacgccccctattgacgtcaatgacggtaaatggcccgcctggcattatgcccagtacatgaccttatgggactttcctacttggcagtacatctacgtattagtcatcgctattaccatggtcgaggtgagccccacgttctgcttcactctccccatctcccccccctccccacccccaattttgtatttatttattttttaattattttgtgcagcgatgggggcggggggggggggggggcgcgcgccaggcggggcggggcggggcgaggggcggggcggggcgaggcggagaggtgcggcggcagccaatcagagcggcgcgctccgaaagtttccttttatggcgaggcggcggcggcggcggccctataaaaagcgaagcgcgcggcgggcgggagtcgctgcgcgctgccttcgccccgtgccccgctccgccgccgcctcgcgccgcccgccccggctctgactgaccgcgttactcccacaggtgagcgggcgggacggcccttctcctccgggctgtaattagcgcttggtttaatgacggcttgtttcttttctgtggctgcgtgaaagccttgaggggctccgggagggccctttgtgcggggggagcggctcggggggtgcgtgcgtgtgtgtgtgcgtggggagcgccgcgtgcggctccgcgctgcccggcggctgtgagcgctgcgggcgcggcgcggggctttgtgcgctccgcagtgtgcgcgaggggagcgcggccgggggcggtgccccgcggtgcggggggggctgcgaggggaacaaaggctgcgtgcggggtgtgtgcgtgggggggtgagcagggggtgtgggcgcgtcggtcgggctgcaaccccccctgcacccccctccccgagttgctgagcacggcccggcttcgggtgcggggctccgtacggggcgtggcgcggggctcgccgtgccgggcggggggtggcggcaggtgggggtgccgggcggggcggggccgcctcgggccggggagggctcgggggaggggcgcggcggcccccggagcgccggcggctgtcgaggcgcggcgagccgcagccattgccttttatggtaatcgtgcgagagggcgcagggacttcctttgtcccaaatctgtgcggagccgaaatctgggaggcgccgccgcaccccctctagcgggcgcggggcgaagcggtgcggcgccggcaggaaggaaatgggcggggagggccttcgtgcgtcgccgcgccgccgtccccttctccctctccagcctcggggctgtccgcggggggacggctgccttcgggggggacggggcagggcggggttcggcttctggcgtgtgaccggcggctctagagcctctgctaaccatgttcatgccttcttctttttcctacagctcctgggcaacgtgctggttattgtgctgtctcatcattttggcaaagaattcgggattcgaaccggtgccgccaccatgaacttcgggctcagcttgattttccttgtccttgttttaaaaggtgtccagtgtgacatcaagatgacccagagccctagcagcatgtacgccagcctgggcgagagagtgaccatcacctgcaaggccagccaggacatcaacagatacctgaactggttccagcagaagcctggcaagagccctaagaccctgatctacagagccaacagactgctggacggcgtgcctagcagattcagcggcagcggcagcggccaggactacagcctgaccatcagcagcctggactacgaggacatgggcatctactactgcctgcagtacgacgagttccctctgaccttcggcgacggcaccaagctggagctgaagggtggtggtggatccggtggtggtggatccggtggtggtggatccgaggtgaagctggtggagagcggcggcgacctggtgaagcctggcggcagcctgaagctgagctgcgccgccagcggcttcaccttcagcagctacgccatgagctgggtgagacagaaccctgagaagagactggagtgggtggccagcatcagcaagggcggcaacacctactaccctaacagcgtgaagggcagattcaccatcagcagagacaacgccagaaacatcctgtacctgcagatgagcagcctgagaagcgaggacaccgccctgtactactgcgccagaggctggggcgactacggctggttcgcctactggggccaggtgaccctggtgaccgtgagcgcctacccatacgatgttccagattacgcttagtaactcgaggacggggtgaactacgcctgaggatccgatctttttccctctgccaaaaattatggggacatcatgaagccccttgagcatctgacttctggctaataaaggaaatttattttcattgcaatagtgtgttggaattttttgtgtctctcactcggcctaggtagataagtagcatggcgggttaatcattaactacaaggaacccctagtgatggagttggccactccctctctgcgcgctcgctcgctcactgaggccgggcgaccaaaggtcgcccgacgcccgggctttgcccgggcggcctcagtgagcgagcgagcgcgcag

SEQ ID NO: 2211 - DNA, 3082 bp, Artificial Sequence
  Description of Artificial Sequence: Synthetic polynucleotide
ctgcgcgctcgctcgctcactgaggccgcccgggcaaagcccgggcgtcgggcgacctttggtcgcccggcctcagtgagcgagcgagcgcgcagagagggagtggccaactccatcactaggggttccttgtagttaatgattaacccgccatgctacttatctaccagggtaatggggatcctctagaactatagctagtcgacataacgcgtctagttattaatagtaatcaattacggggtcattagttcatagcccatatatggagttccgcgttacataacttacggtaaatggcccgcctggctgaccgcccaacgacccccgcccattgacgtcaataatgacgtatgttcccatagtaacgccaatagggactttccattgacgtcaatgggtggagtatttacggtaaactgcccacttggcagtacatcaagtgtatcatatgccaagtacgccccctattgacgtcaatgacggtaaatggcccgcctggcattatgcccagtacatgaccttatgggactttcctacttggcagtacatctacgtattagtcatcgctattaccatggtcgaggtgagccccacgttctgcttcactctccccatctcccccccctccccacccccaattttgtatttatttattttttaattattttgtgcagcgatgggggcggggggggggggggggcgcgcgccaggcggggcggggcggggcgaggggcggggcggggcgaggcggagaggtgcggcggcagccaatcagagcggcgcgctccgaaagtttccttttatggcgaggcggcggcggcggcggccctataaaaagcgaagcgcgcggcgggcgggagtcgctgcgcgctgccttcgccccgtgccccgctccgccgccgcctcgcgccgcccgccccggctctgactgaccgcgttactcccacaggtgagcgggcgggacggcccttctcctccgggctgtaattagcgcttggtttaatgacggcttgtttcttttctgtggctgcgtgaaagccttgaggggctccgggagggccctttgtgcggggggagcggctcggggggtgcgtgcgtgtgtgtgtgcgtggggagcgccgcgtgcggctccgcgctgcccggcggctgtgagcgctgcgggcgcggcgcggggctttgtgcgctccgcagtgtgcgcgaggggagcgcggccgggggcggtgccccgcggtgcggggggggctgcgaggggaacaaaggctgcgtgcggggtgtgtgcgtgggggggtgagcagggggtgtgggcgcgtcggtcgggctgcaaccccccctgcacccccctccccgagttgctgagcacggcccggcttcgggtgcggggctccgtacggggcgtggcgcggggctcgccgtgccgggcggggggtggcggcaggtgggggtgccgggcggggcggggccgcctcgggccggggagggctcgggggaggggcgcggcggcccccggagcgccggcggctgtcgaggcgcggcgagccgcagccattgccttttatggtaatcgtgcgagagggcgcagggacttcctttgtcccaaatctgtgcggagccgaaatctgggaggcgccgccgcaccccctctagcgggcgcggggcgaagcggtgcggcgccggcaggaaggaaatgggcggggagggccttcgtgcgtcgccgcgccgccgtccccttctccctctccagcctcggggctgtccgcggggggacggctgccttcgggggggacggggcagggcggggttcggcttctggcgtgtgaccggcggctctagagcctctgctaaccatgttcatgccttcttctttttcctacagctcctgggcaacgtgctggttattgtgctgtctcatcattttggcaaagaattcgggattcgaaccggtgccgccaccatgaagttgcctgttaggctgttggtgctgatgttctggattcctgcttccagcagtgacatcaagatgacccagagccctagcagcatgtacgccagcctgggcgagagagtgaccatcacctgcaaggccagccaggacatcaacagatacctgaactggttccagcagaagcctggcaagagccctaagaccctgatctacagagccaacagactgctggacggcgtgcctagcagattcagcggcagcggcagcggccaggactacagcctgaccatcagcagcctggactacgaggacatgggcatctactactgcctgcagtacgacgagttccctctgaccttcggcgacggcaccaagctggagctgaagggtggtggtggatccggtggtggtggatccgaggtgaagctggtggagagcggcggcgacctggtgaagcctggcggcagcctgaagctgagctgcgccgccagcggcttcaccttcagcagctacgccatgagctgggtgagacagaaccctgagaagagactggagtgggtggccagcatcagcaagggcggcaacacctactaccctaacagcgtgaagggcagattcaccatcagcagagacaacgccagaaacatcctgtacctgcagatgagcagcctgagaagcgaggacaccgccctgtactactgcgccagaggctggggcgactacggctggttcgcctactggggccaggtgaccctggtgaccgtgagcgcctacccatacgatgttccagattacgcttagtaactcgaggacggggtgaactacgcctgaggatccgatctttttccctctgccaaaaattatggggacatcatgaagccccttgagcatctgacttctggctaataaaggaaatttattttcattgcaatagtgtgttggaattttttgtgtctctcactcggcctaggtagataagtagcatggcgggttaatcattaactacaaggaacccctagtgatggagttggccactccctctctgcgcgctcgctcgctcactgaggccgggcgaccaaaggtcgcccgacgcccgggctttgcccgggcggcctcagtgagcgagcgagcgcgcag

SEQ ID NO: 2212 - DNA, 3097 bp, Artificial Sequence
  Description of Artificial Sequence: Synthetic polynucleotide
ctgcgcgctcgctcgctcactgaggccgcccgggcaaagcccgggcgtcgggcgacctttggtcgcccggcctcagtgagcgagcgagcgcgcagagagggagtggccaactccatcactaggggttccttgtagttaatgattaacccgccatgctacttatctaccagggtaatggggatcctctagaactatagctagtcgacataacgcgtctagttattaatagtaatcaattacggggtcattagttcatagcccatatatggagttccgcgttacataacttacggtaaatggcccgcctggctgaccgcccaacgacccccgcccattgacgtcaataatgacgtatgttcccatagtaacgccaatagggactttccattgacgtcaatgggtggagtatttacggtaaactgcccacttggcagtacatcaagtgtatcatatgccaagtacgccccctattgacgtcaatgacggtaaatggcccgcctggcattatgcccagtacatgaccttatgggactttcctacttggcagtacatctacgtattagtcatcgctattaccatggtcgaggtgagccccacgttctgcttcactctccccatctcccccccctccccacccccaattttgtatttatttattttttaattattttgtgcagcgatgggggcggggggggggggggggcgcgcgccaggcggggcggggcggggcgaggggcggggcggggcgaggcggagaggtgcggcggcagccaatcagagcggcgcgctccgaaagtttccttttatggcgaggcggcggcggcggcggccctataaaaagcgaagcgcgcggcgggcgggagtcgctgcgcgctgccttcgccccgtgccccgctccgccgccgcctcgcgccgcccgccccggctctgactgaccgcgttactcccacaggtgagcgggcgggacggcccttctcctccgggctgtaattagcgcttggtttaatgacggcttgtttcttttctgtggctgcgtgaaagccttgaggggctccgggagggccctttgtgcggggggagcggctcggggggtgcgtgcgtgtgtgtgtgcgtggggagcgccgcgtgcggctccgcgctgcccggcggctgtgagcgctgcgggcgcggcgcggggctttgtgcgctccgcagtgtgcgcgaggggagcgcggccgggggcggtgccccgcggtgcggggggggctgcgaggggaacaaaggctgcgtgcggggtgtgtgcgtgggggggtgagcagggggtgtgggcgcgtcggtcgggctgcaaccccccctgcacccccctccccgagttgctgagcacggcccggcttcgggtgcggggctccgtacggggcgtggcgcggggctcgccgtgccgggcggggggtggcggcaggtgggggtgccgggcggggcggggccgcctcgggccggggagggctcgggggaggggcgcggcggcccccggagcgccggcggctgtcgaggcgcggcgagccgcagccattgccttttatggtaatcgtgcgagagggcgcagggacttcctttgtcccaaatctgtgcggagccgaaatctgggaggcgccgccgcaccccctctagcgggcgcggggcgaagcggtgcggcgccggcaggaaggaaatgggcggggagggccttcgtgcgtcgccgcgccgccgtccccttctccctctccagcctcggggctgtccgcggggggacggctgccttcgggggggacggggcagggcggggttcggcttctggcgtgtgaccggcggctctagagcctctgctaaccatgttcatgccttcttctttttcctacagctcctgggcaacgtgctggttattgtgctgtctcatcattttggcaaagaattcgggattcgaaccggtgccgccaccatgaagttgcctgttaggctgttggtgctgatgttctggattcctgcttccagcagtgacatcaagatgacccagagccctagcagcatgtacgccagcctgggcgagagagtgaccatcacctgcaaggccagccaggacatcaacagatacctgaactggttccagcagaagcctggcaagagccctaagaccctgatctacagagccaacagactgctggacggcgtgcctagcagattcagcggcagcggcagcggccaggactacagcctgaccatcagcagcctggactacgaggacatgggcatctactactgcctgcagtacgacgagttccctctgaccttcggcgacggcaccaagctggagctgaagggtggtggtggatccggtggtggtggatccggtggtggtggatccgaggtgaagctggtggagagcggcggcgacctggtgaagcctggcggcagcctgaagctgagctgcgccgccagcggcttcaccttcagcagctacgccatgagctgggtgagacagaaccctgagaagagactggagtgggtggccagcatcagcaagggcggcaacacctactaccctaacagcgtgaagggcagattcaccatcagcagagacaacgccagaaacatcctgtacctgcagatgagcagcctgagaagcgaggacaccgccctgtactactgcgccagaggctggggcgactacggctggttcgcctactggggccaggtgaccctggtgaccgtgagcgcctacccatacgatgttccagattacgcttagtaactcgaggacggggtgaactacgcctgaggatccgatctttttccctctgccaaaaattatggggacatcatgaagccccttgagcatctgacttctggctaataaaggaaatttattttcattgcaatagtgtgttggaattttttgtgtctctcactcggcctaggtagataagtagcatggcgggttaatcattaactacaaggaacccctagtgatggagttggccactccctctctgcgcgctcgctcgctcactgaggccgggcgaccaaaggtcgcccgacgcccgggctttgcccgggcggcctcagtgagcgagcgagcgcgcag

SEQ ID NO: 2213 - DNA, 3112 bp, Artificial Sequence
  Description of Artificial Sequence: Synthetic polynucleotide
ctgcgcgctcgctcgctcactgaggccgcccgggcaaagcccgggcgtcgggcgacctttggtcgcccggcctcagtgagcgagcgagcgcgcagagagggagtggccaactccatcactaggggttccttgtagttaatgattaacccgccatgctacttatctaccagggtaatggggatcctctagaactatagctagtcgacataacgcgtctagttattaatagtaatcaattacggggtcattagttcatagcccatatatggagttccgcgttacataacttacggtaaatggcccgcctggctgaccgcccaacgacccccgcccattgacgtcaataatgacgtatgttcccatagtaacgccaatagggactttccattgacgtcaatgggtggagtatttacggtaaactgcccacttggcagtacatcaagtgtatcatatgccaagtacgccccctattgacgtcaatgacggtaaatggcccgcctggcattatgcccagtacatgaccttatgggactttcctacttggcagtacatctacgtattagtcatcgctattaccatggtcgaggtgagccccacgttctgcttcactctccccatctcccccccctccccacccccaattttgtatttatttattttttaattattttgtgcagcgatgggggcggggggggggggggggcgcgcgccaggcggggcggggcggggcgaggggcggggcggggcgaggcggagaggtgcggcggcagccaatcagagcggcgcgctccgaaagtttccttttatggcgaggcggcggcggcggcggccctataaaaagcgaagcgcgcggcgggcgggagtcgctgcgcgctgccttcgccccgtgccccgctccgccgccgcctcgcgccgcccgccccggctctgactgaccgcgttactcccacaggtgagcgggcgggacggcccttctcctccgggctgtaattagcgcttggtttaatgacggcttgtttcttttctgtggctgcgtgaaagccttgaggggctccgggagggccctttgtgcggggggagcggctcggggggtgcgtgcgtgtgtgtgtgcgtggggagcgccgcgtgcggctccgcgctgcccggcggctgtgagcgctgcgggcgcggcgcggggctttgtgcgctccgcagtgtgcgcgaggggagcgcggccgggggcggtgccccgcggtgcggggggggctgcgaggggaacaaaggctgcgtgcggggtgtgtgcgtgggggggtgagcagggggtgtgggcgcgtcggtcgggctgcaaccccccctgcacccccctccccgagttgctgagcacggcccggcttcgggtgcggggctccgtacggggcgtggcgcggggctcgccgtgccgggcggggggtggcggcaggtgggggtgccgggcggggcggggccgcctcgggccggggagggctcgggggaggggcgcggcggcccccggagcgccggcggctgtcgaggcgcggcgagccgcagccattgccttttatggtaatcgtgcgagagggcgcagggacttcctttgtcccaaatctgtgcggagccgaaatctgggaggcgccgccgcaccccctctagcgggcgcggggcgaagcggtgcggcgccggcaggaaggaaatgggcggggagggccttcgtgcgtcgccgcgccgccgtccccttctccctctccagcctcggggctgtccgcggggggacggctgccttcgggggggacggggcagggcggggttcggcttctggcgtgtgaccggcggctctagagcctctgctaaccatgttcatgccttcttctttttcctacagctcctgggcaacgtgctggttattgtgctgtctcatcattttggcaaagaattcgggattcgaaccggtgccgccaccatgaagttgcctgttaggctgttggtgctgatgttctggattcctgcttccagcagtgacatcaagatgacccagagccctagcagcatgtacgccagcctgggcgagagagtgaccatcacctgcaaggccagccaggacatcaacagatacctgaactggttccagcagaagcctggcaagagccctaagaccctgatctacagagccaacagactgctggacggcgtgcctagcagattcagcggcagcggcagcggccaggactacagcctgaccatcagcagcctggactacgaggacatgggcatctactactgcctgcagtacgacgagttccctctgaccttcggcgacggcaccaagctggagctgaagggtggtggtggatccggtggtggtggatccggtggtggtggatccggtggtggtggatccgaggtgaagctggtggagagcggcggcgacctggtgaagcctggcggcagcctgaagctgagctgcgccgccagcggcttcaccttcagcagctacgccatgagctgggtgagacagaaccctgagaagagactggagtgggtggccagcatcagcaagggcggcaacacctactaccctaacagcgtgaagggcagattcaccatcagcagagacaacgccagaaacatcctgtacctgcagatgagcagcctgagaagcgaggacaccgccctgtactactgcgccagaggctggggcgactacggctggttcgcctactggggccaggtgaccctggtgaccgtgagcgcctacccatacgatgttccagattacgcttagtaactcgaggacggggtgaactacgcctgaggatccgatctttttccctctgccaaaaattatggggacatcatgaagccccttgagcatctgacttctggctaataaaggaaatttattttcattgcaatagtgtgttggaattttttgtgtctctcactcggcctaggtagataagtagcatggcgggttaatcattaactacaaggaacccctagtgatggagttggccactccctctctgcgcgctcgctcgctcactgaggccgggcgaccaaaggtcgcccgacgcccgggctttgcccgggcggcctcagtgagcgagcgagcgcgcag

SEQ ID NO: 2214 - DNA, 2652 bp, Artificial Sequence
  Description of Artificial Sequence: Synthetic polynucleotide
ctgcgcgctcgctcgctcactgaggccgcccgggcaaagcccgggcgtcgggcgacctttggtcgcccggcctcagtgagcgagcgagcgcgcagagagggagtggccaactccatcactaggggttccttgtagttaatgattaacccgccatgctacttatctaccagggtaatggggatcctctagaactatagctagtcgacataacgcgtgatctaacatatcctggtgtggagtagcggacgctgctatgacagaggctcgggggcctgagctggctctgtgagctggggaggaggcagacagccaggccttgtctgcaagcagacctggcagcattgggctggccgccccccagggcctcctcttcatgcccagtgaatgactcaccttggcacagacacaatgttcggggtgggcacagtgcctgcttcccgccgcaccccagcccccctcaaatgccttccgagaagcccattgagcagggggcttgcattgcaccccagcctgacagcctggcatcttgggataaaagcagcacagccccctaggggctgcccttgctgtgtggcgccaccggcggtggagaacaaggctctattcagcctgtgcccaggaaaggggatcaggggatgcccaggcatggacagtgggtggcagggggggagaggagggctgtctgcttcccagaagtccaaggacacaaatgggtgaggggagagctctccccatagctgggctgcggcccaaccccaccccctcaggctatgccagggggtgttgccaggggcacccgggcatcgccagtctagcccactccttcataaagccctcgcatcccaggagcgagcagagccagagcaggttggagaggagacgcatcacctccgctgctcgcggggatcctctagaagcttcgtttagtgaaccgtcagatcgcctggagacgccatccacgctgttttgacctccatagaagacaccgggaccgatccagcctccgcggattcgaatcccggccgggaacggtgcattggaacgcggattccccgtgccaagagtgacgtaagtaccgcctatagagtctataggcccacaaaaaatgctttcttcttttaatatacttttttgtttatcttatttctaatactttccctaatctctttctttcagggcaataatgatacaatgtatcatgcctctttgcaccattctaaagaataacagtgataatttctgggttaaggcaatagcaatatttctgcatataaatatttctgcatataaattgtaactgatgtaagaggtttcatattgctaatagcagctacaatccagctaccattctgcttttattttatggttgggataaggctggattattctgagtccaagctaggcccttttgctaatcatgttcatacctcttatcttcctcccacagctcctgggcaacgtgctggtctgtgtgctggcccatcactttggcaaagaattgggattcgaaccggtgccgccaccatgaagttgcctgttaggctgttggtgctgatgttctggattcctgcttccagcagtgacatcaagatgacccagagccctagcagcatgtacgccagcctgggcgagagagtgaccatcacctgcaaggccagccaggacatcaacagatacctgaactggttccagcagaagcctggcaagagccctaagaccctgatctacagagccaacagactgctggacggcgtgcctagcagattcagcggcagcggcagcggccaggactacagcctgaccatcagcagcctggactacgaggacatgggcatctactactgcctgcagtacgacgagttccctctgaccttcggcgacggcaccaagctggagctgaagggtggtggtggatccggtggtggtggatccgaggtgaagctggtggagagcggcggcgacctggtgaagcctggcggcagcctgaagctgagctgcgccgccagcggcttcaccttcagcagctacgccatgagctgggtgagacagaaccctgagaagagactggagtgggtggccagcatcagcaagggcggcaacacctactaccctaacagcgtgaagggcagattcaccatcagcagagacaacgccagaaacatcctgtacctgcagatgagcagcctgagaagcgaggacaccgccctgtactactgcgccagaggctggggcgactacggctggttcgcctactggggccaggtgaccctggtgaccgtgagcgcctacccatacgatgttccagattacgcttagtaactcgaggacggggtgaactacgcctgaggatccgatctttttccctctgccaaaaattatggggacatcatgaagccccttgagcatctgacttctggctaataaaggaaatttattttcattgcaatagtgtgttggaattttttgtgtctctcactcggcctaggtagataagtagcatggcgggttaatcattaactacaaggaacccctagtgatggagttggccactccctctctgcgcgctcgctcgctcactgaggccgggcgaccaaaggtcgcccgacgcccgggctttgcccgggcggcctcagtgagcgagcgagcgcgcag

SEQ ID NO: 2215 - DNA, 2667 bp, Artificial Sequence
  Description of Artificial Sequence: Synthetic polynucleotide
ctgcgcgctcgctcgctcactgaggccgcccgggcaaagcccgggcgtcgggcgacctttggtcgcccggcctcagtgagcgagcgagcgcgcagagagggagtggccaactccatcactaggggttccttgtagttaatgattaacccgccatgctacttatctaccagggtaatggggatcctctagaactatagctagtcgacataacgcgtgatctaacatatcctggtgtggagtagcggacgctgctatgacagaggctcgggggcctgagctggctctgtgagctggggaggaggcagacagccaggccttgtctgcaagcagacctggcagcattgggctggccgccccccagggcctcctcttcatgcccagtgaatgactcaccttggcacagacacaatgttcggggtgggcacagtgcctgcttcccgccgcaccccagcccccctcaaatgccttccgagaagcccattgagcagggggcttgcattgcaccccagcctgacagcctggcatcttgggataaaagcagcacagccccctaggggctgcccttgctgtgtggcgccaccggcggtggagaacaaggctctattcagcctgtgcccaggaaaggggatcaggggatgcccaggcatggacagtgggtggcagggggggagaggagggctgtctgcttcccagaagtccaaggacacaaatgggtgaggggagagctctccccatagctgggctgcggcccaaccccaccccctcaggctatgccagggggtgttgccaggggcacccgggcatcgccagtctagcccactccttcataaagccctcgcatcccaggagcgagcagagccagagcaggttggagaggagacgcatcacctccgctgctcgcggggatcctctagaagcttcgtttagtgaaccgtcagatcgcctggagacgccatccacgctgttttgacctccatagaagacaccgggaccgatccagcctccgcggattcgaatcccggccgggaacggtgcattggaacgcggattccccgtgccaagagtgacgtaagtaccgcctatagagtctataggcccacaaaaaatgctttcttcttttaatatacttttttgtttatcttatttctaatactttccctaatctctttctttcagggcaataatgatacaatgtatcatgcctctttgcaccattctaaagaataacagtgataatttctgggttaaggcaatagcaatatttctgcatataaatatttctgcatataaattgtaactgatgtaagaggtttcatattgctaatagcagctacaatccagctaccattctgcttttattttatggttgggataaggctggattattctgagtccaagctaggcccttttgctaatcatgttcatacctcttatcttcctcccacagctcctgggcaacgtgctggtctgtgtgctggcccatcactttggcaaagaattgggattcgaaccggtgccgccaccatgaagttgcctgttaggctgttggtgctgatgttctggattcctgcttccagcagtgacatcaagatgacccagagccctagcagcatgtacgccagcctgggcgagagagtgaccatcacctgcaaggccagccaggacatcaacagatacctgaactggttccagcagaagcctggcaagagccctaagaccctgatctacagagccaacagactgctggacggcgtgcctagcagattcagcggcagcggcagcggccaggactacagcctgaccatcagcagcctggactacgaggacatgggcatctactactgcctgcagtacgacgagttccctctgaccttcggcgacggcaccaagctggagctgaagggtggtggtggatccggtggtggtggatccggtggtggtggatccgaggtgaagctggtggagagcggcggcgacctggtgaagcctggcggcagcctgaagctgagctgcgccgccagcggcttcaccttcagcagctacgccatgagctgggtgagacagaaccctgagaagagactggagtgggtggccagcatcagcaagggcggcaacacctactaccctaacagcgtgaagggcagattcaccatcagcagagacaacgccagaaacatcctgtacctgcagatgagcagcctgagaagcgaggacaccgccctgtactactgcgccagaggctggggcgactacggctggttcgcctactggggccaggtgaccctggtgaccgtgagcgcctacccatacgatgttccagattacgcttagtaactcgaggacggggtgaactacgcctgaggatccgatctttttccctctgccaaaaattatggggacatcatgaagccccttgagcatctgacttctggctaataaaggaaatttattttcattgcaatagtgtgttggaattttttgtgtctctcactcggcctaggtagataagtagcatggcgggttaatcattaactacaaggaacccctagtgatggagttggccactccctctctgcgcgctcgctcgctcactgaggccgggcgaccaaaggtcgcccgacgcccgggctttgcccgggcggcctcagtgagcgagcgagcgcgcag

SEQ ID NO: 2216 - DNA, 2682 bp, Artificial Sequence
  Description of Artificial Sequence: Synthetic polynucleotide
ctgcgcgctcgctcgctcactgaggccgcccgggcaaagcccgggcgtcgggcgacctttggtcgcccggcctcagtgagcgagcgagcgcgcagagagggagtggccaactccatcactaggggttccttgtagttaatgattaacccgccatgctacttatctaccagggtaatggggatcctctagaactatagctagtcgacataacgcgtgatctaacatatcctggtgtggagtagcggacgctgctatgacagaggctcgggggcctgagctggctctgtgagctggggaggaggcagacagccaggccttgtctgcaagcagacctggcagcattgggctggccgccccccagggcctcctcttcatgcccagtgaatgactcaccttggcacagacacaatgttcggggtgggcacagtgcctgcttcccgccgcaccccagcccccctcaaatgccttccgagaagcccattgagcagggggcttgcattgcaccccagcctgacagcctggcatcttgggataaaagcagcacagccccctaggggctgcccttgctgtgtggcgccaccggcggtggagaacaaggctctattcagcctgtgcccaggaaaggggatcaggggatgcccaggcatggacagtgggtggcagggggggagaggagggctgtctgcttcccagaagtccaaggacacaaatgggtgaggggagagctctccccatagctgggctgcggcccaaccccaccccctcaggctatgccagggggtgttgccaggggcacccgggcatcgccagtctagcccactccttcataaagccctcgcatcccaggagcgagcagagccagagcaggttggagaggagacgcatcacctccgctgctcgcggggatcctctagaagcttcgtttagtgaaccgtcagatcgcctggagacgccatccacgctgttttgacctccatagaagacaccgggaccgatccagcctccgcggattcgaatcccggccgggaacggtgcattggaacgcggattccccgtgccaagagtgacgtaagtaccgcctatagagtctataggcccacaaaaaatgctttcttcttttaatatacttttttgtttatcttatttctaatactttccctaatctctttctttcagggcaataatgatacaatgtatcatgcctctttgcaccattctaaagaataacagtgataatttctgggttaaggcaatagcaatatttctgcatataaatatttctgcatataaattgtaactgatgtaagaggtttcatattgctaatagcagctacaatccagctaccattctgcttttattttatggttgggataaggctggattattctgagtccaagctaggcccttttgctaatcatgttcatacctcttatcttcctcccacagctcctgggcaacgtgctggtctgtgtgctggcccatcactttggcaaagaattgggattcgaaccggtgccgccaccatgaagttgcctgttaggctgttggtgctgatgttctggattcctgcttccagcagtgacatcaagatgacccagagccctagcagcatgtacgccagcctgggcgagagagtgaccatcacctgcaaggccagccaggacatcaacagatacctgaactggttccagcagaagcctggcaagagccctaagaccctgatctacagagccaacagactgctggacggcgtgcctagcagattcagcggcagcggcagcggccaggactacagcctgaccatcagcagcctggactacgaggacatgggcatctactactgcctgcagtacgacgagttccctctgaccttcggcgacggcaccaagctggagctgaagggtggtggtggatccggtggtggtggatccggtggtggtggatccggtggtggtggatccgaggtgaagctggtggagagcggcggcgacctggtgaagcctggcggcagcctgaagctgagctgcgccgccagcggcttcaccttcagcagctacgccatgagctgggtgagacagaaccctgagaagagactggagtgggtggccagcatcagcaagggcggcaacacctactaccctaacagcgtgaagggcagattcaccatcagcagagacaacgccagaaacatcctgtacctgcagatgagcagcctgagaagcgaggacaccgccctgtactactgcgccagaggctggggcgactacggctggttcgcctactggggccaggtgaccctggtgaccgtgagcgcctacccatacgatgttccagattacgcttagtaactcgaggacggggtgaactacgcctgaggatccgatctttttccctctgccaaaaattatggggacatcatgaagccccttgagcatctgacttctggctaataaaggaaatttattttcattgcaatagtgtgttggaattttttgtgtctctcactcggcctaggtagataagtagcatggcgggttaatcattaactacaaggaacccctagtgatggagttggccactccctctctgcgcgctcgctcgctcactgaggccgggcgaccaaaggtcgcccgacgcccgggctttgcccgggcggcctcagtgagcgagcgagcgcgcag

SEQ ID NO: 2217 - DNA, 2510 bp, Artificial Sequence
  Description of Artificial Sequence: Synthetic polynucleotide
ctgcgcgctcgctcgctcactgaggccgcccgggcaaagcccgggcgtcgggcgacctttggtcgcccggcctcagtgagcgagcgagcgcgcagagagggagtggccaactccatcactaggggttccttgtagttaatgattaacccgccatgctacttatctaccagggtaatggggatcctctagaactatagctagtcgacataacgcgttagtatctgcagagggccctgcgtatgagtgcaagtgggttttaggaccaggatgaggcggggtgggggtgcctacctgacgaccgaccccgacccactggacaagcacccaacccccattccccaaattgcgcatcccctatcagagagggggaggggaaacaggatgcggcgaggcgcgtgcgcactgccagcttcagcaccgcggacagtgccttcgcccccgcctggcggcgcgcgccaccgccgcctcagcactgaaggcgcgctgacgtcactcgccggtcccccgcaaactccccttcccggccaccttggtcgcgtccgcgccgccgccggcccagccggaccgcaccacgcgaggcgcgagataggggggcacgggcgcgaccatctgcgctgcggcgccggcgactcagcgctgcctcagtctgcggtgggcagcggaggagtcgtgtcgtgcctgagagcgcagctgtgctcctgggcaccgcgcagtccgcccccgcggctcctggccagaccacccctaggaccccctgccccaagtcgcagccaagcttcgtttagtgaaccgtcagatcgcctggagacgccatccacgctgttttgacctccatagaagacaccgggaccgatccagcctccgcggattcgaatcccggccgggaacggtgcattggaacgcggattccccgtgccaagagtgacgtaagtaccgcctatagagtctataggcccacaaaaaatgctttcttcttttaatatacttttttgtttatcttatttctaatactttccctaatctctttctttcagggcaataatgatacaatgtatcatgcctctttgcaccattctaaagaataacagtgataatttctgggttaaggcaatagcaatatttctgcatataaatatttctgcatataaattgtaactgatgtaagaggtttcatattgctaatagcagctacaatccagctaccattctgcttttattttatggttgggataaggctggattattctgagtccaagctaggcccttttgctaatcatgttcatacctcttatcttcctcccacagctcctgggcaacgtgctggtctgtgtgctggcccatcactttggcaaagaattgggattcgaaccggtgccgccaccatgaagttgcctgttaggctgttggtgctgatgttctggattcctgcttccagcagtgacatcaagatgacccagagccctagcagcatgtacgccagcctgggcgagagagtgaccatcacctgcaaggccagccaggacatcaacagatacctgaactggttccagcagaagcctggcaagagccctaagaccctgatctacagagccaacagactgctggacggcgtgcctagcagattcagcggcagcggcagcggccaggactacagcctgaccatcagcagcctggactacgaggacatgggcatctactactgcctgcagtacgacgagttccctctgaccttcggcgacggcaccaagctggagctgaagggtggtggtggatccggtggtggtggatccgaggtgaagctggtggagagcggcggcgacctggtgaagcctggcggcagcctgaagctgagctgcgccgccagcggcttcaccttcagcagctacgccatgagctgggtgagacagaaccctgagaagagactggagtgggtggccagcatcagcaagggcggcaacacctactaccctaacagcgtgaagggcagattcaccatcagcagagacaacgccagaaacatcctgtacctgcagatgagcagcctgagaagcgaggacaccgccctgtactactgcgccagaggctggggcgactacggctggttcgcctactggggccaggtgaccctggtgaccgtgagcgcctacccatacgatgttccagattacgcttagtaactcgaggacggggtgaactacgcctgaggatccgatctttttccctctgccaaaaattatggggacatcatgaagccccttgagcatctgacttctggctaataaaggaaatttattttcattgcaatagtgtgttggaattttttgtgtctctcactcggcctaggtagataagtagcatggcgggttaatcattaactacaaggaacccctagtgatggagttggccactccctctctgcgcgctcgctcgctcactgaggccgggcgaccaaaggtcgcccgacgcccgggctttgcccgggcggcctcagtgagcgagcgagcgcgcag

SEQ ID NO: 2218 - DNA, 2525 bp, Artificial Sequence
  Description of Artificial Sequence: Synthetic polynucleotide
ctgcgcgctcgctcgctcactgaggccgcccgggcaaagcccgggcgtcgggcgacctttggtcgcccggcctcagtgagcgagcgagcgcgcagagagggagtggccaactccatcactaggggttccttgtagttaatgattaacccgccatgctacttatctaccagggtaatggggatcctctagaactatagctagtcgacataacgcgttagtatctgcagagggccctgcgtatgagtgcaagtgggttttaggaccaggatgaggcggggtgggggtgcctacctgacgaccgaccccgacccactggacaagcacccaacccccattccccaaattgcgcatcccctatcagagagggggaggggaaacaggatgcggcgaggcgcgtgcgcactgccagcttcagcaccgcggacagtgccttcgcccccgcctggcggcgcgcgccaccgccgcctcagcactgaaggcgcgctgacgtcactcgccggtcccccgcaaactccccttcccggccaccttggtcgcgtccgcgccgccgccggcccagccggaccgcaccacgcgaggcgcgagataggggggcacgggcgcgaccatctgcgctgcggcgccggcgactcagcgctgcctcagtctgcggtgggcagcggaggagtcgtgtcgtgcctgagagcgcagctgtgctcctgggcaccgcgcagtccgcccccgcggctcctggccagaccacccctaggaccccctgccccaagtcgcagccaagcttcgtttagtgaaccgtcagatcgcctggagacgccatccacgctgttttgacctccatagaagacaccgggaccgatccagcctccgcggattcgaatcccggccgggaacggtgcattggaacgcggattccccgtgccaagagtgacgtaagtaccgcctatagagtctataggcccacaaaaaatgctttcttcttttaatatacttttttgtttatcttatttctaatactttccctaatctctttctttcagggcaataatgatacaatgtatcatgcctctttgcaccattctaaagaataacagtgataatttctgggttaaggcaatagcaatatttctgcatataaatatttctgcatataaattgtaactgatgtaagaggtttcatattgctaatagcagctacaatccagctaccattctgcttttattttatggttgggataaggctggattattctgagtccaagctaggcccttttgctaatcatgttcatacctcttatcttcctcccacagctcctgggcaacgtgctggtctgtgtgctggcccatcactttggcaaagaattgggattcgaaccggtgccgccaccatgaagttgcctgttaggctgttggtgctgatgttctggattcctgcttccagcagtgacatcaagatgacccagagccctagcagcatgtacgccagcctgggcgagagagtgaccatcacctgcaaggccagccaggacatcaacagatacctgaactggttccagcagaagcctggcaagagccctaagaccctgatctacagagccaacagactgctggacggcgtgcctagcagattcagcggcagcggcagcggccaggactacagcctgaccatcagcagcctggactacgaggacatgggcatctactactgcctgcagtacgacgagttccctctgaccttcggcgacggcaccaagctggagctgaagggtggtggtggatccggtggtggtggatccggtggtggtggatccgaggtgaagctggtggagagcggcggcgacctggtgaagcctggcggcagcctgaagctgagctgcgccgccagcggcttcaccttcagcagctacgccatgagctgggtgagacagaaccctgagaagagactggagtgggtggccagcatcagcaagggcggcaacacctactaccctaacagcgtgaagggcagattcaccatcagcagagacaacgccagaaacatcctgtacctgcagatgagcagcctgagaagcgaggacaccgccctgtactactgcgccagaggctggggcgactacggctggttcgcctactggggccaggtgaccctggtgaccgtgagcgcctacccatacgatgttccagattacgcttagtaactcgaggacggggtgaactacgcctgaggatccgatctttttccctctgccaaaaattatggggacatcatgaagccccttgagcatctgacttctggctaataaaggaaatttattttcattgcaatagtgtgttggaattttttgtgtctctcactcggcctaggtagataagtagcatggcgggttaatcattaactacaaggaacccctagtgatggagttggccactccctctctgcgcgctcgctcgctcactgaggccgggcgaccaaaggtcgcccgacgcccgggctttgcccgggcggcctcagtgagcgagcgagcgcgcag

SEQ ID NO: 2219 - DNA, 2540 bp, Artificial Sequence
  Description of Artificial Sequence: Synthetic polynucleotide
ctgcgcgctcgctcgctcactgaggccgcccgggcaaagcccgggcgtcgggcgacctttggtcgcccggcctcagtgagcgagcgagcgcgcagagagggagtggccaactccatcactaggggttccttgtagttaatgattaacccgccatgctacttatctaccagggtaatggggatcctctagaactatagctagtcgacataacgcgttagtatctgcagagggccctgcgtatgagtgcaagtgggttttaggaccaggatgaggcggggtgggggtgcctacctgacgaccgaccccgacccactggacaagcacccaacccccattccccaaattgcgcatcccctatcagagagggggaggggaaacaggatgcggcgaggcgcgtgcgcactgccagcttcagcaccgcggacagtgccttcgcccccgcctggcggcgcgcgccaccgccgcctcagcactgaaggcgcgctgacgtcactcgccggtcccccgcaaactccccttcccggccaccttggtcgcgtccgcgccgccgccggcccagccggaccgcaccacgcgaggcgcgagataggggggcacgggcgcgaccatctgcgctgcggcgccggcgactcagcgctgcctcagtctgcggtgggcagcggaggagtcgtgtcgtgcctgagagcgcagctgtgctcctgggcaccgcgcagtccgcccccgcggctcctggccagaccacccctaggaccccctgccccaagtcgcagccaagcttcgtttagtgaaccgtcagatcgcctggagacgccatccacgctgttttgacctccatagaagacaccgggaccgatccagcctccgcggattcgaatcccggccgggaacggtgcattggaacgcggattccccgtgccaagagtgacgtaagtaccgcctatagagtctataggcccacaaaaaatgctttcttcttttaatatacttttttgtttatcttatttctaatactttccctaatctctttctttcagggcaataatgatacaatgtatcatgcctctttgcaccattctaaagaataacagtgataatttctgggttaaggcaatagcaatatttctgcatataaatatttctgcatataaattgtaactgatgtaagaggtttcatattgctaatagcagctacaatccagctaccattctgcttttattttatggttgggataaggctggattattctgagtccaagctaggcccttttgctaatcatgttcatacctcttatcttcctcccacagctcctgggcaacgtgctggtctgtgtgctggcccatcactttggcaaagaattgggattcgaaccggtgccgccaccatgaagttgcctgttaggctgttggtgctgatgttctggattcctgcttccagcagtgacatcaagatgacccagagccctagcagcatgtacgccagcctgggcgagagagtgaccatcacctgcaaggccagccaggacatcaacagatacctgaactggttccagcagaagcctggcaagagccctaagaccctgatctacagagccaacagactgctggacggcgtgcctagcagattcagcggcagcggcagcggccaggactacagcctgaccatcagcagcctggactacgaggacatgggcatctactactgcctgcagtacgacgagttccctctgaccttcggcgacggcaccaagctggagctgaagggtggtggtggatccggtggtggtggatccggtggtggtggatccggtggtggtggatccgaggtgaagctggtggagagcggcggcgacctggtgaagcctggcggcagcctgaagctgagctgcgccgccagcggcttcaccttcagcagctacgccatgagctgggtgagacagaaccctgagaagagactggagtgggtggccagcatcagcaagggcggcaacacctactaccctaacagcgtgaagggcagattcaccatcagcagagacaacgccagaaacatcctgtacctgcagatgagcagcctgagaagcgaggacaccgccctgtactactgcgccagaggctggggcgactacggctggttcgcctactggggccaggtgaccctggtgaccgtgagcgcctacccatacgatgttccagattacgcttagtaactcgaggacggggtgaactacgcctgaggatccgatctttttccctctgccaaaaattatggggacatcatgaagccccttgagcatctgacttctggctaataaaggaaatttattttcattgcaatagtgtgttggaattttttgtgtctctcactcggcctaggtagataagtagcatggcgggttaatcattaactacaaggaacccctagtgatggagttggccactccctctctgcgcgctcgctcgctcactgaggccgggcgaccaaaggtcgcccgacgcccgggctttgcccgggcggcctcagtgagcgagcgagcgcgcag

SEQ ID NO: 2220 - DNA, 3091 bp, Artificial Sequence
  Description of Artificial Sequence: Synthetic polynucleotide
ctgcgcgctcgctcgctcactgaggccgcccgggcaaagcccgggcgtcgggcgacctttggtcgcccggcctcagtgagcgagcgagcgcgcagagagggagtggccaactccatcactaggggttccttgtagttaatgattaacccgccatgctacttatctaccagggtaatggggatcctctagaactatagctagtcgacataacgcgtctagttattaatagtaatcaattacggggtcattagttcatagcccatatatggagttccgcgttacataacttacggtaaatggcccgcctggctgaccgcccaacgacccccgcccattgacgtcaataatgacgtatgttcccatagtaacgccaatagggactttccattgacgtcaatgggtggagtatttacggtaaactgcccacttggcagtacatcaagtgtatcatatgccaagtacgccccctattgacgtcaatgacggtaaatggcccgcctggcattatgcccagtacatgaccttatgggactttcctacttggcagtacatctacgtattagtcatcgctattaccatggtcgaggtgagccccacgttctgcttcactctccccatctcccccccctccccacccccaattttgtatttatttattttttaattattttgtgcagcgatgggggcggggggggggggggggcgcgcgccaggcggggcggggcggggcgaggggcggggcggggcgaggcggagaggtgcggcggcagccaatcagagcggcgcgctccgaaagtttccttttatggcgaggcggcggcggcggcggccctataaaaagcgaagcgcgcggcgggcgggagtcgctgcgcgctgccttcgccccgtgccccgctccgccgccgcctcgcgccgcccgccccggctctgactgaccgcgttactcccacaggtgagcgggcgggacggcccttctcctccgggctgtaattagcgcttggtttaatgacggcttgtttcttttctgtggctgcgtgaaagccttgaggggctccgggagggccctttgtgcggggggagcggctcggggggtgcgtgcgtgtgtgtgtgcgtggggagcgccgcgtgcggctccgcgctgcccggcggctgtgagcgctgcgggcgcggcgcggggctttgtgcgctccgcagtgtgcgcgaggggagcgcggccgggggcggtgccccgcggtgcggggggggctgcgaggggaacaaaggctgcgtgcggggtgtgtgcgtgggggggtgagcagggggtgtgggcgcgtcggtcgggctgcaaccccccctgcacccccctccccgagttgctgagcacggcccggcttcgggtgcggggctccgtacggggcgtggcgcggggctcgccgtgccgggcggggggtggcggcaggtgggggtgccgggcggggcggggccgcctcgggccggggagggctcgggggaggggcgcggcggcccccggagcgccggcggctgtcgaggcgcggcgagccgcagccattgccttttatggtaatcgtgcgagagggcgcagggacttcctttgtcccaaatctgtgcggagccgaaatctgggaggcgccgccgcaccccctctagcgggcgcggggcgaagcggtgcggcgccggcaggaaggaaatgggcggggagggccttcgtgcgtcgccgcgccgccgtccccttctccctctccagcctcggggctgtccgcggggggacggctgccttcgggggggacggggcagggcggggttcggcttctggcgtgtgaccggcggctctagagcctctgctaaccatgttcatgccttcttctttttcctacagctcctgggcaacgtgctggttattgtgctgtctcatcattttggcaaagaattcgggattcgaaccggtgccgccaccatgaacttcgggctcagcttgattttccttgtccttgttttaaaaggtgtccagtgtaagctggtggagagcggcggcgacctggtgaagcctggcggcagcctgaagctgagctgcgccgccagcggcttcaccttcagcagctacgccatgagctgggtgagacagaaccctgagaagagactggagtgggtggccagcatcagcaagggcggcaacacctactaccctaacagcgtgaagggcagattcaccatcagcagagacaacgccagaaacatcctgtacctgcagatgagcagcctgagaagcgaggacaccgccctgtactactgcgccagaggctggggcgactacggctggttcgcctactggggccaggtgaccctggtgaccgtgagcgccggtggtggtggatccggtggtggtggatccggtggtggtggatccgacatcaagatgacccagagccctagcagcatgtacgccagcctgggcgagagagtgaccatcacctgcaaggccagccaggacatcaacagatacctgaactggttccagcagaagcctggcaagagccctaagaccctgatctacagagccaacagactgctggacggcgtgcctagcagattcagcggcagcggcagcggccaggactacagcctgaccatcagcagcctggactacgaggacatgggcatctactactgcctgcagtacgacgagttccctctgaccttcggcgacggcaccaagctggagctgaagtacccatacgatgttccagattacgcttagtaactcgaggacggggtgaactacgcctgaggatccgatctttttccctctgccaaaaattatggggacatcatgaagccccttgagcatctgacttctggctaataaaggaaatttattttcattgcaatagtgtgttggaattttttgtgtctctcactcggcctaggtagataagtagcatggcgggttaatcattaactacaaggaacccctagtgatggagttggccactccctctctgcgcgctcgctcgctcactgaggccgggcgaccaaaggtcgcccgacgcccgggctttgcccgggcggcctcagtgagcgagcgagcgcgcag

SEQ ID NO: 2221 - DNA, 3082 bp, Artificial Sequence
  Description of Artificial Sequence: Synthetic polynucleotide
ctgcgcgctcgctcgctcactgaggccgcccgggcaaagcccgggcgtcgggcgacctttggtcgcccggcctcagtgagcgagcgagcgcgcagagagggagtggccaactccatcactaggggttccttgtagttaatgattaacccgccatgctacttatctaccagggtaatggggatcctctagaactatagctagtcgacataacgcgtctagttattaatagtaatcaattacggggtcattagttcatagcccatatatggagttccgcgttacataacttacggtaaatggcccgcctggctgaccgcccaacgacccccgcccattgacgtcaataatgacgtatgttcccatagtaacgccaatagggactttccattgacgtcaatgggtggagtatttacggtaaactgcccacttggcagtacatcaagtgtatcatatgccaagtacgccccctattgacgtcaatgacggtaaatggcccgcctggcattatgcccagtacatgaccttatgggactttcctacttggcagtacatctacgtattagtcatcgctattaccatggtcgaggtgagccccacgttctgcttcactctccccatctcccccccctccccacccccaattttgtatttatttattttttaattattttgtgcagcgatgggggcggggggggggggggggcgcgcgccaggcggggcggggcggggcgaggggcggggcggggcgaggcggagaggtgcggcggcagccaatcagagcggcgcgctccgaaagtttccttttatggcgaggcggcggcggcggcggccctataaaaagcgaagcgcgcggcgggcgggagtcgctgcgcgctgccttcgccccgtgccccgctccgccgccgcctcgcgccgcccgccccggctctgactgaccgcgttactcccacaggtgagcgggcgggacggcccttctcctccgggctgtaattagcgcttggtttaatgacggcttgtttcttttctgtggctgcgtgaaagccttgaggggctccgggagggccctttgtgcggggggagcggctcggggggtgcgtgcgtgtgtgtgtgcgtggggagcgccgcgtgcggctccgcgctgcccggcggctgtgagcgctgcgggcgcggcgcggggctttgtgcgctccgcagtgtgcgcgaggggagcgcggccgggggcggtgccccgcggtgcggggggggctgcgaggggaacaaaggctgcgtgcggggtgtgtgcgtgggggggtgagcagggggtgtgggcgcgtcggtcgggctgcaaccccccctgcacccccctccccgagttgctgagcacggcccggcttcgggtgcggggctccgtacggggcgtggcgcggggctcgccgtgccgggcggggggtggcggcaggtgggggtgccgggcggggcggggccgcctcgggccggggagggctcgggggaggggcgcggcggcccccggagcgccggcggctgtcgaggcgcggcgagccgcagccattgccttttatggtaatcgtgcgagagggcgcagggacttcctttgtcccaaatctgtgcggagccgaaatctgggaggcgccgccgcaccccctctagcgggcgcggggcgaagcggtgcggcgccggcaggaaggaaatgggcggggagggccttcgtgcgtcgccgcgccgccgtccccttctccctctccagcctcggggctgtccgcggggggacggctgccttcgggggggacggggcagggcggggttcggcttctggcgtgtgaccggcggctctagagcctctgctaaccatgttcatgccttcttctttttcctacagctcctgggcaacgtgctggttattgtgctgtctcatcattttggcaaagaattcgggattcgaaccggtgccgccaccatgaacttcgggctcagcttgattttccttgtccttgttttaaaaggtgtccagtgtgagagcggcggcgacctggtgaagcctggcggcagcctgaagctgagctgcgccgccagcggcttcaccttcagcagctacgccatgagctgggtgagacagaaccctgagaagagactggagtgggtggccagcatcagcaagggcggcaacacctactaccctaacagcgtgaagggcagattcaccatcagcagagacaacgccagaaacatcctgtacctgcagatgagcagcctgagaagcgaggacaccgccctgtactactgcgccagaggctggggcgactacggctggttcgcctactggggccaggtgaccctggtgaccgtgagcgccggtggtggtggatccggtggtggtggatccggtggtggtggatccgacatcaagatgacccagagccctagcagcatgtacgccagcctgggcgagagagtgaccatcacctgcaaggccagccaggacatcaacagatacctgaactggttccagcagaagcctggcaagagccctaagaccctgatctacagagccaacagactgctggacggcgtgcctagcagattcagcggcagcggcagcggccaggactacagcctgaccatcagcagcctggactacgaggacatgggcatctactactgcctgcagtacgacgagttccctctgaccttcggcgacggcaccaagctggagctgaagtacccatacgatgttccagattacgcttagtaactcgaggacggggtgaactacgcctgaggatccgatctttttccctctgccaaaaattatggggacatcatgaagccccttgagcatctgacttctggctaataaaggaaatttattttcattgcaatagtgtgttggaattttttgtgtctctcactcggcctaggtagataagtagcatggcgggttaatcattaactacaaggaacccctagtgatggagttggccactccctctctgcgcgctcgctcgctcactgaggccgggcgaccaaaggtcgcccgacgcccgggctttgcccgggcggcctcagtgagcgagcgagcgcgcag

SEQ ID NO: 2222 - DNA, 3103 bp, Artificial Sequence
  Description of Artificial Sequence: Synthetic polynucleotide
ctgcgcgctcgctcgctcactgaggccgcccgggcaaagcccgggcgtcgggcgacctttggtcgcccggcctcagtgagcgagcgagcgcgcagagagggagtggccaactccatcactaggggttccttgtagttaatgattaacccgccatgctacttatctaccagggtaatggggatcctctagaactatagctagtcgacataacgcgtctagttattaatagtaatcaattacggggtcattagttcatagcccatatatggagttccgcgttacataacttacggtaaatggcccgcctggctgaccgcccaacgacccccgcccattgacgtcaataatgacgtatgttcccatagtaacgccaatagggactttccattgacgtcaatgggtggagtatttacggtaaactgcccacttggcagtacatcaagtgtatcatatgccaagtacgccccctattgacgtcaatgacggtaaatggcccgcctggcattatgcccagtacatgaccttatgggactttcctacttggcagtacatctacgtattagtcatcgctattaccatggtcgaggtgagccccacgttctgcttcactctccccatctcccccccctccccacccccaattttgtatttatttattttttaattattttgtgcagcgatgggggcggggggggggggggggcgcgcgccaggcggggcggggcggggcgaggggcggggcggggcgaggcggagaggtgcggcggcagccaatcagagcggcgcgctccgaaagtttccttttatggcgaggcggcggcggcggcggccctataaaaagcgaagcgcgcggcgggcgggagtcgctgcgcgctgccttcgccccgtgccccgctccgccgccgcctcgcgccgcccgccccggctctgactgaccgcgttactcccacaggtgagcgggcgggacggcccttctcctccgggctgtaattagcgcttggtttaatgacggcttgtttcttttctgtggctgcgtgaaagccttgaggggctccgggagggccctttgtgcggggggagcggctcggggggtgcgtgcgtgtgtgtgtgcgtggggagcgccgcgtgcggctccgcgctgcccggcggctgtgagcgctgcgggcgcggcgcggggctttgtgcgctccgcagtgtgcgcgaggggagcgcggccgggggcggtgccccgcggtgcggggggggctgcgaggggaacaaaggctgcgtgcggggtgtgtgcgtgggggggtgagcagggggtgtgggcgcgtcggtcgggctgcaaccccccctgcacccccctccccgagttgctgagcacggcccggcttcgggtgcggggctccgtacggggcgtggcgcggggctcgccgtgccgggcggggggtggcggcaggtgggggtgccgggcggggcggggccgcctcgggccggggagggctcgggggaggggcgcggcggcccccggagcgccggcggctgtcgaggcgcggcgagccgcagccattgccttttatggtaatcgtgcgagagggcgcagggacttcctttgtcccaaatctgtgcggagccgaaatctgggaggcgccgccgcaccccctctagcgggcgcggggcgaagcggtgcggcgccggcaggaaggaaatgggcggggagggccttcgtgcgtcgccgcgccgccgtccccttctccctctccagcctcggggctgtccgcggggggacggctgccttcgggggggacggggcagggcggggttcggcttctggcgtgtgaccggcggctctagagcctctgctaaccatgttcatgccttcttctttttcctacagctcctgggcaacgtgctggttattgtgctgtctcatcattttggcaaagaattcgggattcgaaccggtgccgccaccatgaacttcgggctcagcttgattttccttgtccttgttttaaaaggtgtccagtgtgacatcgaggtgaagctggtggagagcggcggcgacctggtgaagcctggcggcagcctgaagctgagctgcgccgccagcggcttcaccttcagcagctacgccatgagctgggtgagacagaaccctgagaagagactggagtgggtggccagcatcagcaagggcggcaacacctactaccctaacagcgtgaagggcagattcaccatcagcagagacaacgccagaaacatcctgtacctgcagatgagcagcctgagaagcgaggacaccgccctgtactactgcgccagaggctggggcgactacggctggttcgcctactggggccaggtgaccctggtgaccgtgagcgccggtggtggtggatccggtggtggtggatccggtggtggtggatccgacatcaagatgacccagagccctagcagcatgtacgccagcctgggcgagagagtgaccatcacctgcaaggccagccaggacatcaacagatacctgaactggttccagcagaagcctggcaagagccctaagaccctgatctacagagccaacagactgctggacggcgtgcctagcagattcagcggcagcggcagcggccaggactacagcctgaccatcagcagcctggactacgaggacatgggcatctactactgcctgcagtacgacgagttccctctgaccttcggcgacggcaccaagctggagctgaagtacccatacgatgttccagattacgcttagtaactcgaggacggggtgaactacgcctgaggatccgatctttttccctctgccaaaaattatggggacatcatgaagccccttgagcatctgacttctggctaataaaggaaatttattttcattgcaatagtgtgttggaattttttgtgtctctcactcggcctaggtagataagtagcatggcgggttaatcattaactacaaggaacccctagtgatggagttggccactccctctctgcgcgctcgctcgctcactgaggccgggcgaccaaaggtcgcccgacgcccgggctttgcccgggcggcctcagtgagcgagcgagcgcgcag

SEQ ID NO: 2223 - DNA, 3109 bp, Artificial Sequence
  Description of Artificial Sequence: Synthetic polynucleotide
ctgcgcgctcgctcgctcactgaggccgcccgggcaaagcccgggcgtcgggcgacctttggtcgcccggcctcagtgagcgagcgagcgcgcagagagggagtggccaactccatcactaggggttccttgtagttaatgattaacccgccatgctacttatctaccagggtaatggggatcctctagaactatagctagtcgacataacgcgtctagttattaatagtaatcaattacggggtcattagttcatagcccatatatggagttccgcgttacataacttacggtaaatggcccgcctggctgaccgcccaacgacccccgcccattgacgtcaataatgacgtatgttcccatagtaacgccaatagggactttccattgacgtcaatgggtggagtatttacggtaaactgcccacttggcagtacatcaagtgtatcatatgccaagtacgccccctattgacgtcaatgacggtaaatggcccgcctggcattatgcccagtacatgaccttatgggactttcctacttggcagtacatctacgtattagtcatcgctattaccatggtcgaggtgagccccacgttctgcttcactctccccatctcccccccctccccacccccaattttgtatttatttattttttaattattttgtgcagcgatgggggcggggggggggggggggcgcgcgccaggcggggcggggcggggcgaggggcggggcggggcgaggcggagaggtgcggcggcagccaatcagagcggcgcgctccgaaagtttccttttatggcgaggcggcggcggcggcggccctataaaaagcgaagcgcgcggcgggcgggagtcgctgcgcgctgccttcgccccgtgccccgctccgccgccgcctcgcgccgcccgccccggctctgactgaccgcgttactcccacaggtgagcgggcgggacggcccttctcctccgggctgtaattagcgcttggtttaatgacggcttgtttcttttctgtggctgcgtgaaagccttgaggggctccgggagggccctttgtgcggggggagcggctcggggggtgcgtgcgtgtgtgtgtgcgtggggagcgccgcgtgcggctccgcgctgcccggcggctgtgagcgctgcgggcgcggcgcggggctttgtgcgctccgcagtgtgcgcgaggggagcgcggccgggggcggtgccccgcggtgcggggggggctgcgaggggaacaaaggctgcgtgcggggtgtgtgcgtgggggggtgagcagggggtgtgggcgcgtcggtcgggctgcaaccccccctgcacccccctccccgagttgctgagcacggcccggcttcgggtgcggggctccgtacggggcgtggcgcggggctcgccgtgccgggcggggggtggcggcaggtgggggtgccgggcggggcggggccgcctcgggccggggagggctcgggggaggggcgcggcggcccccggagcgccggcggctgtcgaggcgcggcgagccgcagccattgccttttatggtaatcgtgcgagagggcgcagggacttcctttgtcccaaatctgtgcggagccgaaatctgggaggcgccgccgcaccccctctagcgggcgcggggcgaagcggtgcggcgccggcaggaaggaaatgggcggggagggccttcgtgcgtcgccgcgccgccgtccccttctccctctccagcctcggggctgtccgcggggggacggctgccttcgggggggacggggcagggcggggttcggcttctggcgtgtgaccggcggctctagagcctctgctaaccatgttcatgccttcttctttttcctacagctcctgggcaacgtgctggttattgtgctgtctcatcattttggcaaagaattcgggattcgaaccggtgccgccaccatgaacttcgggctcagcttgattttccttgtccttgttttaaaaggtgtccagtgtgacatcaagatggaggtgaagctggtggagagcggcggcgacctggtgaagcctggcggcagcctgaagctgagctgcgccgccagcggcttcaccttcagcagctacgccatgagctgggtgagacagaaccctgagaagagactggagtgggtggccagcatcagcaagggcggcaacacctactaccctaacagcgtgaagggcagattcaccatcagcagagacaacgccagaaacatcctgtacctgcagatgagcagcctgagaagcgaggacaccgccctgtactactgcgccagaggctggggcgactacggctggttcgcctactggggccaggtgaccctggtgaccgtgagcgccggtggtggtggatccggtggtggtggatccggtggtggtggatccgacatcaagatgacccagagccctagcagcatgtacgccagcctgggcgagagagtgaccatcacctgcaaggccagccaggacatcaacagatacctgaactggttccagcagaagcctggcaagagccctaagaccctgatctacagagccaacagactgctggacggcgtgcctagcagattcagcggcagcggcagcggccaggactacagcctgaccatcagcagcctggactacgaggacatgggcatctactactgcctgcagtacgacgagttccctctgaccttcggcgacggcaccaagctggagctgaagtacccatacgatgttccagattacgcttagtaactcgaggacggggtgaactacgcctgaggatccgatctttttccctctgccaaaaattatggggacatcatgaagccccttgagcatctgacttctggctaataaaggaaatttattttcattgcaatagtgtgttggaattttttgtgtctctcactcggcctaggtagataagtagcatggcgggttaatcattaactacaaggaacccctagtgatggagttggccactccctctctgcgcgctcgctcgctcactgaggccgggcgaccaaaggtcgcccgacgcccgggctttgcccgggcggcctcagtgagcgagcgagcgcgcag

SEQ ID NO: 2224 - DNA, 3115 bp, Artificial Sequence
  Description of Artificial Sequence: Synthetic polynucleotide
ctgcgcgctcgctcgctcactgaggccgcccgggcaaagcccgggcgtcgggcgacctttggtcgcccggcctcagtgagcgagcgagcgcgcagagagggagtggccaactccatcactaggggttccttgtagttaatgattaacccgccatgctacttatctaccagggtaatggggatcctctagaactatagctagtcgacataacgcgtctagttattaatagtaatcaattacggggtcattagttcatagcccatatatggagttccgcgttacataacttacggtaaatggcccgcctggctgaccgcccaacgacccccgcccattgacgtcaataatgacgtatgttcccatagtaacgccaatagggactttccattgacgtcaatgggtggagtatttacggtaaactgcccacttggcagtacatcaagtgtatcatatgccaagtacgccccctattgacgtcaatgacggtaaatggcccgcctggcattatgcccagtacatgaccttatgggactttcctacttggcagtacatctacgtattagtcatcgctattaccatggtcgaggtgagccccacgttctgcttcactctccccatctcccccccctccccacccccaattttgtatttatttattttttaattattttgtgcagcgatgggggcggggggggggggggggcgcgcgccaggcggggcggggcggggcgaggggcggggcggggcgaggcggagaggtgcggcggcagccaatcagagcggcgcgctccgaaagtttccttttatggcgaggcggcggcggcggcggccctataaaaagcgaagcgcgcggcgggcgggagtcgctgcgcgctgccttcgccccgtgccccgctccgccgccgcctcgcgccgcccgccccggctctgactgaccgcgttactcccacaggtgagcgggcgggacggcccttctcctccgggctgtaattagcgcttggtttaatgacggcttgtttcttttctgtggctgcgtgaaagccttgaggggctccgggagggccctttgtgcggggggagcggctcggggggtgcgtgcgtgtgtgtgtgcgtggggagcgccgcgtgcggctccgcgctgcccggcggctgtgagcgctgcgggcgcggcgcggggctttgtgcgctccgcagtgtgcgcgaggggagcgcggccgggggcggtgccccgcggtgcggggggggctgcgaggggaacaaaggctgcgtgcggggtgtgtgcgtgggggggtgagcagggggtgtgggcgcgtcggtcgggctgcaaccccccctgcacccccctccccgagttgctgagcacggcccggcttcgggtgcggggctccgtacggggcgtggcgcggggctcgccgtgccgggcggggggtggcggcaggtgggggtgccgggcggggcggggccgcctcgggccggggagggctcgggggaggggcgcggcggcccccggagcgccggcggctgtcgaggcgcggcgagccgcagccattgccttttatggtaatcgtgcgagagggcgcagggacttcctttgtcccaaatctgtgcggagccgaaatctgggaggcgccgccgcaccccctctagcgggcgcggggcgaagcggtgcggcgccggcaggaaggaaatgggcggggagggccttcgtgcgtcgccgcgccgccgtccccttctccctctccagcctcggggctgtccgcggggggacggctgccttcgggggggacggggcagggcggggttcggcttctggcgtgtgaccggcggctctagagcctctgctaaccatgttcatgccttcttctttttcctacagctcctgggcaacgtgctggttattgtgctgtctcatcattttggcaaagaattcgggattcgaaccggtgccgccaccatgaacttcgggctcagcttgattttccttgtccttgttttaaaaggtgtccagtgtgacatcaagatgacccaggaggtgaagctggtggagagcggcggcgacctggtgaagcctggcggcagcctgaagctgagctgcgccgccagcggcttcaccttcagcagctacgccatgagctgggtgagacagaaccctgagaagagactggagtgggtggccagcatcagcaagggcggcaacacctactaccctaacagcgtgaagggcagattcaccatcagcagagacaacgccagaaacatcctgtacctgcagatgagcagcctgagaagcgaggacaccgccctgtactactgcgccagaggctggggcgactacggctggttcgcctactggggccaggtgaccctggtgaccgtgagcgccggtggtggtggatccggtggtggtggatccggtggtggtggatccgacatcaagatgacccagagccctagcagcatgtacgccagcctgggcgagagagtgaccatcacctgcaaggccagccaggacatcaacagatacctgaactggttccagcagaagcctggcaagagccctaagaccctgatctacagagccaacagactgctggacggcgtgcctagcagattcagcggcagcggcagcggccaggactacagcctgaccatcagcagcctggactacgaggacatgggcatctactactgcctgcagtacgacgagttccctctgaccttcggcgacggcaccaagctggagctgaagtacccatacgatgttccagattacgcttagtaactcgaggacggggtgaactacgcctgaggatccgatctttttccctctgccaaaaattatggggacatcatgaagccccttgagcatctgacttctggctaataaaggaaatttattttcattgcaatagtgtgttggaattttttgtgtctctcactcggcctaggtagataagtagcatggcgggttaatcattaactacaaggaacccctagtgatggagttggccactccctctctgcgcgctcgctcgctcactgaggccgggcgaccaaaggtcgcccgacgcccgggctttgcccgggcggcctcagtgagcgagcgagcgcgcag

SEQ ID NO: 2225 - DNA, 3121 bp, Artificial Sequence
  Description of Artificial Sequence: Synthetic polynucleotide
ctgcgcgctcgctcgctcactgaggccgcccgggcaaagcccgggcgtcgggcgacctttggtcgcccggcctcagtgagcgagcgagcgcgcagagagggagtggccaactccatcactaggggttccttgtagttaatgattaacccgccatgctacttatctaccagggtaatggggatcctctagaactatagctagtcgacataacgcgtctagttattaatagtaatcaattacggggtcattagttcatagcccatatatggagttccgcgttacataacttacggtaaatggcccgcctggctgaccgcccaacgacccccgcccattgacgtcaataatgacgtatgttcccatagtaacgccaatagggactttccattgacgtcaatgggtggagtatttacggtaaactgcccacttggcagtacatcaagtgtatcatatgccaagtacgccccctattgacgtcaatgacggtaaatggcccgcctggcattatgcccagtacatgaccttatgggactttcctacttggcagtacatctacgtattagtcatcgctattaccatggtcgaggtgagccccacgttctgcttcactctccccatctcccccccctccccacccccaattttgtatttatttattttttaattattttgtgcagcgatgggggcggggggggggggggggcgcgcgccaggcggggcggggcggggcgaggggcggggcggggcgaggcggagaggtgcggcggcagccaatcagagcggcgcgctccgaaagtttccttttatggcgaggcggcggcggcggcggccctataaaaagcgaagcgcgcggcgggcgggagtcgctgcgcgctgccttcgccccgtgccccgctccgccgccgcctcgcgccgcccgccccggctctgactgaccgcgttactcccacaggtgagcgggcgggacggcccttctcctccgggctgtaattagcgcttggtttaatgacggcttgtttcttttctgtggctgcgtgaaagccttgaggggctccgggagggccctttgtgcggggggagcggctcggggggtgcgtgcgtgtgtgtgtgcgtggggagcgccgcgtgcggctccgcgctgcccggcggctgtgagcgctgcgggcgcggcgcggggctttgtgcgctccgcagtgtgcgcgaggggagcgcggccgggggcggtgccccgcggtgcggggggggctgcgaggggaacaaaggctgcgtgcggggtgtgtgcgtgggggggtgagcagggggtgtgggcgcgtcggtcgggctgcaaccccccctgcacccccctccccgagttgctgagcacggcccggcttcgggtgcggggctccgtacggggcgtggcgcggggctcgccgtgccgggcggggggtggcggcaggtgggggtgccgggcggggcggggccgcctcgggccggggagggctcgggggaggggcgcggcggcccccggagcgccggcggctgtcgaggcgcggcgagccgcagccattgccttttatggtaatcgtgcgagagggcgcagggacttcctttgtcccaaatctgtgcggagccgaaatctgggaggcgccgccgcaccccctctagcgggcgcggggcgaagcggtgcggcgccggcaggaaggaaatgggcggggagggccttcgtgcgtcgccgcgccgccgtccccttctccctctccagcctcggggctgtccgcggggggacggctgccttcgggggggacggggcagggcggggttcggcttctggcgtgtgaccggcggctctagagcctctgctaaccatgttcatgccttcttctttttcctacagctcctgggcaacgtgctggttattgtgctgtctcatcattttggcaaagaattcgggattcgaaccggtgccgccaccatgaacttcgggctcagcttgattttccttgtccttgttttaaaaggtgtccagtgtgacatcaagatgacccagagccctgaggtgaagctggtggagagcggcggcgacctggtgaagcctggcggcagcctgaagctgagctgcgccgccagcggcttcaccttcagcagctacgccatgagctgggtgagacagaaccctgagaagagactggagtgggtggccagcatcagcaagggcggcaacacctactaccctaacagcgtgaagggcagattcaccatcagcagagacaacgccagaaacatcctgtacctgcagatgagcagcctgagaagcgaggacaccgccctgtactactgcgccagaggctggggcgactacggctggttcgcctactggggccaggtgaccctggtgaccgtgagcgccggtggtggtggatccggtggtggtggatccggtggtggtggatccgacatcaagatgacccagagccctagcagcatgtacgccagcctgggcgagagagtgaccatcacctgcaaggccagccaggacatcaacagatacctgaactggttccagcagaagcctggcaagagccctaagaccctgatctacagagccaacagactgctggacggcgtgcctagcagattcagcggcagcggcagcggccaggactacagcctgaccatcagcagcctggactacgaggacatgggcatctactactgcctgcagtacgacgagttccctctgaccttcggcgacggcaccaagctggagctgaagtacccatacgatgttccagattacgcttagtaactcgaggacggggtgaactacgcctgaggatccgatctttttccctctgccaaaaattatggggacatcatgaagccccttgagcatctgacttctggctaataaaggaaatttattttcattgcaatagtgtgttggaattttttgtgtctctcactcggcctaggtagataagtagcatggcgggttaatcattaactacaaggaacccctagtgatggagttggccactccctctctgcgcgctcgctcgctcactgaggccgggcgaccaaaggtcgcccgacgcccgggctttgcccgggcggcctcagtgagcgagcgagcgcgcag

SEQ ID NO: 2226 - DNA, 3097 bp, Artificial Sequence
  Description of Artificial Sequence: Synthetic polynucleotide
ctgcgcgctcgctcgctcactgaggccgcccgggcaaagcccgggcgtcgggcgacctttggtcgcccggcctcagtgagcgagcgagcgcgcagagagggagtggccaactccatcactaggggttccttgtagttaatgattaacccgccatgctacttatctaccagggtaatggggatcctctagaactatagctagtcgacataacgcgtctagttattaatagtaatcaattacggggtcattagttcatagcccatatatggagttccgcgttacataacttacggtaaatggcccgcctggctgaccgcccaacgacccccgcccattgacgtcaataatgacgtatgttcccatagtaacgccaatagggactttccattgacgtcaatgggtggagtatttacggtaaactgcccacttggcagtacatcaagtgtatcatatgccaagtacgccccctattgacgtcaatgacggtaaatggcccgcctggcattatgcccagtacatgaccttatgggactttcctacttggcagtacatctacgtattagtcatcgctattaccatggtcgaggtgagccccacgttctgcttcactctccccatctcccccccctccccacccccaattttgtatttatttattttttaattattttgtgcagcgatgggggcggggggggggggggggcgcgcgccaggcggggcggggcggggcgaggggcggggcggggcgaggcggagaggtgcggcggcagccaatcagagcggcgcgctccgaaagtttccttttatggcgaggcggcggcggcggcggccctataaaaagcgaagcgcgcggcgggcgggagtcgctgcgcgctgccttcgccccgtgccccgctccgccgccgcctcgcgccgcccgccccggctctgactgaccgcgttactcccacaggtgagcgggcgggacggcccttctcctccgggctgtaattagcgcttggtttaatgacggcttgtttcttttctgtggctgcgtgaaagccttgaggggctccgggagggccctttgtgcggggggagcggctcggggggtgcgtgcgtgtgtgtgtgcgtggggagcgccgcgtgcggctccgcgctgcccggcggctgtgagcgctgcgggcgcggcgcggggctttgtgcgctccgcagtgtgcgcgaggggagcgcggccgggggcggtgccccgcggtgcggggggggctgcgaggggaacaaaggctgcgtgcggggtgtgtgcgtgggggggtgagcagggggtgtgggcgcgtcggtcgggctgcaaccccccctgcacccccctccccgagttgctgagcacggcccggcttcgggtgcggggctccgtacggggcgtggcgcggggctcgccgtgccgggcggggggtggcggcaggtgggggtgccgggcggggcggggccgcctcgggccggggagggctcgggggaggggcgcggcggcccccggagcgccggcggctgtcgaggcgcggcgagccgcagccattgccttttatggtaatcgtgcgagagggcgcagggacttcctttgtcccaaatctgtgcggagccgaaatctgggaggcgccgccgcaccccctctagcgggcgcggggcgaagcggtgcggcgccggcaggaaggaaatgggcggggagggccttcgtgcgtcgccgcgccgccgtccccttctccctctccagcctcggggctgtccgcggggggacggctgccttcgggggggacggggcagggcggggttcggcttctggcgtgtgaccggcggctctagagcctctgctaaccatgttcatgccttcttctttttcctacagctcctgggcaacgtgctggttattgtgctgtctcatcattttggcaaagaattcgggattcgaaccggtgccgccaccatgggcgtgaaggtgctgttcgccctgatctgcatcgccgtggccgaggccgccgccgaggtgaagctggtggagagcggcggcgacctggtgaagcctggcggcagcctgaagctgagctgcgccgccagcggcttcaccttcagcagctacgccatgagctgggtgagacagaaccctgagaagagactggagtgggtggccagcatcagcaagggcggcaacacctactaccctaacagcgtgaagggcagattcaccatcagcagagacaacgccagaaacatcctgtacctgcagatgagcagcctgagaagcgaggacaccgccctgtactactgcgccagaggctggggcgactacggctggttcgcctactggggccaggtgaccctggtgaccgtgagcgccggtggtggtggatccggtggtggtggatccggtggtggtggatccgacatcaagatgacccagagccctagcagcatgtacgccagcctgggcgagagagtgaccatcacctgcaaggccagccaggacatcaacagatacctgaactggttccagcagaagcctggcaagagccctaagaccctgatctacagagccaacagactgctggacggcgtgcctagcagattcagcggcagcggcagcggccaggactacagcctgaccatcagcagcctggactacgaggacatgggcatctactactgcctgcagtacgacgagttccctctgaccttcggcgacggcaccaagctggagctgaagtacccatacgatgttccagattacgcttagtaactcgaggacggggtgaactacgcctgaggatccgatctttttccctctgccaaaaattatggggacatcatgaagccccttgagcatctgacttctggctaataaaggaaatttattttcattgcaatagtgtgttggaattttttgtgtctctcactcggcctaggtagataagtagcatggcgggttaatcattaactacaaggaacccctagtgatggagttggccactccctctctgcgcgctcgctcgctcactgaggccgggcgaccaaaggtcgcccgacgcccgggctttgcccgggcggcctcagtgagcgagcgagcgcgcag

SEQ ID NO: 2227 - DNA, 3124 bp, Artificial Sequence
  Description of Artificial Sequence: Synthetic polynucleotide
ctgcgcgctcgctcgctcactgaggccgcccgggcaaagcccgggcgtcgggcgacctttggtcgcccggcctcagtgagcgagcgagcgcgcagagagggagtggccaactccatcactaggggttccttgtagttaatgattaacccgccatgctacttatctaccagggtaatggggatcctctagaactatagctagtcgacataacgcgtctagttattaatagtaatcaattacggggtcattagttcatagcccatatatggagttccgcgttacataacttacggtaaatggcccgcctggctgaccgcccaacgacccccgcccattgacgtcaataatgacgtatgttcccatagtaacgccaatagggactttccattgacgtcaatgggtggagtatttacggtaaactgcccacttggcagtacatcaagtgtatcatatgccaagtacgccccctattgacgtcaatgacggtaaatggcccgcctggcattatgcccagtacatgaccttatgggactttcctacttggcagtacatctacgtattagtcatcgctattaccatggtcgaggtgagccccacgttctgcttcactctccccatctcccccccctccccacccccaattttgtatttatttattttttaattattttgtgcagcgatgggggcggggggggggggggggcgcgcgccaggcggggcggggcggggcgaggggcggggcggggcgaggcggagaggtgcggcggcagccaatcagagcggcgcgctccgaaagtttccttttatggcgaggcggcggcggcggcggccctataaaaagcgaagcgcgcggcgggcgggagtcgctgcgcgctgccttcgccccgtgccccgctccgccgccgcctcgcgccgcccgccccggctctgactgaccgcgttactcccacaggtgagcgggcgggacggcccttctcctccgggctgtaattagcgcttggtttaatgacggcttgtttcttttctgtggctgcgtgaaagccttgaggggctccgggagggccctttgtgcggggggagcggctcggggggtgcgtgcgtgtgtgtgtgcgtggggagcgccgcgtgcggctccgcgctgcccggcggctgtgagcgctgcgggcgcggcgcggggctttgtgcgctccgcagtgtgcgcgaggggagcgcggccgggggcggtgccccgcggtgcggggggggctgcgaggggaacaaaggctgcgtgcggggtgtgtgcgtgggggggtgagcagggggtgtgggcgcgtcggtcgggctgcaaccccccctgcacccccctccccgagttgctgagcacggcccggcttcgggtgcggggctccgtacggggcgtggcgcggggctcgccgtgccgggcggggggtggcggcaggtgggggtgccgggcggggcggggccgcctcgggccggggagggctcgggggaggggcgcggcggcccccggagcgccggcggctgtcgaggcgcggcgagccgcagccattgccttttatggtaatcgtgcgagagggcgcagggacttcctttgtcccaaatctgtgcggagccgaaatctgggaggcgccgccgcaccccctctagcgggcgcggggcgaagcggtgcggcgccggcaggaaggaaatgggcggggagggccttcgtgcgtcgccgcgccgccgtccccttctccctctccagcctcggggctgtccgcggggggacggctgccttcgggggggacggggcagggcggggttcggcttctggcgtgtgaccggcggctctagagcctctgctaaccatgttcatgccttcttctttttcctacagctcctgggcaacgtgctggttattgtgctgtctcatcattttggcaaagaattcgggattcgaaccggtgccgccaccatggccaccggcagcaggaccagcctgctgctggccttcggcctgctgtgcctgccctggctgcaggagggcagcgccgccgccgaggtgaagctggtggagagcggcggcgacctggtgaagcctggcggcagcctgaagctgagctgcgccgccagcggcttcaccttcagcagctacgccatgagctgggtgagacagaaccctgagaagagactggagtgggtggccagcatcagcaagggcggcaacacctactaccctaacagcgtgaagggcagattcaccatcagcagagacaacgccagaaacatcctgtacctgcagatgagcagcctgagaagcgaggacaccgccctgtactactgcgccagaggctggggcgactacggctggttcgcctactggggccaggtgaccctggtgaccgtgagcgccggtggtggtggatccggtggtggtggatccggtggtggtggatccgacatcaagatgacccagagccctagcagcatgtacgccagcctgggcgagagagtgaccatcacctgcaaggccagccaggacatcaacagatacctgaactggttccagcagaagcctggcaagagccctaagaccctgatctacagagccaacagactgctggacggcgtgcctagcagattcagcggcagcggcagcggccaggactacagcctgaccatcagcagcctggactacgaggacatgggcatctactactgcctgcagtacgacgagttccctctgaccttcggcgacggcaccaagctggagctgaagtacccatacgatgttccagattacgcttagtaactcgaggacggggtgaactacgcctgaggatccgatctttttccctctgccaaaaattatggggacatcatgaagccccttgagcatctgacttctggctaataaaggaaatttattttcattgcaatagtgtgttggaattttttgtgtctctcactcggcctaggtagataagtagcatggcgggttaatcattaactacaaggaacccctagtgatggagttggccactccctctctgcgcgctcgctcgctcactgaggccgggcgaccaaaggtcgcccgacgcccgggctttgcccgggcggcctcagtgagcgagcgagcgcgcag

SEQ ID NO: 2228 - DNA, 3109 bp, Artificial Sequence
  Description of Artificial Sequence: Synthetic polynucleotide
ctgcgcgctcgctcgctcactgaggccgcccgggcaaagcccgggcgtcgggcgacctttggtcgcccggcctcagtgagcgagcgagcgcgcagagagggagtggccaactccatcactaggggttccttgtagttaatgattaacccgccatgctacttatctaccagggtaatggggatcctctagaactatagctagtcgacataacgcgtctagttattaatagtaatcaattacggggtcattagttcatagcccatatatggagttccgcgttacataacttacggtaaatggcccgcctggctgaccgcccaacgacccccgcccattgacgtcaataatgacgtatgttcccatagtaacgccaatagggactttccattgacgtcaatgggtggagtatttacggtaaactgcccacttggcagtacatcaagtgtatcatatgccaagtacgccccctattgacgtcaatgacggtaaatggcccgcctggcattatgcccagtacatgaccttatgggactttcctacttggcagtacatctacgtattagtcatcgctattaccatggtcgaggtgagccccacgttctgcttcactctccccatctcccccccctccccacccccaattttgtatttatttattttttaattattttgtgcagcgatgggggcggggggggggggggggcgcgcgccaggcggggcggggcggggcgaggggcggggcggggcgaggcggagaggtgcggcggcagccaatcagagcggcgcgctccgaaagtttccttttatggcgaggcggcggcggcggcggccctataaaaagcgaagcgcgcggcgggcgggagtcgctgcgcgctgccttcgccccgtgccccgctccgccgccgcctcgcgccgcccgccccggctctgactgaccgcgttactcccacaggtgagcgggcgggacggcccttctcctccgggctgtaattagcgcttggtttaatgacggcttgtttcttttctgtggctgcgtgaaagccttgaggggctccgggagggccctttgtgcggggggagcggctcggggggtgcgtgcgtgtgtgtgtgcgtggggagcgccgcgtgcggctccgcgctgcccggcggctgtgagcgctgcgggcgcggcgcggggctttgtgcgctccgcagtgtgcgcgaggggagcgcggccgggggcggtgccccgcggtgcggggggggctgcgaggggaacaaaggctgcgtgcggggtgtgtgcgtgggggggtgagcagggggtgtgggcgcgtcggtcgggctgcaaccccccctgcacccccctccccgagttgctgagcacggcccggcttcgggtgcggggctccgtacggggcgtggcgcggggctcgccgtgccgggcggggggtggcggcaggtgggggtgccgggcggggcggggccgcctcgggccggggagggctcgggggaggggcgcggcggcccccggagcgccggcggctgtcgaggcgcggcgagccgcagccattgccttttatggtaatcgtgcgagagggcgcagggacttcctttgtcccaaatctgtgcggagccgaaatctgggaggcgccgccgcaccccctctagcgggcgcggggcgaagcggtgcggcgccggcaggaaggaaatgggcggggagggccttcgtgcgtcgccgcgccgccgtccccttctccctctccagcctcggggctgtccgcggggggacggctgccttcgggggggacggggcagggcggggttcggcttctggcgtgtgaccggcggctctagagcctctgctaaccatgttcatgccttcttctttttcctacagctcctgggcaacgtgctggttattgtgctgtctcatcattttggcaaagaattcgggattcgaaccggtgccgccaccatggagaccgacaccctgctgctgtgggtgctgctgctgtgggtgcccggcagcaccggcgacgccgccgaggtgaagctggtggagagcggcggcgacctggtgaagcctggcggcagcctgaagctgagctgcgccgccagcggcttcaccttcagcagctacgccatgagctgggtgagacagaaccctgagaagagactggagtgggtggccagcatcagcaagggcggcaacacctactaccctaacagcgtgaagggcagattcaccatcagcagagacaacgccagaaacatcctgtacctgcagatgagcagcctgagaagcgaggacaccgccctgtactactgcgccagaggctggggcgactacggctggttcgcctactggggccaggtgaccctggtgaccgtgagcgccggtggtggtggatccggtggtggtggatccggtggtggtggatccgacatcaagatgacccagagccctagcagcatgtacgccagcctgggcgagagagtgaccatcacctgcaaggccagccaggacatcaacagatacctgaactggttccagcagaagcctggcaagagccctaagaccctgatctacagagccaacagactgctggacggcgtgcctagcagattcagcggcagcggcagcggccaggactacagcctgaccatcagcagcctggactacgaggacatgggcatctactactgcctgcagtacgacgagttccctctgaccttcggcgacggcaccaagctggagctgaagtacccatacgatgttccagattacgcttagtaactcgaggacggggtgaactacgcctgaggatccgatctttttccctctgccaaaaattatggggacatcatgaagccccttgagcatctgacttctggctaataaaggaaatttattttcattgcaatagtgtgttggaattttttgtgtctctcactcggcctaggtagataagtagcatggcgggttaatcattaactacaaggaacccctagtgatggagttggccactccctctctgcgcgctcgctcgctcactgaggccgggcgaccaaaggtcgcccgacgcccgggctttgcccgggcggcctcagtgagcgagcgagcgcgcag

SEQ ID NO: 2229 - DNA, 3157 bp, Artificial Sequence
  Description of Artificial Sequence: Synthetic polynucleotide
ctgcgcgctcgctcgctcactgaggccgcccgggcaaagcccgggcgtcgggcgacctttggtcgcccggcctcagtgagcgagcgagcgcgcagagagggagtggccaactccatcactaggggttccttgtagttaatgattaacccgccatgctacttatctaccagggtaatggggatcctctagaactatagctagtcgacataacgcgtctagttattaatagtaatcaattacggggtcattagttcatagcccatatatggagttccgcgttacataacttacggtaaatggcccgcctggctgaccgcccaacgacccccgcccattgacgtcaataatgacgtatgttcccatagtaacgccaatagggactttccattgacgtcaatgggtggagtatttacggtaaactgcccacttggcagtacatcaagtgtatcatatgccaagtacgccccctattgacgtcaatgacggtaaatggcccgcctggcattatgcccagtacatgaccttatgggactttcctacttggcagtacatctacgtattagtcatcgctattaccatggtcgaggtgagccccacgttctgcttcactctccccatctcccccccctccccacccccaattttgtatttatttattttttaattattttgtgcagcgatgggggcggggggggggggggggcgcgcgccaggcggggcggggcggggcgaggggcggggcggggcgaggcggagaggtgcggcggcagccaatcagagcggcgcgctccgaaagtttccttttatggcgaggcggcggcggcggcggccctataaaaagcgaagcgcgcggcgggcgggagtcgctgcgcgctgccttcgccccgtgccccgctccgccgccgcctcgcgccgcccgccccggctctgactgaccgcgttactcccacaggtgagcgggcgggacggcccttctcctccgggctgtaattagcgcttggtttaatgacggcttgtttcttttctgtggctgcgtgaaagccttgaggggctccgggagggccctttgtgcggggggagcggctcggggggtgcgtgcgtgtgtgtgtgcgtggggagcgccgcgtgcggctccgcgctgcccggcggctgtgagcgctgcgggcgcggcgcggggctttgtgcgctccgcagtgtgcgcgaggggagcgcggccgggggcggtgccccgcggtgcggggggggctgcgaggggaacaaaggctgcgtgcggggtgtgtgcgtgggggggtgagcagggggtgtgggcgcgtcggtcgggctgcaaccccccctgcacccccctccccgagttgctgagcacggcccggcttcgggtgcggggctccgtacggggcgtggcgcggggctcgccgtgccgggcggggggtggcggcaggtgggggtgccgggcggggcggggccgcctcgggccggggagggctcgggggaggggcgcggcggcccccggagcgccggcggctgtcgaggcgcggcgagccgcagccattgccttttatggtaatcgtgcgagagggcgcagggacttcctttgtcccaaatctgtgcggagccgaaatctgggaggcgccgccgcaccccctctagcgggcgcggggcgaagcggtgcggcgccggcaggaaggaaatgggcggggagggccttcgtgcgtcgccgcgccgccgtccccttctccctctccagcctcggggctgtccgcggggggacggctgccttcgggggggacggggcagggcggggttcggcttctggcgtgtgaccggcggctctagagcctctgctaaccatgttcatgccttcttctttttcctacagctcctgggcaacgtgctggttattgtgctgtctcatcattttggcaaagaattcgggattcgaaccggtgccgccaccatgaacttcgggctcagcttgattttccttgtccttgttttaaaaggtgtccagtgtgacatcaagatgacccagagccctagcagcatgtacgccagcctgggcgagagagtgaccgaggtgaagctggtggagagcggcggcgacctggtgaagcctggcggcagcctgaagctgagctgcgccgccagcggcttcaccttcagcagctacgccatgagctgggtgagacagaaccctgagaagagactggagtgggtggccagcatcagcaagggcggcaacacctactaccctaacagcgtgaagggcagattcaccatcagcagagacaacgccagaaacatcctgtacctgcagatgagcagcctgagaagcgaggacaccgccctgtactactgcgccagaggctggggcgactacggctggttcgcctactggggccaggtgaccctggtgaccgtgagcgccggtggtggtggatccggtggtggtggatccggtggtggtggatccgacatcaagatgacccagagccctagcagcatgtacgccagcctgggcgagagagtgaccatcacctgcaaggccagccaggacatcaacagatacctgaactggttccagcagaagcctggcaagagccctaagaccctgatctacagagccaacagactgctggacggcgtgcctagcagattcagcggcagcggcagcggccaggactacagcctgaccatcagcagcctggactacgaggacatgggcatctactactgcctgcagtacgacgagttccctctgaccttcggcgacggcaccaagctggagctgaagtacccatacgatgttccagattacgcttagtaactcgaggacggggtgaactacgcctgaggatccgatctttttccctctgccaaaaattatggggacatcatgaagccccttgagcatctgacttctggctaataaaggaaatttattttcattgcaatagtgtgttggaattttttgtgtctctcactcggcctaggtagataagtagcatggcgggttaatcattaactacaaggaacccctagtgatggagttggccactccctctctgcgcgctcgctcgctcactgaggccgggcgaccaaaggtcgcccgacgcccgggctttgcccgggcggcctcagtgagcgagcgagcgcgcag

SEQ ID NO: 2230 - DNA, 3760 bp, Artificial Sequence
  Description of Artificial Sequence: Synthetic polynucleotide
ctgcgcgctcgctcgctcactgaggccgcccgggcaaagcccgggcgtcgggcgacctttggtcgcccggcctcagtgagcgagcgagcgcgcagagagggagtggccaactccatcactaggggttccttgtagttaatgattaacccgccatgctacttatctaccagggtaatggggatcctctagaactatagctagtcgacataacgcgtctagttattaatagtaatcaattacggggtcattagttcatagcccatatatggagttccgcgttacataacttacggtaaatggcccgcctggctgaccgcccaacgacccccgcccattgacgtcaataatgacgtatgttcccatagtaacgccaatagggactttccattgacgtcaatgggtggagtatttacggtaaactgcccacttggcagtacatcaagtgtatcatatgccaagtacgccccctattgacgtcaatgacggtaaatggcccgcctggcattatgcccagtacatgaccttatgggactttcctacttggcagtacatctacgtattagtcatcgctattaccatggtcgaggtgagccccacgttctgcttcactctccccatctcccccccctccccacccccaattttgtatttatttattttttaattattttgtgcagcgatgggggcggggggggggggggggcgcgcgccaggcggggcggggcggggcgaggggcggggcggggcgaggcggagaggtgcggcggcagccaatcagagcggcgcgctccgaaagtttccttttatggcgaggcggcggcggcggcggccctataaaaagcgaagcgcgcggcgggcgggagtcgctgcgcgctgccttcgccccgtgccccgctccgccgccgcctcgcgccgcccgccccggctctgactgaccgcgttactcccacaggtgagcgggcgggacggcccttctcctccgggctgtaattagcgcttggtttaatgacggcttgtttcttttctgtggctgcgtgaaagccttgaggggctccgggagggccctttgtgcggggggagcggctcggggggtgcgtgcgtgtgtgtgtgcgtggggagcgccgcgtgcggctccgcgctgcccggcggctgtgagcgctgcgggcgcggcgcggggctttgtgcgctccgcagtgtgcgcgaggggagcgcggccgggggcggtgccccgcggtgcggggggggctgcgaggggaacaaaggctgcgtgcggggtgtgtgcgtgggggggtgagcagggggtgtgggcgcgtcggtcgggctgcaaccccccctgcacccccctccccgagttgctgagcacggcccggcttcgggtgcggggctccgtacggggcgtggcgcggggctcgccgtgccgggcggggggtggcggcaggtgggggtgccgggcggggcggggccgcctcgggccggggagggctcgggggaggggcgcggcggcccccggagcgccggcggctgtcgaggcgcggcgagccgcagccattgccttttatggtaatcgtgcgagagggcgcagggacttcctttgtcccaaatctgtgcggagccgaaatctgggaggcgccgccgcaccccctctagcgggcgcggggcgaagcggtgcggcgccggcaggaaggaaatgggcggggagggccttcgtgcgtcgccgcgccgccgtccccttctccctctccagcctcggggctgtccgcggggggacggctgccttcgggggggacggggcagggcggggttcggcttctggcgtgtgaccggcggctctagagcctctgctaaccatgttcatgccttcttctttttcctacagctcctgggcaacgtgctggttattgtgctgtctcatcattttggcaaagaattcgggattcgaaccggtgccgccaccatgaacttcgggctcagcttgattttccttgtccttgttttaaaaggtgtccagtgtgaggtgaagctggtggagagcggcggcgacctggtgaagcctggcggcagcctgaagctgagctgcgccgccagcggcttcaccttcagcagctacgccatgagctgggtgagacagaaccctgagaagagactggagtgggtggccagcatcagcaagggcggcaacacctactaccctaacagcgtgaagggcagattcaccatcagcagagacaacgccagaaacatcctgtacctgcagatgagcagcctgagaagcgaggacaccgccctgtactactgcgccagaggctggggcgactacggctggttcgcctactggggccaggtgaccctggtgaccgtgagcgccgccaaaacgacacccccatctgtctatccactggcccctggatctgctgcccaaactaactccatggtgaccctgggatgcctggtcaagggctatttccctgagccagtgacagtgacctggaactctggatccctgtccagcggtgtgcacaccttcccagctgtcctgcagtctgacctctacactctgagcagctcagtgactgtcccctccagcacctggcccagcgagaccgtcacctgcaacgttgcccacccggccagcagcaccaaggtggacaagaaaattagaaagaggcgagagggcagaggaagtcttctaacatgcggtgacgtggaggagaatcccggccctatgaagttgcctgttaggctgttggtgctgatgttctggattcctgcttccagcagtgacatcaagatgacccagagccctagcagcatgtacgccagcctgggcgagagagtgaccatcacctgcaaggccagccaggacatcaacagatacctgaactggttccagcagaagcctggcaagagccctaagaccctgatctacagagccaacagactgctggacggcgtgcctagcagattcagcggcagcggcagcggccaggactacagcctgaccatcagcagcctggactacgaggacatgggcatctactactgcctgcagtacgacgagttccctctgaccttcggcgacggcaccaagctggagctgaagcgggctgatgctgcaccaactgtatccatcttcccaccatccagtgagcagttaacatctggaggtgcctcagtcgtgtgcttcttgaacaacttctaccccaaagacatcaatgtcaagtggaagattgatggcagtgaacgacaaaatggcgtcctgaacagttggactgatcaggacagcaaagacagcacctacagcatgagcagcaccctcacgttgaccaaggacgagtatgaacgacataacagctatacctgtgaggccactcacaagacatcaacttcacccattgtcaagagcttcaacaggaatgagtgttagtaactcgaggacggggtgaactacgcctgaggatccgatctttttccctctgccaaaaattatggggacatcatgaagccccttgagcatctgacttctggctaataaaggaaatttattttcattgcaatagtgtgttggaattttttgtgtctctcactcggcctaggtagataagtagcatggcgggttaatcattaactacaaggaacccctagtgatggagttggccactccctctctgcgcgctcgctcgctcactgaggccgggcgaccaaaggtcgcccgacgcccgggctttgcccgggcggcctcagtgagcgagcgagcgcgcag

SEQ ID NO: 2231 - DNA, 3781 bp, Artificial Sequence
  Description of Artificial Sequence: Synthetic polynucleotide
ctgcgcgctcgctcgctcactgaggccgcccgggcaaagcccgggcgtcgggcgacctttggtcgcccggcctcagtgagcgagcgagcgcgcagagagggagtggccaactccatcactaggggttccttgtagttaatgattaacccgccatgctacttatctaccagggtaatggggatcctctagaactatagctagtcgacataacgcgtctagttattaatagtaatcaattacggggtcattagttcatagcccatatatggagttccgcgttacataacttacggtaaatggcccgcctggctgaccgcccaacgacccccgcccattgacgtcaataatgacgtatgttcccatagtaacgccaatagggactttccattgacgtcaatgggtggagtatttacggtaaactgcccacttggcagtacatcaagtgtatcatatgccaagtacgccccctattgacgtcaatgacggtaaatggcccgcctggcattatgcccagtacatgaccttatgggactttcctacttggcagtacatctacgtattagtcatcgctattaccatggtcgaggtgagccccacgttctgcttcactctccccatctcccccccctccccacccccaattttgtatttatttattttttaattattttgtgcagcgatgggggcggggggggggggggggcgcgcgccaggcggggcggggcggggcgaggggcggggcggggcgaggcggagaggtgcggcggcagccaatcagagcggcgcgctccgaaagtttccttttatggcgaggcggcggcggcggcggccctataaaaagcgaagcgcgcggcgggcgggagtcgctgcgcgctgccttcgccccgtgccccgctccgccgccgcctcgcgccgcccgccccggctctgactgaccgcgttactcccacaggtgagcgggcgggacggcccttctcctccgggctgtaattagcgcttggtttaatgacggcttgtttcttttctgtggctgcgtgaaagccttgaggggctccgggagggccctttgtgcggggggagcggctcggggggtgcgtgcgtgtgtgtgtgcgtggggagcgccgcgtgcggctccgcgctgcccggcggctgtgagcgctgcgggcgcggcgcggggctttgtgcgctccgcagtgtgcgcgaggggagcgcggccgggggcggtgccccgcggtgcggggggggctgcgaggggaacaaaggctgcgtgcggggtgtgtgcgtgggggggtgagcagggggtgtgggcgcgtcggtcgggctgcaaccccccctgcacccccctccccgagttgctgagcacggcccggcttcgggtgcggggctccgtacggggcgtggcgcggggctcgccgtgccgggcggggggtggcggcaggtgggggtgccgggcggggcggggccgcctcgggccggggagggctcgggggaggggcgcggcggcccccggagcgccggcggctgtcgaggcgcggcgagccgcagccattgccttttatggtaatcgtgcgagagggcgcagggacttcctttgtcccaaatctgtgcggagccgaaatctgggaggcgccgccgcaccccctctagcgggcgcggggcgaagcggtgcggcgccggcaggaaggaaatgggcggggagggccttcgtgcgtcgccgcgccgccgtccccttctccctctccagcctcggggctgtccgcggggggacggctgccttcgggggggacggggcagggcggggttcggcttctggcgtgtgaccggcggctctagagcctctgctaaccatgttcatgccttcttctttttcctacagctcctgggcaacgtgctggttattgtgctgtctcatcattttggcaaagaattcgggattcgaaccggtgccgccaccatgaacttcgggctcagcttgattttccttgtccttgttttaaaaggtgtccagtgtgaggtgaagctggtggagagcggcggcgacctggtgaagcctggcggcagcctgaagctgagctgcgccgccagcggcttcaccttcagcagctacgccatgagctgggtgagacagaaccctgagaagagactggagtgggtggccagcatcagcaagggcggcaacacctactaccctaacagcgtgaagggcagattcaccatcagcagagacaacgccagaaacatcctgtacctgcagatgagcagcctgagaagcgaggacaccgccctgtactactgcgccagaggctggggcgactacggctggttcgcctactggggccaggtgaccctggtgaccgtgagcgccgccaaaacgacacccccatctgtctatccactggcccctggatctgctgcccaaactaactccatggtgaccctgggatgcctggtcaagggctatttccctgagccagtgacagtgacctggaactctggatccctgtccagcggtgtgcacaccttcccagctgtcctgcagtctgacctctacactctgagcagctcagtgactgtcccctccagcacctggcccagcgagaccgtcacctgcaacgttgcccacccggccagcagcaccaaggtggacaagaaaattcgggccaagcggggaagcggagtgaaacagactttgaattttgaccttctcaagttggcgggagacgtggagtccaaccctggacctatgaagttgcctgttaggctgttggtgctgatgttctggattcctgcttccagcagtgacatcaagatgacccagagccctagcagcatgtacgccagcctgggcgagagagtgaccatcacctgcaaggccagccaggacatcaacagatacctgaactggttccagcagaagcctggcaagagccctaagaccctgatctacagagccaacagactgctggacggcgtgcctagcagattcagcggcagcggcagcggccaggactacagcctgaccatcagcagcctggactacgaggacatgggcatctactactgcctgcagtacgacgagttccctctgaccttcggcgacggcaccaagctggagctgaagcgggctgatgctgcaccaactgtatccatcttcccaccatccagtgagcagttaacatctggaggtgcctcagtcgtgtgcttcttgaacaacttctaccccaaagacatcaatgtcaagtggaagattgatggcagtgaacgacaaaatggcgtcctgaacagttggactgatcaggacagcaaagacagcacctacagcatgagcagcaccctcacgttgaccaaggacgagtatgaacgacataacagctatacctgtgaggccactcacaagacatcaacttcacccattgtcaagagcttcaacaggaatgagtgttagtaactcgaggacggggtgaactacgcctgaggatccgatctttttccctctgccaaaaattatggggacatcatgaagccccttgagcatctgacttctggctaataaaggaaatttattttcattgcaatagtgtgttggaattttttgtgtctctcactcggcctaggtagataagtagcatggcgggttaatcattaactacaaggaacccctagtgatggagttggccactccctctctgcgcgctcgctcgctcactgaggccgggcgaccaaaggtcgcccgacgcccgggctttgcccgggcggcctcagtgagcgagcgagcgcgcag

SEQ ID NO: 2232 - DNA, 3778 bp, Artificial Sequence
  Description of Artificial Sequence: Synthetic polynucleotide
ctgcgcgctcgctcgctcactgaggccgcccgggcaaagcccgggcgtcgggcgacctttggtcgcccggcctcagtgagcgagcgagcgcgcagagagggagtggccaactccatcactaggggttccttgtagttaatgattaacccgccatgctacttatctaccagggtaatggggatcctctagaactatagctagtcgacataacgcgtctagttattaatagtaatcaattacggggtcattagttcatagcccatatatggagttccgcgttacataacttacggtaaatggcccgcctggctgaccgcccaacgacccccgcccattgacgtcaataatgacgtatgttcccatagtaacgccaatagggactttccattgacgtcaatgggtggagtatttacggtaaactgcccacttggcagtacatcaagtgtatcatatgccaagtacgccccctattgacgtcaatgacggtaaatggcccgcctggcattatgcccagtacatgaccttatgggactttcctacttggcagtacatctacgtattagtcatcgctattaccatggtcgaggtgagccccacgttctgcttcactctccccatctcccccccctccccacccccaattttgtatttatttattttttaattattttgtgcagcgatgggggcggggggggggggggggcgcgcgccaggcggggcggggcggggcgaggggcggggcggggcgaggcggagaggtgcggcggcagccaatcagagcggcgcgctccgaaagtttccttttatggcgaggcggcggcggcggcggccctataaaaagcgaagcgcgcggcgggcgggagtcgctgcgcgctgccttcgccccgtgccccgctccgccgccgcctcgcgccgcccgccccggctctgactgaccgcgttactcccacaggtgagcgggcgggacggcccttctcctccgggctgtaattagcgcttggtttaatgacggcttgtttcttttctgtggctgcgtgaaagccttgaggggctccgggagggccctttgtgcggggggagcggctcggggggtgcgtgcgtgtgtgtgtgcgtggggagcgccgcgtgcggctccgcgctgcccggcggctgtgagcgctgcgggcgcggcgcggggctttgtgcgctccgcagtgtgcgcgaggggagcgcggccgggggcggtgccccgcggtgcggggggggctgcgaggggaacaaaggctgcgtgcggggtgtgtgcgtgggggggtgagcagggggtgtgggcgcgtcggtcgggctgcaaccccccctgcacccccctccccgagttgctgagcacggcccggcttcgggtgcggggctccgtacggggcgtggcgcggggctcgccgtgccgggcggggggtggcggcaggtgggggtgccgggcggggcggggccgcctcgggccggggagggctcgggggaggggcgcggcggcccccggagcgccggcggctgtcgaggcgcggcgagccgcagccattgccttttatggtaatcgtgcgagagggcgcagggacttcctttgtcccaaatctgtgcggagccgaaatctgggaggcgccgccgcaccccctctagcgggcgcggggcgaagcggtgcggcgccggcaggaaggaaatgggcggggagggccttcgtgcgtcgccgcgccgccgtccccttctccctctccagcctcggggctgtccgcggggggacggctgccttcgggggggacggggcagggcggggttcggcttctggcgtgtgaccggcggctctagagcctctgctaaccatgttcatgccttcttctttttcctacagctcctgggcaacgtgctggttattgtgctgtctcatcattttggcaaagaattcgggattcgaaccggtgccgccaccatgaacttcgggctcagcttgattttccttgtccttgttttaaaaggtgtccagtgtgaggtgaagctggtggagagcggcggcgacctggtgaagcctggcggcagcctgaagctgagctgcgccgccagcggcttcaccttcagcagctacgccatgagctgggtgagacagaaccctgagaagagactggagtgggtggccagcatcagcaagggcggcaacacctactaccctaacagcgtgaagggcagattcaccatcagcagagacaacgccagaaacatcctgtacctgcagatgagcagcctgagaagcgaggacaccgccctgtactactgcgccagaggctggggcgactacggctggttcgcctactggggccaggtgaccctggtgaccgtgagcgccgccaaaacgacacccccatctgtctatccactggcccctggatctgctgcccaaactaactccatggtgaccctgggatgcctggtcaagggctatttccctgagccagtgacagtgacctggaactctggatccctgtccagcggtgtgcacaccttcccagctgtcctgcagtctgacctctacactctgagcagctcagtgactgtcccctccagcacctggcccagcgagaccgtcacctgcaacgttgcccacccggccagcagcaccaaggtggacaagaaaattgtgcccagggattgtggtagaaagaggcgagagggcagaggaagtcttctaacatgcggtgacgtggaggagaatcccggccctatgaagttgcctgttaggctgttggtgctgatgttctggattcctgcttccagcagtgacatcaagatgacccagagccctagcagcatgtacgccagcctgggcgagagagtgaccatcacctgcaaggccagccaggacatcaacagatacctgaactggttccagcagaagcctggcaagagccctaagaccctgatctacagagccaacagactgctggacggcgtgcctagcagattcagcggcagcggcagcggccaggactacagcctgaccatcagcagcctggactacgaggacatgggcatctactactgcctgcagtacgacgagttccctctgaccttcggcgacggcaccaagctggagctgaagcgggctgatgctgcaccaactgtatccatcttcccaccatccagtgagcagttaacatctggaggtgcctcagtcgtgtgcttcttgaacaacttctaccccaaagacatcaatgtcaagtggaagattgatggcagtgaacgacaaaatggcgtcctgaacagttggactgatcaggacagcaaagacagcacctacagcatgagcagcaccctcacgttgaccaaggacgagtatgaacgacataacagctatacctgtgaggccactcacaagacatcaacttcacccattgtcaagagcttcaacaggaatgagtgttagtaactcgaggacggggtgaactacgcctgaggatccgatctttttccctctgccaaaaattatggggacatcatgaagccccttgagcatctgacttctggctaataaaggaaatttattttcattgcaatagtgtgttggaattttttgtgtctctcactcggcctaggtagataagtagcatggcgggttaatcattaactacaaggaacccctagtgatggagttggccactccctctctgcgcgctcgctcgctcactgaggccgggcgaccaaaggtcgcccgacgcccgggctttgcccgggcggcctcagtgagcgagcgagcgcgcag

SEQ ID NO: 2233 - DNA, 3748 bp, Artificial Sequence
  Description of Artificial Sequence: Synthetic polynucleotide
ctgcgcgctcgctcgctcactgaggccgcccgggcaaagcccgggcgtcgggcgacctttggtcgcccggcctcagtgagcgagcgagcgcgcagagagggagtggccaactccatcactaggggttccttgtagttaatgattaacccgccatgctacttatctaccagggtaatggggatcctctagaactatagctagtcgacataacgcgtctagttattaatagtaatcaattacggggtcattagttcatagcccatatatggagttccgcgttacataacttacggtaaatggcccgcctggctgaccgcccaacgacccccgcccattgacgtcaataatgacgtatgttcccatagtaacgccaatagggactttccattgacgtcaatgggtggagtatttacggtaaactgcccacttggcagtacatcaagtgtatcatatgccaagtacgccccctattgacgtcaatgacggtaaatggcccgcctggcattatgcccagtacatgaccttatgggactttcctacttggcagtacatctacgtattagtcatcgctattaccatggtcgaggtgagccccacgttctgcttcactctccccatctcccccccctccccacccccaattttgtatttatttattttttaattattttgtgcagcgatgggggcggggggggggggggggcgcgcgccaggcggggcggggcggggcgaggggcggggcggggcgaggcggagaggtgcggcggcagccaatcagagcggcgcgctccgaaagtttccttttatggcgaggcggcggcggcggcggccctataaaaagcgaagcgcgcggcgggcgggagtcgctgcgcgctgccttcgccccgtgccccgctccgccgccgcctcgcgccgcccgccccggctctgactgaccgcgttactcccacaggtgagcgggcgggacggcccttctcctccgggctgtaattagcgcttggtttaatgacggcttgtttcttttctgtggctgcgtgaaagccttgaggggctccgggagggccctttgtgcggggggagcggctcggggggtgcgtgcgtgtgtgtgtgcgtggggagcgccgcgtgcggctccgcgctgcccggcggctgtgagcgctgcgggcgcggcgcggggctttgtgcgctccgcagtgtgcgcgaggggagcgcggccgggggcggtgccccgcggtgcggggggggctgcgaggggaacaaaggctgcgtgcggggtgtgtgcgtgggggggtgagcagggggtgtgggcgcgtcggtcgggctgcaaccccccctgcacccccctccccgagttgctgagcacggcccggcttcgggtgcggggctccgtacggggcgtggcgcggggctcgccgtgccgggcggggggtggcggcaggtgggggtgccgggcggggcggggccgcctcgggccggggagggctcgggggaggggcgcggcggcccccggagcgccggcggctgtcgaggcgcggcgagccgcagccattgccttttatggtaatcgtgcgagagggcgcagggacttcctttgtcccaaatctgtgcggagccgaaatctgggaggcgccgccgcaccccctctagcgggcgcggggcgaagcggtgcggcgccggcaggaaggaaatgggcggggagggccttcgtgcgtcgccgcgccgccgtccccttctccctctccagcctcggggctgtccgcggggggacggctgccttcgggggggacggggcagggcggggttcggcttctggcgtgtgaccggcggctctagagcctctgctaaccatgttcatgccttcttctttttcctacagctcctgggcaacgtgctggttattgtgctgtctcatcattttggcaaagaattcgggattcgaaccggtgccgccaccatgaagttgcctgttaggctgttggtgctgatgttctggattcctgcttccagcagtgacatcaagatgacccagagccctagcagcatgtacgccagcctgggcgagagagtgaccatcacctgcaaggccagccaggacatcaacagatacctgaactggttccagcagaagcctggcaagagccctaagaccctgatctacagagccaacagactgctggacggcgtgcctagcagattcagcggcagcggcagcggccaggactacagcctgaccatcagcagcctggactacgaggacatgggcatctactactgcctgcagtacgacgagttccctctgaccttcggcgacggcaccaagctggagctgaagcgggctgatgctgcaccaactgtatccatcttcccaccatccagtgagcagttaacatctggaggtgcctcagtcgtgtgcttcttgaacaacttctaccccaaagacatcaatgtcaagtggaagattgatggcagtgaacgacaaaatggcgtcctgaacagttggactgatcaggacagcaaagacagcacctacagcatgagcagcaccctcacgttgaccaaggacgagtatgaacgacataacagctatacctgtgaggccactcacaagacatcaacttcacccattgtcaagagcttcaacaggaatgagtgtgagggcagaggaagtcttctaacatgcggtgacgtggaggagaatcccggccctatgaacttcgggctcagcttgattttccttgtccttgttttaaaaggtgtccagtgtgaggtgaagctggtggagagcggcggcgacctggtgaagcctggcggcagcctgaagctgagctgcgccgccagcggcttcaccttcagcagctacgccatgagctgggtgagacagaaccctgagaagagactggagtgggtggccagcatcagcaagggcggcaacacctactaccctaacagcgtgaagggcagattcaccatcagcagagacaacgccagaaacatcctgtacctgcagatgagcagcctgagaagcgaggacaccgccctgtactactgcgccagaggctggggcgactacggctggttcgcctactggggccaggtgaccctggtgaccgtgagcgccgccaaaacgacacccccatctgtctatccactggcccctggatctgctgcccaaactaactccatggtgaccctgggatgcctggtcaagggctatttccctgagccagtgacagtgacctggaactctggatccctgtccagcggtgtgcacaccttcccagctgtcctgcagtctgacctctacactctgagcagctcagtgactgtcccctccagcacctggcccagcgagaccgtcacctgcaacgttgcccacccggccagcagcaccaaggtggacaagaaaatttagtaactcgaggacggggtgaactacgcctgaggatccgatctttttccctctgccaaaaattatggggacatcatgaagccccttgagcatctgacttctggctaataaaggaaatttattttcattgcaatagtgtgttggaattttttgtgtctctcactcggcctaggtagataagtagcatggcgggttaatcattaactacaaggaacccctagtgatggagttggccactccctctctgcgcgctcgctcgctcactgaggccgggcgaccaaaggtcgcccgacgcccgggctttgcccgggcggcctcagtgagcgagcgagcgcgcag

SEQ ID NO: 2234 - DNA, 3769 bp, Artificial Sequence
  Description of Artificial Sequence: Synthetic polynucleotide
ctgcgcgctcgctcgctcactgaggccgcccgggcaaagcccgggcgtcgggcgacctttggtcgcccggcctcagtgagcgagcgagcgcgcagagagggagtggccaactccatcactaggggttccttgtagttaatgattaacccgccatgctacttatctaccagggtaatggggatcctctagaactatagctagtcgacataacgcgtctagttattaatagtaatcaattacggggtcattagttcatagcccatatatggagttccgcgttacataacttacggtaaatggcccgcctggctgaccgcccaacgacccccgcccattgacgtcaataatgacgtatgttcccatagtaacgccaatagggactttccattgacgtcaatgggtggagtatttacggtaaactgcccacttggcagtacatcaagtgtatcatatgccaagtacgccccctattgacgtcaatgacggtaaatggcccgcctggcattatgcccagtacatgaccttatgggactttcctacttggcagtacatctacgtattagtcatcgctattaccatggtcgaggtgagccccacgttctgcttcactctccccatctcccccccctccccacccccaattttgtatttatttattttttaattattttgtgcagcgatgggggcggggggggggggggggcgcgcgccaggcggggcggggcggggcgaggggcggggcggggcgaggcggagaggtgcggcggcagccaatcagagcggcgcgctccgaaagtttccttttatggcgaggcggcggcggcggcggccctataaaaagcgaagcgcgcggcgggcgggagtcgctgcgcgctgccttcgccccgtgccccgctccgccgccgcctcgcgccgcccgccccggctctgactgaccgcgttactcccacaggtgagcgggcgggacggcccttctcctccgggctgtaattagcgcttggtttaatgacggcttgtttcttttctgtggctgcgtgaaagccttgaggggctccgggagggccctttgtgcggggggagcggctcggggggtgcgtgcgtgtgtgtgtgcgtggggagcgccgcgtgcggctccgcgctgcccggcggctgtgagcgctgcgggcgcggcgcggggctttgtgcgctccgcagtgtgcgcgaggggagcgcggccgggggcggtgccccgcggtgcggggggggctgcgaggggaacaaaggctgcgtgcggggtgtgtgcgtgggggggtgagcagggggtgtgggcgcgtcggtcgggctgcaaccccccctgcacccccctccccgagttgctgagcacggcccggcttcgggtgcggggctccgtacggggcgtggcgcggggctcgccgtgccgggcggggggtggcggcaggtgggggtgccgggcggggcggggccgcctcgggccggggagggctcgggggaggggcgcggcggcccccggagcgccggcggctgtcgaggcgcggcgagccgcagccattgccttttatggtaatcgtgcgagagggcgcagggacttcctttgtcccaaatctgtgcggagccgaaatctgggaggcgccgccgcaccccctctagcgggcgcggggcgaagcggtgcggcgccggcaggaaggaaatgggcggggagggccttcgtgcgtcgccgcgccgccgtccccttctccctctccagcctcggggctgtccgcggggggacggctgccttcgggggggacggggcagggcggggttcggcttctggcgtgtgaccggcggctctagagcctctgctaaccatgttcatgccttcttctttttcctacagctcctgggcaacgtgctggttattgtgctgtctcatcattttggcaaagaattcgggattcgaaccggtgccgccaccatgaagttgcctgttaggctgttggtgctgatgttctggattcctgcttccagcagtgacatcaagatgacccagagccctagcagcatgtacgccagcctgggcgagagagtgaccatcacctgcaaggccagccaggacatcaacagatacctgaactggttccagcagaagcctggcaagagccctaagaccctgatctacagagccaacagactgctggacggcgtgcctagcagattcagcggcagcggcagcggccaggactacagcctgaccatcagcagcctggactacgaggacatgggcatctactactgcctgcagtacgacgagttccctctgaccttcggcgacggcaccaagctggagctgaagcgggctgatgctgcaccaactgtatccatcttcccaccatccagtgagcagttaacatctggaggtgcctcagtcgtgtgcttcttgaacaacttctaccccaaagacatcaatgtcaagtggaagattgatggcagtgaacgacaaaatggcgtcctgaacagttggactgatcaggacagcaaagacagcacctacagcatgagcagcaccctcacgttgaccaaggacgagtatgaacgacataacagctatacctgtgaggccactcacaagacatcaacttcacccattgtcaagagcttcaacaggaatgagtgtggaagcggagtgaaacagactttgaattttgaccttctcaagttggcgggagacgtggagtccaaccctggacctatgaacttcgggctcagcttgattttccttgtccttgttttaaaaggtgtccagtgtgaggtgaagctggtggagagcggcggcgacctggtgaagcctggcggcagcctgaagctgagctgcgccgccagcggcttcaccttcagcagctacgccatgagctgggtgagacagaaccctgagaagagactggagtgggtggccagcatcagcaagggcggcaacacctactaccctaacagcgtgaagggcagattcaccatcagcagagacaacgccagaaacatcctgtacctgcagatgagcagcctgagaagcgaggacaccgccctgtactactgcgccagaggctggggcgactacggctggttcgcctactggggccaggtgaccctggtgaccgtgagcgccgccaaaacgacacccccatctgtctatccactggcccctggatctgctgcccaaactaactccatggtgaccctgggatgcctggtcaagggctatttccctgagccagtgacagtgacctggaactctggatccctgtccagcggtgtgcacaccttcccagctgtcctgcagtctgacctctacactctgagcagctcagtgactgtcccctccagcacctggcccagcgagaccgtcacctgcaacgttgcccacccggccagcagcaccaaggtggacaagaaaatttagtaactcgaggacggggtgaactacgcctgaggatccgatctttttccctctgccaaaaattatggggacatcatgaagccccttgagcatctgacttctggctaataaaggaaatttattttcattgcaatagtgtgttggaattttttgtgtctctcactcggcctaggtagataagtagcatggcgggttaatcattaactacaaggaacccctagtgatggagttggccactccctctctgcgcgctcgctcgctcactgaggccgggcgaccaaaggtcgcccgacgcccgggctttgcccgggcggcctcagtgagcgagcgagcgcgcag

SEQ ID NO: 2235 - DNA, 3766 bp, Artificial Sequence
  Description of Artificial Sequence: Synthetic polynucleotide
ctgcgcgctcgctcgctcactgaggccgcccgggcaaagcccgggcgtcgggcgacctttggtcgcccggcctcagtgagcgagcgagcgcgcagagagggagtggccaactccatcactaggggttccttgtagttaatgattaacccgccatgctacttatctaccagggtaatggggatcctctagaactatagctagtcgacataacgcgtctagttattaatagtaatcaattacggggtcattagttcatagcccatatatggagttccgcgttacataacttacggtaaatggcccgcctggctgaccgcccaacgacccccgcccattgacgtcaataatgacgtatgttcccatagtaacgccaatagggactttccattgacgtcaatgggtggagtatttacggtaaactgcccacttggcagtacatcaagtgtatcatatgccaagtacgccccctattgacgtcaatgacggtaaatggcccgcctggcattatgcccagtacatgaccttatgggactttcctacttggcagtacatctacgtattagtcatcgctattaccatggtcgaggtgagccccacgttctgcttcactctccccatctcccccccctccccacccccaattttgtatttatttattttttaattattttgtgcagcgatgggggcggggggggggggggggcgcgcgccaggcggggcggggcggggcgaggggcggggcggggcgaggcggagaggtgcggcggcagccaatcagagcggcgcgctccgaaagtttccttttatggcgaggcggcggcggcggcggccctataaaaagcgaagcgcgcggcgggcgggagtcgctgcgcgctgccttcgccccgtgccccgctccgccgccgcctcgcgccgcccgccccggctctgactgaccgcgttactcccacaggtgagcgggcgggacggcccttctcctccgggctgtaattagcgcttggtttaatgacggcttgtttcttttctgtggctgcgtgaaagccttgaggggctccgggagggccctttgtgcggggggagcggctcggggggtgcgtgcgtgtgtgtgtgcgtggggagcgccgcgtgcggctccgcgctgcccggcggctgtgagcgctgcgggcgcggcgcggggctttgtgcgctccgcagtgtgcgcgaggggagcgcggccgggggcggtgccccgcggtgcggggggggctgcgaggggaacaaaggctgcgtgcggggtgtgtgcgtgggggggtgagcagggggtgtgggcgcgtcggtcgggctgcaaccccccctgcacccccctccccgagttgctgagcacggcccggcttcgggtgcggggctccgtacggggcgtggcgcggggctcgccgtgccgggcggggggtggcggcaggtgggggtgccgggcggggcggggccgcctcgggccggggagggctcgggggaggggcgcggcggcccccggagcgccggcggctgtcgaggcgcggcgagccgcagccattgccttttatggtaatcgtgcgagagggcgcagggacttcctttgtcccaaatctgtgcggagccgaaatctgggaggcgccgccgcaccccctctagcgggcgcggggcgaagcggtgcggcgccggcaggaaggaaatgggcggggagggccttcgtgcgtcgccgcgccgccgtccccttctccctctccagcctcggggctgtccgcggggggacggctgccttcgggggggacggggcagggcggggttcggcttctggcgtgtgaccggcggctctagagcctctgctaaccatgttcatgccttcttctttttcctacagctcctgggcaacgtgctggttattgtgctgtctcatcattttggcaaagaattcgggattcgaaccggtgccgccaccatgaagttgcctgttaggctgttggtgctgatgttctggattcctgcttccagcagtgacatcaagatgacccagagccctagcagcatgtacgccagcctgggcgagagagtgaccatcacctgcaaggccagccaggacatcaacagatacctgaactggttccagcagaagcctggcaagagccctaagaccctgatctacagagccaacagactgctggacggcgtgcctagcagattcagcggcagcggcagcggccaggactacagcctgaccatcagcagcctggactacgaggacatgggcatctactactgcctgcagtacgacgagttccctctgaccttcggcgacggcaccaagctggagctgaagcgggctgatgctgcaccaactgtatccatcttcccaccatccagtgagcagttaacatctggaggtgcctcagtcgtgtgcttcttgaacaacttctaccccaaagacatcaatgtcaagtggaagattgatggcagtgaacgacaaaatggcgtcctgaacagttggactgatcaggacagcaaagacagcacctacagcatgagcagcaccctcacgttgaccaaggacgagtatgaacgacataacagctatacctgtgaggccactcacaagacatcaacttcacccattgtcaagagcttcaacaggaatgagtgtgagggcagaggaagtcttctaacatgcggtgacgtggaggagaatcccggccctatgaacttcgggctcagcttgattttccttgtccttgttttaaaaggtgtccagtgtgaggtgaagctggtggagagcggcggcgacctggtgaagcctggcggcagcctgaagctgagctgcgccgccagcggcttcaccttcagcagctacgccatgagctgggtgagacagaaccctgagaagagactggagtgggtggccagcatcagcaagggcggcaacacctactaccctaacagcgtgaagggcagattcaccatcagcagagacaacgccagaaacatcctgtacctgcagatgagcagcctgagaagcgaggacaccgccctgtactactgcgccagaggctggggcgactacggctggttcgcctactggggccaggtgaccctggtgaccgtgagcgccgccaaaacgacacccccatctgtctatccactggcccctggatctgctgcccaaactaactccatggtgaccctgggatgcctggtcaagggctatttccctgagccagtgacagtgacctggaactctggatccctgtccagcggtgtgcacaccttcccagctgtcctgcagtctgacctctacactctgagcagctcagtgactgtcccctccagcacctggcccagcgagaccgtcacctgcaacgttgcccacccggccagcagcaccaaggtggacaagaaaattgtgcccagggattgtggttagtaactcgaggacggggtgaactacgcctgaggatccgatctttttccctctgccaaaaattatggggacatcatgaagccccttgagcatctgacttctggctaataaaggaaatttattttcattgcaatagtgtgttggaattttttgtgtctctcactcggcctaggtagataagtagcatggcgggttaatcattaactacaaggaacccctagtgatggagttggccactccctctctgcgcgctcgctcgctcactgaggccgggcgaccaaaggtcgcccgacgcccgggctttgcccgggcggcctcagtgagcgagcgagcgcgcag

SEQ ID NO: 2236 - DNA, 3760 bp, Artificial Sequence
  Description of Artificial Sequence: Synthetic polynucleotide
ctgcgcgctcgctcgctcactgaggccgcccgggcaaagcccgggcgtcgggcgacctttggtcgcccggcctcagtgagcgagcgagcgcgcagagagggagtggccaactccatcactaggggttccttgtagttaatgattaacccgccatgctacttatctaccagggtaatggggatcctctagaactatagctagtcgacataacgcgtctagttattaatagtaatcaattacggggtcattagttcatagcccatatatggagttccgcgttacataacttacggtaaatggcccgcctggctgaccgcccaacgacccccgcccattgacgtcaataatgacgtatgttcccatagtaacgccaatagggactttccattgacgtcaatgggtggagtatttacggtaaactgcccacttggcagtacatcaagtgtatcatatgccaagtacgccccctattgacgtcaatgacggtaaatggcccgcctggcattatgcccagtacatgaccttatgggactttcctacttggcagtacatctacgtattagtcatcgctattaccatggtcgaggtgagccccacgttctgcttcactctccccatctcccccccctccccacccccaattttgtatttatttattttttaattattttgtgcagcgatgggggcggggggggggggggggcgcgcgccaggcggggcggggcggggcgaggggcggggcggggcgaggcggagaggtgcggcggcagccaatcagagcggcgcgctccgaaagtttccttttatggcgaggcggcggcggcggcggccctataaaaagcgaagcgcgcggcgggcgggagtcgctgcgcgctgccttcgccccgtgccccgctccgccgccgcctcgcgccgcccgccccggctctgactgaccgcgttactcccacaggtgagcgggcgggacggcccttctcctccgggctgtaattagcgcttggtttaatgacggcttgtttcttttctgtggctgcgtgaaagccttgaggggctccgggagggccctttgtgcggggggagcggctcggggggtgcgtgcgtgtgtgtgtgcgtggggagcgccgcgtgcggctccgcgctgcccggcggctgtgagcgctgcgggcgcggcgcggggctttgtgcgctccgcagtgtgcgcgaggggagcgcggccgggggcggtgccccgcggtgcggggggggctgcgaggggaacaaaggctgcgtgcggggtgtgtgcgtgggggggtgagcagggggtgtgggcgcgtcggtcgggctgcaaccccccctgcacccccctccccgagttgctgagcacggcccggcttcgggtgcggggctccgtacggggcgtggcgcggggctcgccgtgccgggcggggggtggcggcaggtgggggtgccgggcggggcggggccgcctcgggccggggagggctcgggggaggggcgcggcggcccccggagcgccggcggctgtcgaggcgcggcgagccgcagccattgccttttatggtaatcgtgcgagagggcgcagggacttcctttgtcccaaatctgtgcggagccgaaatctgggaggcgccgccgcaccccctctagcgggcgcggggcgaagcggtgcggcgccggcaggaaggaaatgggcggggagggccttcgtgcgtcgccgcgccgccgtccccttctccctctccagcctcggggctgtccgcggggggacggctgccttcgggggggacggggcagggcggggttcggcttctggcgtgtgaccggcggctctagagcctctgctaaccatgttcatgccttcttctttttcctacagctcctgggcaacgtgctggttattgtgctgtctcatcattttggcaaagaattcgggattcgaaccggtgccgccaccatgaagttgcctgttaggctgttggtgctgatgttctggattcctgcttccagcagtgacatcaagatgacccagagccctagcagcatgtacgccagcctgggcgagagagtgaccatcacctgcaaggccagccaggacatcaacagatacctgaactggttccagcagaagcctggcaagagccctaagaccctgatctacagagccaacagactgctggacggcgtgcctagcagattcagcggcagcggcagcggccaggactacagcctgaccatcagcagcctggactacgaggacatgggcatctactactgcctgcagtacgacgagttccctctgaccttcggcgacggcaccaagctggagctgaagcgggctgatgctgcaccaactgtatccatcttcccaccatccagtgagcagttaacatctggaggtgcctcagtcgtgtgcttcttgaacaacttctaccccaaagacatcaatgtcaagtggaagattgatggcagtgaacgacaaaatggcgtcctgaacagttggactgatcaggacagcaaagacagcacctacagcatgagcagcaccctcacgttgaccaaggacgagtatgaacgacataacagctatacctgtgaggccactcacaagacatcaacttcacccattgtcaagagcttcaacaggaatgagtgtagaaagaggcgagagggcagaggaagtcttctaacatgcggtgacgtggaggagaatcccggccctatgaacttcgggctcagcttgattttccttgtccttgttttaaaaggtgtccagtgtgaggtgaagctggtggagagcggcggcgacctggtgaagcctggcggcagcctgaagctgagctgcgccgccagcggcttcaccttcagcagctacgccatgagctgggtgagacagaaccctgagaagagactggagtgggtggccagcatcagcaagggcggcaacacctactaccctaacagcgtgaagggcagattcaccatcagcagagacaacgccagaaacatcctgtacctgcagatgagcagcctgagaagcgaggacaccgccctgtactactgcgccagaggctggggcgactacggctggttcgcctactggggccaggtgaccctggtgaccgtgagcgccgccaaaacgacacccccatctgtctatccactggcccctggatctgctgcccaaactaactccatggtgaccctgggatgcctggtcaagggctatttccctgagccagtgacagtgacctggaactctggatccctgtccagcggtgtgcacaccttcccagctgtcctgcagtctgacctctacactctgagcagctcagtgactgtcccctccagcacctggcccagcgagaccgtcacctgcaacgttgcccacccggccagcagcaccaaggtggacaagaaaatttagtaactcgaggacggggtgaactacgcctgaggatccgatctttttccctctgccaaaaattatggggacatcatgaagccccttgagcatctgacttctggctaataaaggaaatttattttcattgcaatagtgtgttggaattttttgtgtctctcactcggcctaggtagataagtagcatggcgggttaatcattaactacaaggaacccctagtgatggagttggccactccctctctgcgcgctcgctcgctcactgaggccgggcgaccaaaggtcgcccgacgcccgggctttgcccgggcggcctcagtgagcgagcgagcgcgcag

SEQ ID NO: 2237 - DNA, 3778 bp, Artificial Sequence
  Description of Artificial Sequence: Synthetic polynucleotide
ctgcgcgctcgctcgctcactgaggccgcccgggcaaagcccgggcgtcgggcgacctttggtcgcccggcctcagtgagcgagcgagcgcgcagagagggagtggccaactccatcactaggggttccttgtagttaatgattaacccgccatgctacttatctaccagggtaatggggatcctctagaactatagctagtcgacataacgcgtctagttattaatagtaatcaattacggggtcattagttcatagcccatatatggagttccgcgttacataacttacggtaaatggcccgcctggctgaccgcccaacgacccccgcccattgacgtcaataatgacgtatgttcccatagtaacgccaatagggactttccattgacgtcaatgggtggagtatttacggtaaactgcccacttggcagtacatcaagtgtatcatatgccaagtacgccccctattgacgtcaatgacggtaaatggcccgcctggcattatgcccagtacatgaccttatgggactttcctacttggcagtacatctacgtattagtcatcgctattaccatggtcgaggtgagccccacgttctgcttcactctccccatctcccccccctccccacccccaattttgtatttatttattttttaattattttgtgcagcgatgggggcggggggggggggggggcgcgcgccaggcggggcggggcggggcgaggggcggggcggggcgaggcggagaggtgcggcggcagccaatcagagcggcgcgctccgaaagtttccttttatggcgaggcggcggcggcggcggccctataaaaagcgaagcgcgcggcgggcgggagtcgctgcgcgctgccttcgccccgtgccccgctccgccgccgcctcgcgccgcccgccccggctctgactgaccgcgttactcccacaggtgagcgggcgggacggcccttctcctccgggctgtaattagcgcttggtttaatgacggcttgtttcttttctgtggctgcgtgaaagccttgaggggctccgggagggccctttgtgcggggggagcggctcggggggtgcgtgcgtgtgtgtgtgcgtggggagcgccgcgtgcggctccgcgctgcccggcggctgtgagcgctgcgggcgcggcgcggggctttgtgcgctccgcagtgtgcgcgaggggagcgcggccgggggcggtgccccgcggtgcggggggggctgcgaggggaacaaaggctgcgtgcggggtgtgtgcgtgggggggtgagcagggggtgtgggcgcgtcggtcgggctgcaaccccccctgcacccccctccccgagttgctgagcacggcccggcttcgggtgcggggctccgtacggggcgtggcgcggggctcgccgtgccgggcggggggtggcggcaggtgggggtgccgggcggggcggggccgcctcgggccggggagggctcgggggaggggcgcggcggcccccggagcgccggcggctgtcgaggcgcggcgagccgcagccattgccttttatggtaatcgtgcgagagggcgcagggacttcctttgtcccaaatctgtgcggagccgaaatctgggaggcgccgccgcaccccctctagcgggcgcggggcgaagcggtgcggcgccggcaggaaggaaatgggcggggagggccttcgtgcgtcgccgcgccgccgtccccttctccctctccagcctcggggctgtccgcggggggacggctgccttcgggggggacggggcagggcggggttcggcttctggcgtgtgaccggcggctctagagcctctgctaaccatgttcatgccttcttctttttcctacagctcctgggcaacgtgctggttattgtgctgtctcatcattttggcaaagaattcgggattcgaaccggtgccgccaccatgaagttgcctgttaggctgttggtgctgatgttctggattcctgcttccagcagtgacatcaagatgacccagagccctagcagcatgtacgccagcctgggcgagagagtgaccatcacctgcaaggccagccaggacatcaacagatacctgaactggttccagcagaagcctggcaagagccctaagaccctgatctacagagccaacagactgctggacggcgtgcctagcagattcagcggcagcggcagcggccaggactacagcctgaccatcagcagcctggactacgaggacatgggcatctactactgcctgcagtacgacgagttccctctgaccttcggcgacggcaccaagctggagctgaagcgggctgatgctgcaccaactgtatccatcttcccaccatccagtgagcagttaacatctggaggtgcctcagtcgtgtgcttcttgaacaacttctaccccaaagacatcaatgtcaagtggaagattgatggcagtgaacgacaaaatggcgtcctgaacagttggactgatcaggacagcaaagacagcacctacagcatgagcagcaccctcacgttgaccaaggacgagtatgaacgacataacagctatacctgtgaggccactcacaagacatcaacttcacccattgtcaagagcttcaacaggaatgagtgtagaaagaggcgagagggcagaggaagtcttctaacatgcggtgacgtggaggagaatcccggccctatgaacttcgggctcagcttgattttccttgtccttgttttaaaaggtgtccagtgtgaggtgaagctggtggagagcggcggcgacctggtgaagcctggcggcagcctgaagctgagctgcgccgccagcggcttcaccttcagcagctacgccatgagctgggtgagacagaaccctgagaagagactggagtgggtggccagcatcagcaagggcggcaacacctactaccctaacagcgtgaagggcagattcaccatcagcagagacaacgccagaaacatcctgtacctgcagatgagcagcctgagaagcgaggacaccgccctgtactactgcgccagaggctggggcgactacggctggttcgcctactggggccaggtgaccctggtgaccgtgagcgccgccaaaacgacacccccatctgtctatccactggcccctggatctgctgcccaaactaactccatggtgaccctgggatgcctggtcaagggctatttccctgagccagtgacagtgacctggaactctggatccctgtccagcggtgtgcacaccttcccagctgtcctgcagtctgacctctacactctgagcagctcagtgactgtcccctccagcacctggcccagcgagaccgtcacctgcaacgttgcccacccggccagcagcaccaaggtggacaagaaaattgtgcccagggattgtggttagtaactcgaggacggggtgaactacgcctgaggatccgatctttttccctctgccaaaaattatggggacatcatgaagccccttgagcatctgacttctggctaataaaggaaatttattttcattgcaatagtgtgttggaattttttgtgtctctcactcggcctaggtagataagtagcatggcgggttaatcattaactacaaggaacccctagtgatggagttggccactccctctctgcgcgctcgctcgctcactgaggccgggcgaccaaaggtcgcccgacgcccgggctttgcccgggcggcctcagtgagcgagcgagcgcgcag

SEQ ID NO: 2238 - DNA, 1714 bp, Artificial Sequence
  Description of Artificial Sequence: Synthetic polynucleotide
ctagttattaatagtaatcaattacggggtcattagttcatagcccatatatggagttccgcgttacataacttacggtaaatggcccgcctggctgaccgcccaacgacccccgcccattgacgtcaataatgacgtatgttcccatagtaacgccaatagggactttccattgacgtcaatgggtggagtatttacggtaaactgcccacttggcagtacatcaagtgtatcatatgccaagtacgccccctattgacgtcaatgacggtaaatggcccgcctggcattatgcccagtacatgaccttatgggactttcctacttggcagtacatctacgtattagtcatcgctattaccatggtcgaggtgagccccacgttctgcttcactctccccatctcccccccctccccacccccaattttgtatttatttattttttaattattttgtgcagcgatgggggcggggggggggggggggcgcgcgccaggcggggcggggcggggcgaggggcggggcggggcgaggcggagaggtgcggcggcagccaatcagagcggcgcgctccgaaagtttccttttatggcgaggcggcggcggcggcggccctataaaaagcgaagcgcgcggcgggcgggagtcgctgcgcgctgccttcgccccgtgccccgctccgccgccgcctcgcgccgcccgccccggctctgactgaccgcgttactcccacaggtgagcgggcgggacggcccttctcctccgggctgtaattagcgcttggtttaatgacggcttgtttcttttctgtggctgcgtgaaagccttgaggggctccgggagggccctttgtgcggggggagcggctcggggggtgcgtgcgtgtgtgtgtgcgtggggagcgccgcgtgcggctccgcgctgcccggcggctgtgagcgctgcgggcgcggcgcggggctttgtgcgctccgcagtgtgcgcgaggggagcgcggccgggggcggtgccccgcggtgcggggggggctgcgaggggaacaaaggctgcgtgcggggtgtgtgcgtgggggggtgagcagggggtgtgggcgcgtcggtcgggctgcaaccccccctgcacccccctccccgagttgctgagcacggcccggcttcgggtgcggggctccgtacggggcgtggcgcggggctcgccgtgccgggcggggggtggcggcaggtgggggtgccgggcggggcggggccgcctcgggccggggagggctcgggggaggggcgcggcggcccccggagcgccggcggctgtcgaggcgcggcgagccgcagccattgccttttatggtaatcgtgcgagagggcgcagggacttcctttgtcccaaatctgtgcggagccgaaatctgggaggcgccgccgcaccccctctagcgggcgcggggcgaagcggtgcggcgccggcaggaaggaaatgggcggggagggccttcgtgcgtcgccgcgccgccgtccccttctccctctccagcctcggggctgtccgcggggggacggctgccttcgggggggacggggcagggcggggttcggcttctggcgtgtgaccggcggctctagagcctctgctaaccatgttcatgccttcttctttttcctacagctcctgggcaacgtgctggttattgtgctgtctcatcattttggcaaagaatt

SEQ ID NO: 2239 - DNA, 380 bp, Artificial Sequence
  Description of Artificial Sequence: Synthetic polynucleotide
gacattgattattgactagttattaatagtaatcaattacggggtcattagttcatagcccatatatggagttccgcgttacataacttacggtaaatggcccgcctggctgaccgcccaacgacccccgcccattgacgtcaataatgacgtatgttcccatagtaacgccaatagggactttccattgacgtcaatgggtggagtatttacggtaaactgcccacttggcagtacatcaagtgtatcatatgccaagtacgccccctattgacgtcaatgacggtaaatggcccgcctggcattatgcccagtacatgaccttatgggactttcctacttggcagtacatctacgtattagtcatcgctattaccatg

SEQ ID NO: 2240 - DNA, 566 bp, Artificial Sequence
  Description of Artificial Sequence: Synthetic polynucleotide
tcagatcgcctggagacgccatccacgctgttttgacctccatagaagacaccgggaccgatccagcctccgcggattcgaatcccggccgggaacggtgcattggaacgcggattccccgtgccaagagtgacgtaagtaccgcctatagagtctataggcccacaaaaaatgctttcttcttttaatatacttttttgtttatcttatttctaatactttccctaatctctttctttcagggcaataatgatacaatgtatcatgcctctttgcaccattctaaagaataacagtgataatttctgggttaaggcaatagcaatatttctgcatataaatatttctgcatataaattgtaactgatgtaagaggtttcatattgctaatagcagctacaatccagctaccattctgcttttattttatggttgggataaggctggattattctgagtccaagctaggcccttttgctaatcatgttcatacctcttatcttcctcccacagctcctgggcaacgtgctggtctgtgtgctggcccatcactttggcaaagaatt

SEQ ID NO: 2241 - DNA, 348 bp, Artificial Sequence
  Description of Artificial Sequence: Synthetic polynucleotide
aagctggtggagagcggcggcgacctggtgaagcctggcggcagcctgaagctgagctgcgccgccagcggcttcaccttcagcagctacgccatgagctgggtgagacagaaccctgagaagagactggagtgggtggccagcatcagcaagggcggcaacacctactaccctaacagcgtgaagggcagattcaccatcagcagagacaacgccagaaacatcctgtacctgcagatgagcagcctgagaagcgaggacaccgccctgtactactgcgccagaggctggggcgactacggctggttcgcctactggggccaggtgaccctggtgaccgtgagcgcc

SEQ ID NO: 2242 - DNA, 309 bp, Artificial Sequence
  Description of Artificial Sequence: Synthetic polynucleotide
gccaaaacgacacccccatctgtctatccactggcccctggatctgctgcccaaactaactccatggtgaccctgggatgcctggtcaagggctatttccctgagccagtgacagtgacctggaactctggatccctgtccagcggtgtgcacaccttcccagctgtcctgcagtctgacctctacactctgagcagctcagtgactgtcccctccagcacctggcccagcgagaccgtcacctgcaacgttgcccacccggccagcagcaccaaggtggacaagaaaattgtgcccagggattgtggt

SEQ ID NO: 2243 - DNA, 291 bp, Artificial Sequence
  Description of Artificial Sequence: Synthetic polynucleotide
gccaaaacgacacccccatctgtctatccactggcccctggatctgctgcccaaactaactccatggtgaccctgggatgcctggtcaagggctatttccctgagccagtgacagtgacctggaactctggatccctgtccagcggtgtgcacaccttcccagctgtcctgcagtctgacctctacactctgagcagctcagtgactgtcccctccagcacctggcccagcgagaccgtcacctgcaacgttgcccacccggccagcagcaccaaggtggacaagaaaatt

SEQ ID NO: 2244 - DNA, 198 bp, Artificial Sequence
  Description of Artificial Sequence: Synthetic polynucleotide
gagctcaaaaccccacttggtgacacaactcacacatgcccacggtgcccagagcccaaatcttgtgacacacctcccccgtgcccacggtgcccagagcccaaatcttgtgacacaactcacacatgcccacggtgcccagagcccaaatcttgtgacacacctcccccgtgcccaaggtgcccagcacctgaactc

SEQ ID NO: 2245 - DNA, 15 bp, Artificial Sequence
  Description of Artificial Sequence: Synthetic oligonucleotide
ggtggtggtggatcc

SEQ ID NO: 2246 - DNA, 30 bp, Artificial Sequence
  Description of Artificial Sequence: Synthetic oligonucleotide
ggtggtggtggatccggtggtggtggatcc

SEQ ID NO: 2247 - DNA, 45 bp, Artificial Sequence
  Description of Artificial Sequence: Synthetic oligonucleotide
ggtggtggtggatccggtggtggtggatccggtggtggtggatcc

SEQ ID NO: 2248 - DNA, 60 bp, Artificial Sequence
  Description of Artificial Sequence: Synthetic oligonucleotide
ggtggtggtggatccggtggtggtggatccggtggtggtggatccggtggtggtggatcc

SEQ ID NO: 2249 - DNA, 75 bp, Artificial Sequence
  Description of Artificial Sequence: Synthetic oligonucleotide
ggtggtggtggtagcggcggcggcggctctggtggtggtggatccggtggtggtggatccggtggtggtggatcc

SEQ ID NO: 2250 - DNA, 75 bp, Artificial Sequence
  Description of Artificial Sequence: Synthetic oligonucleotide
ggtggtggtggatccggtggtggtggatccggtggtggtggatccggtggtggtggatccggtggtggtggatcc

SEQ ID NO: 2251 - DNA, 90 bp, Artificial Sequence
  Description of Artificial Sequence: Synthetic oligonucleotide
ggtggtggtggtagcggcggcggcggctctggtggtggtggatccggtggtggtggatccggtggtggtggatccggtggtggtggatcc

SEQ ID NO: 2252 - DNA, 120 bp, Artificial Sequence
  Description of Artificial Sequence: Synthetic polynucleotide
ggtggtggtggtagcggcggcggcggctctggtggtggtggatccggtggtggtggatccggtggtggtggatccggtggtggtggatccggtggtggtggatccggtggtggtggatcc

SEQ ID NO: 2253 - DNA, 120 bp, Artificial Sequence
  Description of Artificial Sequence: Synthetic polynucleotide
ggtggtggtggatccggtggtggtggatccggtggtggtggatccggtggtggtggatccggtggtggtggatccggtggtggtggatccggtggtggtggatccggtggtggtggatcc

SEQ ID NO: 2254 - DNA, 60 bp, Artificial Sequence
  Description of Artificial Sequence: Synthetic oligonucleotide
ggtggtggtggtagcggcggcggcggctctggtggtggtggatccggtggtggtggatcc

SEQ ID NO: 2255 - DNA, 18 bp, Artificial Sequence
  Description of Artificial Sequence: Synthetic oligonucleotide
catcatcaccatcaccat

SEQ ID NO: 2256 - DNA, 491 bp, Artificial Sequence
  Description of Artificial Sequence: Synthetic polynucleotide
attcgaatcccggccgggaacggtgcattggaacgcggattccccgtgccaagagtgacgtaagtaccgcctatagagtctataggcccacaaaaaatgctttcttcttttaatatacttttttgtttatcttatttctaatactttccctaatctctttctttcagggcaataatgatacaatgtatcatgcctctttgcaccattctaaagaataacagtgataatttctgggttaaggcaatagcaatatttctgcatataaatatttctgcatataaattgtaactgatgtaagaggtttcatattgctaatagcagctacaatccagctaccattctgcttttattttatggttgggataaggctggattattctgagtccaagctaggcccttttgctaatcatgttcatacctcttatcttcctcccacagctcctgggcaacgtgctggtctgtgtgctggcccatcactttggcaaagaatt

SEQ ID NO: 2257 - DNA, 387 bp, Artificial Sequence
  Description of Artificial Sequence: Synthetic polynucleotide
tcagatcgcctggagacgccatccacgctgttttgacctccatagaagacaccgggaccgatccagcctccgcggattcgaatcccggccgggaacggtgcattggaacgcggattccccgtgccaagagtgacgtaagtaccgcctatagagtctataggcccactctgcatataaattgtaactgatgtaagaggtttcatattgctaatagcagctacaatccagctaccattctgcttttattttatggttgggataaggctggattattctgagtccaagctaggcccttttgctaatcatgttcatacctcttatcttcctcccacagctcctgggcaacgtgctggtctgtgtgctggcccatcactttggcaaagaatt

SEQ ID NO: 2258 - DNA, 292 bp, Artificial Sequence
  Description of Artificial Sequence: Synthetic polynucleotide
tcagatcgcctggagacgccatccacgctgttttgacctccatagaagacaccgggaccgatccaggtaagtaccgcctatagagtctataggcccacaaaaaatgctttcttcttttaatatacttttttgtttatcttatttctaatactttccctaatctctttcgctggattattctgagtccaagctaggcccttttgctaatcatgttcatacctcttatcttcctcccacagctcctgggcaacgtgctggtctgtgtgctggcccatcactttggcaaagaatt

SEQ ID NO: 2259 - DNA, 90 bp, Artificial Sequence
  Description of Artificial Sequence: Synthetic oligonucleotide
ggtggtggtggatccggtggtggtggatccggtggtggtggatccggtggtggtggatccggtggtggtggatccggtggtggtggatcc

SEQ ID NO: 2260 - DNA, 3188 bp, Artificial Sequence
  Description of Artificial Sequence: Synthetic polynucleotide
ctgcgcgctcgctcgctcactgaggccgcccgggcaaagcccgggcgtcgggcgacctttggtcgcccggcctcagtgagcgagcgagcgcgcagagagggagtggccaactccatcactaggggttccttgtagttaatgattaacccgccatgctacttatctaccagggtaatggggatcctctagaactatagctagtcgacataacgcgttagtatctgcagagggccctgcgtatgagtgcaagtgggttttaggaccaggatgaggcggggtgggggtgcctacctgacgaccgaccccgacccactggacaagcacccaacccccattccccaaattgcgcatcccctatcagagagggggaggggaaacaggatgcggcgaggcgcgtgcgcactgccagcttcagcaccgcggacagtgccttcgcccccgcctggcggcgcgcgccaccgccgcctcagcactgaaggcgcgctgacgtcactcgccggtcccccgcaaactccccttcccggccaccttggtcgcgtccgcgccgccgccggcccagccggaccgcaccacgcgaggcgcgagataggggggcacgggcgcgaccatctgcgctgcggcgccggcgactcagcgctgcctcagtctgcggtgggcagcggaggagtcgtgtcgtgcctgagagcgcagctgtgctcctgggcaccgcgcagtccgcccccgcggctcctggccagaccacccctaggaccccctgccccaagtcgcagccaagcttcgtttagtgaaccgtcagatcgcctggagacgccatccacgctgttttgacctccatagaagacaccgggaccgatccagcctccgcggattcgaatcccggccgggaacggtgcattggaacgcggattccccgtgccaagagtgacgtaagtaccgcctatagagtctataggcccacaaaaaatgctttcttcttttaatatacttttttgtttatcttatttctaatactttccctaatctctttctttcagggcaataatgatacaatgtatcatgcctctttgcaccattctaaagaataacagtgataatttctgggttaaggcaatagcaatatttctgcatataaatatttctgcatataaattgtaactgatgtaagaggtttcatattgctaatagcagctacaatccagctaccattctgcttttattttatggttgggataaggctggattattctgagtccaagctaggcccttttgctaatcatgttcatacctcttatcttcctcccacagctcctgggcaacgtgctggtctgtgtgctggcccatcactttggcaaagaattgggattcgaaccggtgccgccaccatgaacttcgggctcagcttgattttccttgtccttgttttaaaaggtgtccagtgtgaggtgaagctggtggagagcggcggcgacctggtgaagcctggcggcagcctgaagctgagctgcgccgccagcggcttcaccttcagcagctacgccatgagctgggtgagacagaaccctgagaagagactggagtgggtggccagcatcagcaagggcggcaacacctactaccctaacagcgtgaagggcagattcaccatcagcagagacaacgccagaaacatcctgtacctgcagatgagcagcctgagaagcgaggacaccgccctgtactactgcgccagaggctggggcgactacggctggttcgcctactggggccaggtgaccctggtgaccgtgagcgccgccaaaacgacacccccatctgtctatccactggcccctggatctgctgcccaaactaactccatggtgaccctgggatgcctggtcaagggctatttccctgagccagtgacagtgacctggaactctggatccctgtccagcggtgtgcacaccttcccagctgtcctgcagtctgacctctacactctgagcagctcagtgactgtcccctccagcacctggcccagcgagaccgtcacctgcaacgttgcccacccggccagcagcaccaaggtggacaagaaaattagaaagaggcgagagggcagaggaagtcttctaacatgcggtgacgtggaggagaatcccggccctatgaagttgcctgttaggctgttggtgctgatgttctggattcctgcttccagcagtgacatcaagatgacccagagccctagcagcatgtacgccagcctgggcgagagagtgaccatcacctgcaaggccagccaggacatcaacagatacctgaactggttccagcagaagcctggcaagagccctaagaccctgatctacagagccaacagactgctggacggcgtgcctagcagattcagcggcagcggcagcggccaggactacagcctgaccatcagcagcctggactacgaggacatgggcatctactactgcctgcagtacgacgagttccctctgaccttcggcgacggcaccaagctggagctgaagcgggctgatgctgcaccaactgtatccatcttcccaccatccagtgagcagttaacatctggaggtgcctcagtcgtgtgcttcttgaacaacttctaccccaaagacatcaatgtcaagtggaagattgatggcagtgaacgacaaaatggcgtcctgaacagttggactgatcaggacagcaaagacagcacctacagcatgagcagcaccctcacgttgaccaaggacgagtatgaacgacataacagctatacctgtgaggccactcacaagacatcaacttcacccattgtcaagagcttcaacaggaatgagtgttagtaactcgaggacggggtgaactacgcctgaggatccgatctttttccctctgccaaaaattatggggacatcatgaagccccttgagcatctgacttctggctaataaaggaaatttattttcattgcaatagtgtgttggaattttttgtgtctctcactcggcctaggtagataagtagcatggcgggttaatcattaactacaaggaacccctagtgatggagttggccactccctctctgcgcgctcgctcgctcactgaggccgggcgaccaaaggtcgcccgacgcccgggctttgcccgggcggcctcagtgagcgagcgagcgcgcag

SEQ ID NO: 2261 - DNA, 3330 bp, Artificial Sequence
  Description of Artificial Sequence: Synthetic polynucleotide
ctgcgcgctcgctcgctcactgaggccgcccgggcaaagcccgggcgtcgggcgacctttggtcgcccggcctcagtgagcgagcgagcgcgcagagagggagtggccaactccatcactaggggttccttgtagttaatgattaacccgccatgctacttatctaccagggtaatggggatcctctagaactatagctagtcgacataacgcgtgatctaacatatcctggtgtggagtagcggacgctgctatgacagaggctcgggggcctgagctggctctgtgagctggggaggaggcagacagccaggccttgtctgcaagcagacctggcagcattgggctggccgccccccagggcctcctcttcatgcccagtgaatgactcaccttggcacagacacaatgttcggggtgggcacagtgcctgcttcccgccgcaccccagcccccctcaaatgccttccgagaagcccattgagcagggggcttgcattgcaccccagcctgacagcctggcatcttgggataaaagcagcacagccccctaggggctgcccttgctgtgtggcgccaccggcggtggagaacaaggctctattcagcctgtgcccaggaaaggggatcaggggatgcccaggcatggacagtgggtggcagggggggagaggagggctgtctgcttcccagaagtccaaggacacaaatgggtgaggggagagctctccccatagctgggctgcggcccaaccccaccccctcaggctatgccagggggtgttgccaggggcacccgggcatcgccagtctagcccactccttcataaagccctcgcatcccaggagcgagcagagccagagcaggttggagaggagacgcatcacctccgctgctcgcggggatcctctagaagcttcgtttagtgaaccgtcagatcgcctggagacgccatccacgctgttttgacctccatagaagacaccgggaccgatccagcctccgcggattcgaatcccggccgggaacggtgcattggaacgcggattccccgtgccaagagtgacgtaagtaccgcctatagagtctataggcccacaaaaaatgctttcttcttttaatatacttttttgtttatcttatttctaatactttccctaatctctttctttcagggcaataatgatacaatgtatcatgcctctttgcaccattctaaagaataacagtgataatttctgggttaaggcaatagcaatatttctgcatataaatatttctgcatataaattgtaactgatgtaagaggtttcatattgctaatagcagctacaatccagctaccattctgcttttattttatggttgggataaggctggattattctgagtccaagctaggcccttttgctaatcatgttcatacctcttatcttcctcccacagctcctgggcaacgtgctggtctgtgtgctggcccatcactttggcaaagaattgggattcgaaccggtgccgccaccatgaacttcgggctcagcttgattttccttgtccttgttttaaaaggtgtccagtgtgaggtgaagctggtggagagcggcggcgacctggtgaagcctggcggcagcctgaagctgagctgcgccgccagcggcttcaccttcagcagctacgccatgagctgggtgagacagaaccctgagaagagactggagtgggtggccagcatcagcaagggcggcaacacctactaccctaacagcgtgaagggcagattcaccatcagcagagacaacgccagaaacatcctgtacctgcagatgagcagcctgagaagcgaggacaccgccctgtactactgcgccagaggctggggcgactacggctggttcgcctactggggccaggtgaccctggtgaccgtgagcgccgccaaaacgacacccccatctgtctatccactggcccctggatctgctgcccaaactaactccatggtgaccctgggatgcctggtcaagggctatttccctgagccagtgacagtgacctggaactctggatccctgtccagcggtgtgcacaccttcccagctgtcctgcagtctgacctctacactctgagcagctcagtgactgtcccctccagcacctggcccagcgagaccgtcacctgcaacgttgcccacccggccagcagcaccaaggtggacaagaaaattagaaagaggcgagagggcagaggaagtcttctaacatgcggtgacgtggaggagaatcccggccctatgaagttgcctgttaggctgttggtgctgatgttctggattcctgcttccagcagtgacatcaagatgacccagagccctagcagcatgtacgccagcctgggcgagagagtgaccatcacctgcaaggccagccaggacatcaacagatacctgaactggttccagcagaagcctggcaagagccctaagaccctgatctacagagccaacagactgctggacggcgtgcctagcagattcagcggcagcggcagcggccaggactacagcctgaccatcagcagcctggactacgaggacatgggcatctactactgcctgcagtacgacgagttccctctgaccttcggcgacggcaccaagctggagctgaagcgggctgatgctgcaccaactgtatccatcttcccaccatccagtgagcagttaacatctggaggtgcctcagtcgtgtgcttcttgaacaacttctaccccaaagacatcaatgtcaagtggaagattgatggcagtgaacgacaaaatggcgtcctgaacagttggactgatcaggacagcaaagacagcacctacagcatgagcagcaccctcacgttgaccaaggacgagtatgaacgacataacagctatacctgtgaggccactcacaagacatcaacttcacccattgtcaagagcttcaacaggaatgagtgttagtaactcgaggacggggtgaactacgcctgaggatccgatctttttccctctgccaaaaattatggggacatcatgaagccccttgagcatctgacttctggctaataaaggaaatttattttcattgcaatagtgtgttggaattttttgtgtctctcactcggcctaggtagataagtagcatggcgggttaatcattaactacaaggaacccctagtgatggagttggccactccctctctgcgcgctcgctcgctcactgaggccgggcgaccaaaggtcgcccgacgcccgggctttgcccgggcggcctcagtgagcgagcgagcgcgcag

SEQ ID NO: 2262 - DNA, 3976 bp, Artificial Sequence
  Description of Artificial Sequence: Synthetic polynucleotide
ctgcgcgctcgctcgctcactgaggccgcccgggcaaagcccgggcgtcgggcgacctttggtcgcccggcctcagtgagcgagcgagcgcgcagagagggagtggccaactccatcactaggggttccttgtagttaatgattaacccgccatgctacttatctaccagggtaatggggatcctctagaactatagctagtcgacataacgcgtctagttattaatagtaatcaattacggggtcattagttcatagcccatatatggagttccgcgttacataacttacggtaaatggcccgcctggctgaccgcccaacgacccccgcccattgacgtcaataatgacgtatgttcccatagtaacgccaatagggactttccattgacgtcaatgggtggagtatttacggtaaactgcccacttggcagtacatcaagtgtatcatatgccaagtacgccccctattgacgtcaatgacggtaaatggcccgcctggcattatgcccagtacatgaccttatgggactttcctacttggcagtacatctacgtattagtcatcgctattaccatggtcgaggtgagccccacgttctgcttcactctccccatctcccccccctccccacccccaattttgtatttatttattttttaattattttgtgcagcgatgggggcggggggggggggggggcgcgcgccaggcggggcggggcggggcgaggggcggggcggggcgaggcggagaggtgcggcggcagccaatcagagcggcgcgctccgaaagtttccttttatggcgaggcggcggcggcggcggccctataaaaagcgaagcgcgcggcgggcgggagtcgctgcgcgctgccttcgccccgtgccccgctccgccgccgcctcgcgccgcccgccccggctctgactgaccgcgttactcccacaggtgagcgggcgggacggcccttctcctccgggctgtaattagcgcttggtttaatgacggcttgtttcttttctgtggctgcgtgaaagccttgaggggctccgggagggccctttgtgcggggggagcggctcggggggtgcgtgcgtgtgtgtgtgcgtggggagcgccgcgtgcggctccgcgctgcccggcggctgtgagcgctgcgggcgcggcgcggggctttgtgcgctccgcagtgtgcgcgaggggagcgcggccgggggcggtgccccgcggtgcggggggggctgcgaggggaacaaaggctgcgtgcggggtgtgtgcgtgggggggtgagcagggggtgtgggcgcgtcggtcgggctgcaaccccccctgcacccccctccccgagttgctgagcacggcccggcttcgggtgcggggctccgtacggggcgtggcgcggggctcgccgtgccgggcggggggtggcggcaggtgggggtgccgggcggggcggggccgcctcgggccggggagggctcgggggaggggcgcggcggcccccggagcgccggcggctgtcgaggcgcggcgagccgcagccattgccttttatggtaatcgtgcgagagggcgcagggacttcctttgtcccaaatctgtgcggagccgaaatctgggaggcgccgccgcaccccctctagcgggcgcggggcgaagcggtgcggcgccggcaggaaggaaatgggcggggagggccttcgtgcgtcgccgcgccgccgtccccttctccctctccagcctcggggctgtccgcggggggacggctgccttcgggggggacggggcagggcggggttcggcttctggcgtgtgaccggcggctctagagcctctgctaaccatgttcatgccttcttctttttcctacagctcctgggcaacgtgctggttattgtgctgtctcatcattttggcaaagaattcgggattcgaaccggtgccgccaccatgaacttcgggctcagcttgattttccttgtccttgttttaaaaggtgtccagtgtgaggtgaagctggtggagagcggcggcgacctggtgaagcctggcggcagcctgaagctgagctgcgccgccagcggcttcaccttcagcagctacgccatgagctgggtgagacagaaccctgagaagagactggagtgggtggccagcatcagcaagggcggcaacacctactaccctaacagcgtgaagggcagattcaccatcagcagagacaacgccagaaacatcctgtacctgcagatgagcagcctgagaagcgaggacaccgccctgtactactgcgccagaggctggggcgactacggctggttcgcctactggggccaggtgaccctggtgaccgtgagcgccgccaaaacgacacccccatctgtctatccactggcccctggatctgctgcccaaactaactccatggtgaccctgggatgcctggtcaagggctatttccctgagccagtgacagtgacctggaactctggatccctgtccagcggtgtgcacaccttcccagctgtcctgcagtctgacctctacactctgagcagctcagtgactgtcccctccagcacctggcccagcgagaccgtcacctgcaacgttgcccacccggccagcagcaccaaggtggacaagaaaattgtgcccagggattgtggtgagctcaaaaccccacttggtgacacaactcacacatgcccacggtgcccagagcccaaatcttgtgacacacctcccccgtgcccacggtgcccagagcccaaatcttgtgacacacctcccccatgcccacggtgcccagagcccaaatcttgtgacacacctcccccgtgcccaaggtgcccagcacctgaactcagaaagaggcgagagggcagaggaagtcttctaacatgcggtgacgtggaggagaatcccggccctatgaagttgcctgttaggctgttggtgctgatgttctggattcctgcttccagcagtgacatcaagatgacccagagccctagcagcatgtacgccagcctgggcgagagagtgaccatcacctgcaaggccagccaggacatcaacagatacctgaactggttccagcagaagcctggcaagagccctaagaccctgatctacagagccaacagactgctggacggcgtgcctagcagattcagcggcagcggcagcggccaggactacagcctgaccatcagcagcctggactacgaggacatgggcatctactactgcctgcagtacgacgagttccctctgaccttcggcgacggcaccaagctggagctgaagcgggctgatgctgcaccaactgtatccatcttcccaccatccagtgagcagttaacatctggaggtgcctcagtcgtgtgcttcttgaacaacttctaccccaaagacatcaatgtcaagtggaagattgatggcagtgaacgacaaaatggcgtcctgaacagttggactgatcaggacagcaaagacagcacctacagcatgagcagcaccctcacgttgaccaaggacgagtatgaacgacataacagctatacctgtgaggccactcacaagacatcaacttcacccattgtcaagagcttcaacaggaatgagtgttagtaactcgaggacggggtgaactacgcctgaggatccgatctttttccctctgccaaaaattatggggacatcatgaagccccttgagcatctgacttctggctaataaaggaaatttattttcattgcaatagtgtgttggaattttttgtgtctctcactcggcctaggtagataagtagcatggcgggttaatcattaactacaaggaacccctagtgatggagttggccactccctctctgcgcgctcgctcgctcactgaggccgggcgaccaaaggtcgcccgacgcccgggctttgcccgggcggcctcagtgagcgagcgagcgcgcag

SEQ ID NO: 2263 - DNA, 3404 bp, Artificial Sequence
  Description of Artificial Sequence: Synthetic polynucleotide
ctgcgcgctcgctcgctcactgaggccgcccgggcaaagcccgggcgtcgggcgacctttggtcgcccggcctcagtgagcgagcgagcgcgcagagagggagtggccaactccatcactaggggttccttgtagttaatgattaacccgccatgctacttatctaccagggtaatggggatcctctagaactatagctagtcgacataacgcgttagtatctgcagagggccctgcgtatgagtgcaagtgggttttaggaccaggatgaggcggggtgggggtgcctacctgacgaccgaccccgacccactggacaagcacccaacccccattccccaaattgcgcatcccctatcagagagggggaggggaaacaggatgcggcgaggcgcgtgcgcactgccagcttcagcaccgcggacagtgccttcgcccccgcctggcggcgcgcgccaccgccgcctcagcactgaaggcgcgctgacgtcactcgccggtcccccgcaaactccccttcccggccaccttggtcgcgtccgcgccgccgccggcccagccggaccgcaccacgcgaggcgcgagataggggggcacgggcgcgaccatctgcgctgcggcgccggcgactcagcgctgcctcagtctgcggtgggcagcggaggagtcgtgtcgtgcctgagagcgcagctgtgctcctgggcaccgcgcagtccgcccccgcggctcctggccagaccacccctaggaccccctgccccaagtcgcagccaagcttcgtttagtgaaccgtcagatcgcctggagacgccatccacgctgttttgacctccatagaagacaccgggaccgatccagcctccgcggattcgaatcccggccgggaacggtgcattggaacgcggattccccgtgccaagagtgacgtaagtaccgcctatagagtctataggcccacaaaaaatgctttcttcttttaatatacttttttgtttatcttatttctaatactttccctaatctctttctttcagggcaataatgatacaatgtatcatgcctctttgcaccattctaaagaataacagtgataatttctgggttaaggcaatagcaatatttctgcatataaatatttctgcatataaattgtaactgatgtaagaggtttcatattgctaatagcagctacaatccagctaccattctgcttttattttatggttgggataaggctggattattctgagtccaagctaggcccttttgctaatcatgttcatacctcttatcttcctcccacagctcctgggcaacgtgctggtctgtgtgctggcccatcactttggcaaagaattgggattcgaaccggtgccgccaccatgaacttcgggctcagcttgattttccttgtccttgttttaaaaggtgtccagtgtgaggtgaagctggtggagagcggcggcgacctggtgaagcctggcggcagcctgaagctgagctgcgccgccagcggcttcaccttcagcagctacgccatgagctgggtgagacagaaccctgagaagagactggagtgggtggccagcatcagcaagggcggcaacacctactaccctaacagcgtgaagggcagattcaccatcagcagagacaacgccagaaacatcctgtacctgcagatgagcagcctgagaagcgaggacaccgccctgtactactgcgccagaggctggggcgactacggctggttcgcctactggggccaggtgaccctggtgaccgtgagcgccgccaaaacgacacccccatctgtctatccactggcccctggatctgctgcccaaactaactccatggtgaccctgggatgcctggtcaagggctatttccctgagccagtgacagtgacctggaactctggatccctgtccagcggtgtgcacaccttcccagctgtcctgcagtctgacctctacactctgagcagctcagtgactgtcccctccagcacctggcccagcgagaccgtcacctgcaacgttgcccacccggccagcagcaccaaggtggacaagaaaattgtgcccagggattgtggtgagctcaaaaccccacttggtgacacaactcacacatgcccacggtgcccagagcccaaatcttgtgacacacctcccccgtgcccacggtgcccagagcccaaatcttgtgacacacctcccccatgcccacggtgcccagagcccaaatcttgtgacacacctcccccgtgcccaaggtgcccagcacctgaactcagaaagaggcgagagggcagaggaagtcttctaacatgcggtgacgtggaggagaatcccggccctatgaagttgcctgttaggctgttggtgctgatgttctggattcctgcttccagcagtgacatcaagatgacccagagccctagcagcatgtacgccagcctgggcgagagagtgaccatcacctgcaaggccagccaggacatcaacagatacctgaactggttccagcagaagcctggcaagagccctaagaccctgatctacagagccaacagactgctggacggcgtgcctagcagattcagcggcagcggcagcggccaggactacagcctgaccatcagcagcctggactacgaggacatgggcatctactactgcctgcagtacgacgagttccctctgaccttcggcgacggcaccaagctggagctgaagcgggctgatgctgcaccaactgtatccatcttcccaccatccagtgagcagttaacatctggaggtgcctcagtcgtgtgcttcttgaacaacttctaccccaaagacatcaatgtcaagtggaagattgatggcagtgaacgacaaaatggcgtcctgaacagttggactgatcaggacagcaaagacagcacctacagcatgagcagcaccctcacgttgaccaaggacgagtatgaacgacataacagctatacctgtgaggccactcacaagacatcaacttcacccattgtcaagagcttcaacaggaatgagtgttagtaactcgaggacggggtgaactacgcctgaggatccgatctttttccctctgccaaaaattatggggacatcatgaagccccttgagcatctgacttctggctaataaaggaaatttattttcattgcaatagtgtgttggaattttttgtgtctctcactcggcctaggtagataagtagcatggcgggttaatcattaactacaaggaacccctagtgatggagttggccactccctctctgcgcgctcgctcgctcactgaggccgggcgaccaaaggtcgcccgacgcccgggctttgcccgggcggcctcagtgagcgagcgagcgcgcag

SEQ ID NO: 2264 - DNA, 3546 bp, Artificial Sequence
  Description of Artificial Sequence: Synthetic polynucleotide
ctgcgcgctcgctcgctcactgaggccgcccgggcaaagcccgggcgtcgggcgacctttggtcgcccggcctcagtgagcgagcgagcgcgcagagagggagtggccaactccatcactaggggttccttgtagttaatgattaacccgccatgctacttatctaccagggtaatggggatcctctagaactatagctagtcgacataacgcgtgatctaacatatcctggtgtggagtagcggacgctgctatgacagaggctcgggggcctgagctggctctgtgagctggggaggaggcagacagccaggccttgtctgcaagcagacctggcagcattgggctggccgccccccagggcctcctcttcatgcccagtgaatgactcaccttggcacagacacaatgttcggggtgggcacagtgcctgcttcccgccgcaccccagcccccctcaaatgccttccgagaagcccattgagcagggggcttgcattgcaccccagcctgacagcctggcatcttgggataaaagcagcacagccccctaggggctgcccttgctgtgtggcgccaccggcggtggagaacaaggctctattcagcctgtgcccaggaaaggggatcaggggatgcccaggcatggacagtgggtggcagggggggagaggagggctgtctgcttcccagaagtccaaggacacaaatgggtgaggggagagctctccccatagctgggctgcggcccaaccccaccccctcaggctatgccagggggtgttgccaggggcacccgggcatcgccagtctagcccactccttcataaagccctcgcatcccaggagcgagcagagccagagcaggttggagaggagacgcatcacctccgctgctcgcggggatcctctagaagcttcgtttagtgaaccgtcagatcgcctggagacgccatccacgctgttttgacctccatagaagacaccgggaccgatccagcctccgcggattcgaatcccggccgggaacggtgcattggaacgcggattccccgtgccaagagtgacgtaagtaccgcctatagagtctataggcccacaaaaaatgctttcttcttttaatatacttttttgtttatcttatttctaatactttccctaatctctttctttcagggcaataatgatacaatgtatcatgcctctttgcaccattctaaagaataacagtgataatttctgggttaaggcaatagcaatatttctgcatataaatatttctgcatataaattgtaactgatgtaagaggtttcatattgctaatagcagctacaatccagctaccattctgcttttattttatggttgggataaggctggattattctgagtccaagctaggcccttttgctaatcatgttcatacctcttatcttcctcccacagctcctgggcaacgtgctggtctgtgtgctggcccatcactttggcaaagaattgggattcgaaccggtgccgccaccatgaacttcgggctcagcttgattttccttgtccttgttttaaaaggtgtccagtgtgaggtgaagctggtggagagcggcggcgacctggtgaagcctggcggcagcctgaagctgagctgcgccgccagcggcttcaccttcagcagctacgccatgagctgggtgagacagaaccctgagaagagactggagtgggtggccagcatcagcaagggcggcaacacctactaccctaacagcgtgaagggcagattcaccatcagcagagacaacgccagaaacatcctgtacctgcagatgagcagcctgagaagcgaggacaccgccctgtactactgcgccagaggctggggcgactacggctggttcgcctactggggccaggtgaccctggtgaccgtgagcgccgccaaaacgacacccccatctgtctatccactggcccctggatctgctgcccaaactaactccatggtgaccctgggatgcctggtcaagggctatttccctgagccagtgacagtgacctggaactctggatccctgtccagcggtgtgcacaccttcccagctgtcctgcagtctgacctctacactctgagcagctcagtgactgtcccctccagcacctggcccagcgagaccgtcacctgcaacgttgcccacccggccagcagcaccaaggtggacaagaaaattgtgcccagggattgtggtgagctcaaaaccccacttggtgacacaactcacacatgcccacggtgcccagagcccaaatcttgtgacacacctcccccgtgcccacggtgcccagagcccaaatcttgtgacacacctcccccatgcccacggtgcccagagcccaaatcttgtgacacacctcccccgtgcccaaggtgcccagcacctgaactcagaaagaggcgagagggcagaggaagtcttctaacatgcggtgacgtggaggagaatcccggccctatgaagttgcctgttaggctgttggtgctgatgttctggattcctgcttccagcagtgacatcaagatgacccagagccctagcagcatgtacgccagcctgggcgagagagtgaccatcacctgcaaggccagccaggacatcaacagatacctgaactggttccagcagaagcctggcaagagccctaagaccctgatctacagagccaacagactgctggacggcgtgcctagcagattcagcggcagcggcagcggccaggactacagcctgaccatcagcagcctggactacgaggacatgggcatctactactgcctgcagtacgacgagttccctctgaccttcggcgacggcaccaagctggagctgaagcgggctgatgctgcaccaactgtatccatcttcccaccatccagtgagcagttaacatctggaggtgcctcagtcgtgtgcttcttgaacaacttctaccccaaagacatcaatgtcaagtggaagattgatggcagtgaacgacaaaatggcgtcctgaacagttggactgatcaggacagcaaagacagcacctacagcatgagcagcaccctcacgttgaccaaggacgagtatgaacgacataacagctatacctgtgaggccactcacaagacatcaacttcacccattgtcaagagcttcaacaggaatgagtgttagtaactcgaggacggggtgaactacgcctgaggatccgatctttttccctctgccaaaaattatggggacatcatgaagccccttgagcatctgacttctggctaataaaggaaatttattttcattgcaatagtgtgttggaattttttgtgtctctcactcggcctaggtagataagtagcatggcgggttaatcattaactacaaggaacccctagtgatggagttggccactccctctctgcgcgctcgctcgctcactgaggccgggcgaccaaaggtcgcccgacgcccgggctttgcccgggcggcctcagtgagcgagcgagcgcgcag

SEQ ID NO: 2265 - DNA, 3997 bp, Artificial Sequence
  Description of Artificial Sequence: Synthetic polynucleotide
ctgcgcgctcgctcgctcactgaggccgcccgggcaaagcccgggcgtcgggcgacctttggtcgcccggcctcagtgagcgagcgagcgcgcagagagggagtggccaactccatcactaggggttccttgtagttaatgattaacccgccatgctacttatctaccagggtaatggggatcctctagaactatagctagtcgacataacgcgtctagttattaatagtaatcaattacggggtcattagttcatagcccatatatggagttccgcgttacataacttacggtaaatggcccgcctggctgaccgcccaacgacccccgcccattgacgtcaataatgacgtatgttcccatagtaacgccaatagggactttccattgacgtcaatgggtggagtatttacggtaaactgcccacttggcagtacatcaagtgtatcatatgccaagtacgccccctattgacgtcaatgacggtaaatggcccgcctggcattatgcccagtacatgaccttatgggactttcctacttggcagtacatctacgtattagtcatcgctattaccatggtcgaggtgagccccacgttctgcttcactctccccatctcccccccctccccacccccaattttgtatttatttattttttaattattttgtgcagcgatgggggcggggggggggggggggcgcgcgccaggcggggcggggcggggcgaggggcggggcggggcgaggcggagaggtgcggcggcagccaatcagagcggcgcgctccgaaagtttccttttatggcgaggcggcggcggcggcggccctataaaaagcgaagcgcgcggcgggcgggagtcgctgcgcgctgccttcgccccgtgccccgctccgccgccgcctcgcgccgcccgccccggctctgactgaccgcgttactcccacaggtgagcgggcgggacggcccttctcctccgggctgtaattagcgcttggtttaatgacggcttgtttcttttctgtggctgcgtgaaagccttgaggggctccgggagggccctttgtgcggggggagcggctcggggggtgcgtgcgtgtgtgtgtgcgtggggagcgccgcgtgcggctccgcgctgcccggcggctgtgagcgctgcgggcgcggcgcggggctttgtgcgctccgcagtgtgcgcgaggggagcgcggccgggggcggtgccccgcggtgcggggggggctgcgaggggaacaaaggctgcgtgcggggtgtgtgcgtgggggggtgagcagggggtgtgggcgcgtcggtcgggctgcaaccccccctgcacccccctccccgagttgctgagcacggcccggcttcgggtgcggggctccgtacggggcgtggcgcggggctcgccgtgccgggcggggggtggcggcaggtgggggtgccgggcggggcggggccgcctcgggccggggagggctcgggggaggggcgcggcggcccccggagcgccggcggctgtcgaggcgcggcgagccgcagccattgccttttatggtaatcgtgcgagagggcgcagggacttcctttgtcccaaatctgtgcggagccgaaatctgggaggcgccgccgcaccccctctagcgggcgcggggcgaagcggtgcggcgccggcaggaaggaaatgggcggggagggccttcgtgcgtcgccgcgccgccgtccccttctccctctccagcctcggggctgtccgcggggggacggctgccttcgggggggacggggcagggcggggttcggcttctggcgtgtgaccggcggctctagagcctctgctaaccatgttcatgccttcttctttttcctacagctcctgggcaacgtgctggttattgtgctgtctcatcattttggcaaagaattcgggattcgaaccggtgccgccaccatgaacttcgggctcagcttgattttccttgtccttgttttaaaaggtgtccagtgtgaggtgaagctggtggagagcggcggcgacctggtgaagcctggcggcagcctgaagctgagctgcgccgccagcggcttcaccttcagcagctacgccatgagctgggtgagacagaaccctgagaagagactggagtgggtggccagcatcagcaagggcggcaacacctactaccctaacagcgtgaagggcagattcaccatcagcagagacaacgccagaaacatcctgtacctgcagatgagcagcctgagaagcgaggacaccgccctgtactactgcgccagaggctggggcgactacggctggttcgcctactggggccaggtgaccctggtgaccgtgagcgccgccaaaacgacacccccatctgtctatccactggcccctggatctgctgcccaaactaactccatggtgaccctgggatgcctggtcaagggctatttccctgagccagtgacagtgacctggaactctggatccctgtccagcggtgtgcacaccttcccagctgtcctgcagtctgacctctacactctgagcagctcagtgactgtcccctccagcacctggcccagcgagaccgtcacctgcaacgttgcccacccggccagcagcaccaaggtggacaagaaaattgtgcccagggattgtggtgagctcaaaaccccacttggtgacacaactcacacatgcccacggtgcccagagcccaaatcttgtgacacacctcccccgtgcccacggtgcccagagcccaaatcttgtgacacacctcccccatgcccacggtgcccagagcccaaatcttgtgacacacctcccccgtgcccaaggtgcccagcacctgaactcagaaagaggcgaggaagcggagtgaaacagactttgaattttgaccttctcaagttggcgggagacgtggagtccaaccctggacctatgaagttgcctgttaggctgttggtgctgatgttctggattcctgcttccagcagtgacatcaagatgacccagagccctagcagcatgtacgccagcctgggcgagagagtgaccatcacctgcaaggccagccaggacatcaacagatacctgaactggttccagcagaagcctggcaagagccctaagaccctgatctacagagccaacagactgctggacggcgtgcctagcagattcagcggcagcggcagcggccaggactacagcctgaccatcagcagcctggactacgaggacatgggcatctactactgcctgcagtacgacgagttccctctgaccttcggcgacggcaccaagctggagctgaagcgggctgatgctgcaccaactgtatccatcttcccaccatccagtgagcagttaacatctggaggtgcctcagtcgtgtgcttcttgaacaacttctaccccaaagacatcaatgtcaagtggaagattgatggcagtgaacgacaaaatggcgtcctgaacagttggactgatcaggacagcaaagacagcacctacagcatgagcagcaccctcacgttgaccaaggacgagtatgaacgacataacagctatacctgtgaggccactcacaagacatcaacttcacccattgtcaagagcttcaacaggaatgagtgttagtaactcgaggacggggtgaactacgcctgaggatccgatctttttccctctgccaaaaattatggggacatcatgaagccccttgagcatctgacttctggctaataaaggaaatttattttcattgcaatagtgtgttggaattttttgtgtctctcactcggcctaggtagataagtagcatggcgggttaatcattaactacaaggaacccctagtgatggagttggccactccctctctgcgcgctcgctcgctcactgaggccgggcgaccaaaggtcgcccgacgcccgggctttgcccgggcggcctcagtgagcgagcgagcgcgcag

SEQ ID NO: 2266 - DNA, 3425 bp, Artificial Sequence
  Description of Artificial Sequence: Synthetic polynucleotide
ctgcgcgctcgctcgctcactgaggccgcccgggcaaagcccgggcgtcgggcgacctttggtcgcccggcctcagtgagcgagcgagcgcgcagagagggagtggccaactccatcactaggggttccttgtagttaatgattaacccgccatgctacttatctaccagggtaatggggatcctctagaactatagctagtcgacataacgcgttagtatctgcagagggccctgcgtatgagtgcaagtgggttttaggaccaggatgaggcggggtgggggtgcctacctgacgaccgaccccgacccactggacaagcacccaacccccattccccaaattgcgcatcccctatcagagagggggaggggaaacaggatgcggcgaggcgcgtgcgcactgccagcttcagcaccgcggacagtgccttcgcccccgcctggcggcgcgcgccaccgccgcctcagcactgaaggcgcgctgacgtcactcgccggtcccccgcaaactccccttcccggccaccttggtcgcgtccgcgccgccgccggcccagccggaccgcaccacgcgaggcgcgagataggggggcacgggcgcgaccatctgcgctgcggcgccggcgactcagcgctgcctcagtctgcggtgggcagcggaggagtcgtgtcgtgcctgagagcgcagctgtgctcctgggcaccgcgcagtccgcccccgcggctcctggccagaccacccctaggaccccctgccccaagtcgcagccaagcttcgtttagtgaaccgtcagatcgcctggagacgccatccacgctgttttgacctccatagaagacaccgggaccgatccagcctccgcggattcgaatcccggccgggaacggtgcattggaacgcggattccccgtgccaagagtgacgtaagtaccgcctatagagtctataggcccacaaaaaatgctttcttcttttaatatacttttttgtttatcttatttctaatactttccctaatctctttctttcagggcaataatgatacaatgtatcatgcctctttgcaccattctaaagaataacagtgataatttctgggttaaggcaatagcaatatttctgcatataaatatttctgcatataaattgtaactgatgtaagaggtttcatattgctaatagcagctacaatccagctaccattctgcttttattttatggttgggataaggctggattattctgagtccaagctaggcccttttgctaatcatgttcatacctcttatcttcctcccacagctcctgggcaacgtgctggtctgtgtgctggcccatcactttggcaaagaattgggattcgaaccggtgccgccaccatgaacttcgggctcagcttgattttccttgtccttgttttaaaaggtgtccagtgtgaggtgaagctggtggagagcggcggcgacctggtgaagcctggcggcagcctgaagctgagctgcgccgccagcggcttcaccttcagcagctacgccatgagctgggtgagacagaaccctgagaagagactggagtgggtggccagcatcagcaagggcggcaacacctactaccctaacagcgtgaagggcagattcaccatcagcagagacaacgccagaaacatcctgtacctgcagatgagcagcctgagaagcgaggacaccgccctgtactactgcgccagaggctggggcgactacggctggttcgcctactggggccaggtgaccctggtgaccgtgagcgccgccaaaacgacacccccatctgtctatccactggcccctggatctgctgcccaaactaactccatggtgaccctgggatgcctggtcaagggctatttccctgagccagtgacagtgacctggaactctggatccctgtccagcggtgtgcacaccttcccagctgtcctgcagtctgacctctacactctgagcagctcagtgactgtcccctccagcacctggcccagcgagaccgtcacctgcaacgttgcccacccggccagcagcaccaaggtggacaagaaaattgtgcccagggattgtggtgagctcaaaaccccacttggtgacacaactcacacatgcccacggtgcccagagcccaaatcttgtgacacacctcccccgtgcccacggtgcccagagcccaaatcttgtgacacacctcccccatgcccacggtgcccagagcccaaatcttgtgacacacctcccccgtgcccaaggtgcccagcacctgaactcagaaagaggcgaggaagcggagtgaaacagactttgaattttgaccttctcaagttggcgggagacgtggagtccaaccctggacctatgaagttgcctgttaggctgttggtgctgatgttctggattcctgcttccagcagtgacatcaagatgacccagagccctagcagcatgtacgccagcctgggcgagagagtgaccatcacctgcaaggccagccaggacatcaacagatacctgaactggttccagcagaagcctggcaagagccctaagaccctgatctacagagccaacagactgctggacggcgtgcctagcagattcagcggcagcggcagcggccaggactacagcctgaccatcagcagcctggactacgaggacatgggcatctactactgcctgcagtacgacgagttccctctgaccttcggcgacggcaccaagctggagctgaagcgggctgatgctgcaccaactgtatccatcttcccaccatccagtgagcagttaacatctggaggtgcctcagtcgtgtgcttcttgaacaacttctaccccaaagacatcaatgtcaagtggaagattgatggcagtgaacgacaaaatggcgtcctgaacagttggactgatcaggacagcaaagacagcacctacagcatgagcagcaccctcacgttgaccaaggacgagtatgaacgacataacagctatacctgtgaggccactcacaagacatcaacttcacccattgtcaagagcttcaacaggaatgagtgttagtaactcgaggacggggtgaactacgcctgaggatccgatctttttccctctgccaaaaattatggggacatcatgaagccccttgagcatctgacttctggctaataaaggaaatttattttcattgcaatagtgtgttggaattttttgtgtctctcactcggcctaggtagataagtagcatggcgggttaatcattaactacaaggaacccctagtgatggagttggccactccctctctgcgcgctcgctcgctcactgaggccgggcgaccaaaggtcgcccgacgcccgggctttgcccgggcggcctcagtgagcgagcgagcgcgcag

SEQ ID NO: 2267 - DNA, 3567 bp, Artificial Sequence
  Description of Artificial Sequence: Synthetic polynucleotide
ctgcgcgctcgctcgctcactgaggccgcccgggcaaagcccgggcgtcgggcgacctttggtcgcccggcctcagtgagcgagcgagcgcgcagagagggagtggccaactccatcactaggggttccttgtagttaatgattaacccgccatgctacttatctaccagggtaatggggatcctctagaactatagctagtcgacataacgcgtgatctaacatatcctggtgtggagtagcggacgctgctatgacagaggctcgggggcctgagctggctctgtgagctggggaggaggcagacagccaggccttgtctgcaagcagacctggcagcattgggctggccgccccccagggcctcctcttcatgcccagtgaatgactcaccttggcacagacacaatgttcggggtgggcacagtgcctgcttcccgccgcaccccagcccccctcaaatgccttccgagaagcccattgagcagggggcttgcattgcaccccagcctgacagcctggcatcttgggataaaagcagcacagccccctaggggctgcccttgctgtgtggcgccaccggcggtggagaacaaggctctattcagcctgtgcccaggaaaggggatcaggggatgcccaggcatggacagtgggtggcagggggggagaggagggctgtctgcttcccagaagtccaaggacacaaatgggtgaggggagagctctccccatagctgggctgcggcccaaccccaccccctcaggctatgccagggggtgttgccaggggcacccgggcatcgccagtctagcccactccttcataaagccctcgcatcccaggagcgagcagagccagagcaggttggagaggagacgcatcacctccgctgctcgcggggatcctctagaagcttcgtttagtgaaccgtcagatcgcctggagacgccatccacgctgttttgacctccatagaagacaccgggaccgatccagcctccgcggattcgaatcccggccgggaacggtgcattggaacgcggattccccgtgccaagagtgacgtaagtaccgcctatagagtctataggcccacaaaaaatgctttcttcttttaatatacttttttgtttatcttatttctaatactttccctaatctctttctttcagggcaataatgatacaatgtatcatgcctctttgcaccattctaaagaataacagtgataatttctgggttaaggcaatagcaatatttctgcatataaatatttctgcatataaattgtaactgatgtaagaggtttcatattgctaatagcagctacaatccagctaccattctgcttttattttatggttgggataaggctggattattctgagtccaagctaggcccttttgctaatcatgttcatacctcttatcttcctcccacagctcctgggcaacgtgctggtctgtgtgctggcccatcactttggcaaagaattgggattcgaaccggtgccgccaccatgaacttcgggctcagcttgattttccttgtccttgttttaaaaggtgtccagtgtgaggtgaagctggtggagagcggcggcgacctggtgaagcctggcggcagcctgaagctgagctgcgccgccagcggcttcaccttcagcagctacgccatgagctgggtgagacagaaccctgagaagagactggagtgggtggccagcatcagcaagggcggcaacacctactaccctaacagcgtgaagggcagattcaccatcagcagagacaacgccagaaacatcctgtacctgcagatgagcagcctgagaagcgaggacaccgccctgtactactgcgccagaggctggggcgactacggctggttcgcctactggggccaggtgaccctggtgaccgtgagcgccgccaaaacgacacccccatctgtctatccactggcccctggatctgctgcccaaactaactccatggtgaccctgggatgcctggtcaagggctatttccctgagccagtgacagtgacctggaactctggatccctgtccagcggtgtgcacaccttcccagctgtcctgcagtctgacctctacactctgagcagctcagtgactgtcccctccagcacctggcccagcgagaccgtcacctgcaacgttgcccacccggccagcagcaccaaggtggacaagaaaattgtgcccagggattgtggtgagctcaaaaccccacttggtgacacaactcacacatgcccacggtgcccagagcccaaatcttgtgacacacctcccccgtgcccacggtgcccagagcccaaatcttgtgacacacctcccccatgcccacggtgcccagagcccaaatcttgtgacacacctcccccgtgcccaaggtgcccagcacctgaactcagaaagaggcgaggaagcggagtgaaacagactttgaattttgaccttctcaagttggcgggagacgtggagtccaaccctggacctatgaagttgcctgttaggctgttggtgctgatgttctggattcctgcttccagcagtgacatcaagatgacccagagccctagcagcatgtacgccagcctgggcgagagagtgaccatcacctgcaaggccagccaggacatcaacagatacctgaactggttccagcagaagcctggcaagagccctaagaccctgatctacagagccaacagactgctggacggcgtgcctagcagattcagcggcagcggcagcggccaggactacagcctgaccatcagcagcctggactacgaggacatgggcatctactactgcctgcagtacgacgagttccctctgaccttcggcgacggcaccaagctggagctgaagcgggctgatgctgcaccaactgtatccatcttcccaccatccagtgagcagttaacatctggaggtgcctcagtcgtgtgcttcttgaacaacttctaccccaaagacatcaatgtcaagtggaagattgatggcagtgaacgacaaaatggcgtcctgaacagttggactgatcaggacagcaaagacagcacctacagcatgagcagcaccctcacgttgaccaaggacgagtatgaacgacataacagctatacctgtgaggccactcacaagacatcaacttcacccattgtcaagagcttcaacaggaatgagtgttagtaactcgaggacggggtgaactacgcctgaggatccgatctttttccctctgccaaaaattatggggacatcatgaagccccttgagcatctgacttctggctaataaaggaaatttattttcattgcaatagtgtgttggaattttttgtgtctctcactcggcctaggtagataagtagcatggcgggttaatcattaactacaaggaacccctagtgatggagttggccactccctctctgcgcgctcgctcgctcactgaggccgggcgaccaaaggtcgcccgacgcccgggctttgcccgggcggcctcagtgagcgagcgagcgcgcag

SEQ ID NO: 2268 - DNA, 3088 bp, Artificial Sequence
  Description of Artificial Sequence: Synthetic polynucleotide
ctgcgcgctcgctcgctcactgaggccgcccgggcaaagcccgggcgtcgggcgacctttggtcgcccggcctcagtgagcgagcgagcgcgcagagagggagtggccaactccatcactaggggttccttgtagttaatgattaacccgccatgctacttatctaccagggtaatggggatcctctagaactatagctagtcgacataacgcgtctagttattaatagtaatcaattacggggtcattagttcatagcccatatatggagttccgcgttacataacttacggtaaatggcccgcctggctgaccgcccaacgacccccgcccattgacgtcaataatgacgtatgttcccatagtaacgccaatagggactttccattgacgtcaatgggtggagtatttacggtaaactgcccacttggcagtacatcaagtgtatcatatgccaagtacgccccctattgacgtcaatgacggtaaatggcccgcctggcattatgcccagtacatgaccttatgggactttcctacttggcagtacatctacgtattagtcatcgctattaccatggtcgaggtgagccccacgttctgcttcactctccccatctcccccccctccccacccccaattttgtatttatttattttttaattattttgtgcagcgatgggggcggggggggggggggggcgcgcgccaggcggggcggggcggggcgaggggcggggcggggcgaggcggagaggtgcggcggcagccaatcagagcggcgcgctccgaaagtttccttttatggcgaggcggcggcggcggcggccctataaaaagcgaagcgcgcggcgggcgggagtcgctgcgcgctgccttcgccccgtgccccgctccgccgccgcctcgcgccgcccgccccggctctgactgaccgcgttactcccacaggtgagcgggcgggacggcccttctcctccgggctgtaattagcgcttggtttaatgacggcttgtttcttttctgtggctgcgtgaaagccttgaggggctccgggagggccctttgtgcggggggagcggctcggggggtgcgtgcgtgtgtgtgtgcgtggggagcgccgcgtgcggctccgcgctgcccggcggctgtgagcgctgcgggcgcggcgcggggctttgtgcgctccgcagtgtgcgcgaggggagcgcggccgggggcggtgccccgcggtgcggggggggctgcgaggggaacaaaggctgcgtgcggggtgtgtgcgtgggggggtgagcagggggtgtgggcgcgtcggtcgggctgcaaccccccctgcacccccctccccgagttgctgagcacggcccggcttcgggtgcggggctccgtacggggcgtggcgcggggctcgccgtgccgggcggggggtggcggcaggtgggggtgccgggcggggcggggccgcctcgggccggggagggctcgggggaggggcgcggcggcccccggagcgccggcggctgtcgaggcgcggcgagccgcagccattgccttttatggtaatcgtgcgagagggcgcagggacttcctttgtcccaaatctgtgcggagccgaaatctgggaggcgccgccgcaccccctctagcgggcgcggggcgaagcggtgcggcgccggcaggaaggaaatgggcggggagggccttcgtgcgtcgccgcgccgccgtccccttctccctctccagcctcggggctgtccgcggggggacggctgccttcgggggggacggggcagggcggggttcggcttctggcgtgtgaccggcggctctagagcctctgctaaccatgttcatgccttcttctttttcctacagctcctgggcaacgtgctggttattgtgctgtctcatcattttggcaaagaattcgggattcgaaccggtgccgccaccatgaagttgcctgttaggctgttggtgctgatgttctggattcctgcttccagcagtgacatcaagatgacccagagccctagcagcatgtacgccagcctgggcgagagagtgaccatcacctgcaaggccagccaggacatcaacagatacctgaactggttccagcagaagcctggcaagagccctaagaccctgatctacagagccaacagactgctggacggcgtgcctagcagattcagcggcagcggcagcggccaggactacagcctgaccatcagcagcctggactacgaggacatgggcatctactactgcctgcagtacgacgagttccctctgaccttcggcgacggcaccaagctggagctgaagggtggtggtggatccggtggtggtggatccggtggtggtggatccgaggtgaagctggtggagagcggcggcgacctggtgaagcctggcggcagcctgaagctgagctgcgccgccagcggcttcaccttcagcagctacgccatgagctgggtgagacagaaccctgagaagagactggagtgggtggccagcatcagcaagggcggcaacacctactaccctaacagcgtgaagggcagattcaccatcagcagagacaacgccagaaacatcctgtacctgcagatgagcagcctgagaagcgaggacaccgccctgtactactgcgccagaggctggggcgactacggctggttcgcctactggggccaggtgaccctggtgaccgtgagcgcccatcatcaccatcaccattagtaactcgaggacggggtgaactacgcctgaggatccgatctttttccctctgccaaaaattatggggacatcatgaagccccttgagcatctgacttctggctaataaaggaaatttattttcattgcaatagtgtgttggaattttttgtgtctctcactcggcctaggtagataagtagcatggcgggttaatcattaactacaaggaacccctagtgatggagttggccactccctctctgcgcgctcgctcgctcactgaggccgggcgaccaaaggtcgcccgacgcccgggctttgcccgggcggcctcagtgagcgagcgagcgcgcag

SEQ ID NO: 2269 - DNA, 3558 bp, Artificial Sequence
  Description of Artificial Sequence: Synthetic polynucleotide
ctgcgcgctcgctcgctcactgaggccgcccgggcaaagcccgggcgtcgggcgacctttggtcgcccggcctcagtgagcgagcgagcgcgcagagagggagtggccaactccatcactaggggttccttgtagttaatgattaacccgccatgctacttatctaccagggtaatggggatcctctagaactatagctagtcgacataacgcgtgatctaacatatcctggtgtggagtagcggacgctgctatgacagaggctcgggggcctgagctggctctgtgagctggggaggaggcagacagccaggccttgtctgcaagcagacctggcagcattgggctggccgccccccagggcctcctcttcatgcccagtgaatgactcaccttggcacagacacaatgttcggggtgggcacagtgcctgcttcccgccgcaccccagcccccctcaaatgccttccgagaagcccattgagcagggggcttgcattgcaccccagcctgacagcctggcatcttgggataaaagcagcacagccccctaggggctgcccttgctgtgtggcgccaccggcggtggagaacaaggctctattcagcctgtgcccaggaaaggggatcaggggatgcccaggcatggacagtgggtggcagggggggagaggagggctgtctgcttcccagaagtccaaggacacaaatgggtgaggggagagctctccccatagctgggctgcggcccaaccccaccccctcaggctatgccagggggtgttgccaggggcacccgggcatcgccagtctagcccactccttcataaagccctcgcatcccaggagcgagcagagccagagcaggttggagaggagacgcatcacctccgctgctcgcggggatcctctagaagcttcgtttagtgaaccgtcagatcgcctggagacgccatccacgctgttttgacctccatagaagacaccgggaccgatccagcctccgcggattcgaatcccggccgggaacggtgcattggaacgcggattccccgtgccaagagtgacgtaagtaccgcctatagagtctataggcccacaaaaaatgctttcttcttttaatatacttttttgtttatcttatttctaatactttccctaatctctttctttcagggcaataatgatacaatgtatcatgcctctttgcaccattctaaagaataacagtgataatttctgggttaaggcaatagcaatatttctgcatataaatatttctgcatataaattgtaactgatgtaagaggtttcatattgctaatagcagctacaatccagctaccattctgcttttattttatggttgggataaggctggattattctgagtccaagctaggcccttttgctaatcatgttcatacctcttatcttcctcccacagctcctgggcaacgtgctggtctgtgtgctggcccatcactttggcaaagaattgggattcgaaccggtgccgccaccatgaacttcgggctcagcttgattttccttgtccttgttttaaaaggtgtccagtgtgaggttcatctggtggagtctgggggagccttagtgaagcctggagggtccctgaaactctcctgtgcagcctctggattcagtttcagtaaatatggcatgtcttgggttcgccagactccagacaagaggctggagtgggtcgcaaccattagtagtagtgggagtcgcacctactatccagacagtgtgaagggccaattcaccatctccagagacaatgccaagaacaccctgtacctgcaaatgagcagtctgaagtctgaggacacagccatgtattactgttcaattagctgggacggtgctatggactactggggtcaagggacctcagtcaccgtctcctcagccaaaacgacacccccatctgtctatccactggcccctggatctgctgcccaaactaactccatggtgaccctgggatgcctggtcaagggctatttccctgagccagtgacagtgacctggaactctggatccctgtccagcggtgtgcacaccttcccagctgtcctgcagtctgacctctacactctgagcagctcagtgactgtcccctccagcacctggcccagcgagaccgtcacctgcaacgttgcccacccggccagcagcaccaaggtggacaagaaaattgtgcccagggattgtggtgagctcaaaaccccacttggtgacacaactcacacatgcccacggtgcccagagcccaaatcttgtgacacacctcccccgtgcccacggtgcccagagcccaaatcttgtgacacaactcacacatgcccacggtgcccagagcccaaatcttgtgacacacctcccccgtgcccaaggtgcccagcacctgaactcagaaagaggcgagagggcagaggaagtcttctaacatgcggtgacgtggaggagaatcccggccctatgaagttgcctgttaggctgttggtgctgatgttctggattcctgcttccagcagtgatgttttgatgacccaaactccactctccctgcctgtcagtcttggagatcaagcctccatctcttgcaaatctagtcagagcattgtacatagtaatggaaacacctatttagaatggtacctgcagaaaccaggccagtctccaaagctcctggtctacaaagtttccaatcgattttctggggtcccagacaggttcagtggcagtggatcagggacagatttcacactcaagatcagcagagtggaggctgaggatctgggaacttattactgctttcaaggttcacttgttccttgggcgttcggtggaggcaccaagctggaaatcaaacgggctgatgctgcaccaactgtatccatcttcccaccatccagtgagcagttaacatctggaggtgcctcagtcgtgtgcttcttgaacaacttctaccccaaagacatcaatgtcaagtggaagattgatggcagtgaacgacaaaatggcgtcctgaacagttggactgatcaggacagcaaagacagcacctacagcatgagcagcaccctcacgttgaccaaggacgagtatgaacgacataacagctatacctgtgaggccactcacaagacatcaacttcacccattgtcaagagcttcaacaggaatgagtgttagtaactcgaggacggggtgaactacgcctgaggatccgatctttttccctctgccaaaaattatggggacatcatgaagccccttgagcatctgacttctggctaataaaggaaatttattttcattgcaatagtgtgttggaattttttgtgtctctcactcggcctaggtagataagtagcatggcgggttaatcattaactacaaggaacccctagtgatggagttggccactccctctctgcgcgctcgctcgctcactgaggccgggcgaccaaaggtcgcccgacgcccgggctttgcccgggcggcctcagtgagcgagcgagcgcgcag

SEQ ID NO: 2270 - DNA, 3360 bp, Artificial Sequence
  Description of Artificial Sequence: Synthetic polynucleotide
ctgcgcgctcgctcgctcactgaggccgcccgggcaaagcccgggcgtcgggcgacctttggtcgcccggcctcagtgagcgagcgagcgcgcagagagggagtggccaactccatcactaggggttccttgtagttaatgattaacccgccatgctacttatctaccagggtaatggggatcctctagaactatagctagtcgacataacgcgtgatctaacatatcctggtgtggagtagcggacgctgctatgacagaggctcgggggcctgagctggctctgtgagctggggaggaggcagacagccaggccttgtctgcaagcagacctggcagcattgggctggccgccccccagggcctcctcttcatgcccagtgaatgactcaccttggcacagacacaatgttcggggtgggcacagtgcctgcttcccgccgcaccccagcccccctcaaatgccttccgagaagcccattgagcagggggcttgcattgcaccccagcctgacagcctggcatcttgggataaaagcagcacagccccctaggggctgcccttgctgtgtggcgccaccggcggtggagaacaaggctctattcagcctgtgcccaggaaaggggatcaggggatgcccaggcatggacagtgggtggcagggggggagaggagggctgtctgcttcccagaagtccaaggacacaaatgggtgaggggagagctctccccatagctgggctgcggcccaaccccaccccctcaggctatgccagggggtgttgccaggggcacccgggcatcgccagtctagcccactccttcataaagccctcgcatcccaggagcgagcagagccagagcaggttggagaggagacgcatcacctccgctgctcgcggggatcctctagaagcttcgtttagtgaaccgtcagatcgcctggagacgccatccacgctgttttgacctccatagaagacaccgggaccgatccagcctccgcggattcgaatcccggccgggaacggtgcattggaacgcggattccccgtgccaagagtgacgtaagtaccgcctatagagtctataggcccacaaaaaatgctttcttcttttaatatacttttttgtttatcttatttctaatactttccctaatctctttctttcagggcaataatgatacaatgtatcatgcctctttgcaccattctaaagaataacagtgataatttctgggttaaggcaatagcaatatttctgcatataaatatttctgcatataaattgtaactgatgtaagaggtttcatattgctaatagcagctacaatccagctaccattctgcttttattttatggttgggataaggctggattattctgagtccaagctaggcccttttgctaatcatgttcatacctcttatcttcctcccacagctcctgggcaacgtgctggtctgtgtgctggcccatcactttggcaaagaattgggattcgaaccggtgccgccaccatgaacttcgggctcagcttgattttccttgtccttgttttaaaaggtgtccagtgtgaggttcatctggtggagtctgggggagccttagtgaagcctggagggtccctgaaactctcctgtgcagcctctggattcagtttcagtaaatatggcatgtcttgggttcgccagactccagacaagaggctggagtgggtcgcaaccattagtagtagtgggagtcgcacctactatccagacagtgtgaagggccaattcaccatctccagagacaatgccaagaacaccctgtacctgcaaatgagcagtctgaagtctgaggacacagccatgtattactgttcaattagctgggacggtgctatggactactggggtcaagggacctcagtcaccgtctcctcagccaaaacgacacccccatctgtctatccactggcccctggatctgctgcccaaactaactccatggtgaccctgggatgcctggtcaagggctatttccctgagccagtgacagtgacctggaactctggatccctgtccagcggtgtgcacaccttcccagctgtcctgcagtctgacctctacactctgagcagctcagtgactgtcccctccagcacctggcccagcgagaccgtcacctgcaacgttgcccacccggccagcagcaccaaggtggacaagaaaattgtgcccagggattgtggtagaaagaggcgagagggcagaggaagtcttctaacatgcggtgacgtggaggagaatcccggccctatgaagttgcctgttaggctgttggtgctgatgttctggattcctgcttccagcagtgatgttttgatgacccaaactccactctccctgcctgtcagtcttggagatcaagcctccatctcttgcaaatctagtcagagcattgtacatagtaatggaaacacctatttagaatggtacctgcagaaaccaggccagtctccaaagctcctggtctacaaagtttccaatcgattttctggggtcccagacaggttcagtggcagtggatcagggacagatttcacactcaagatcagcagagtggaggctgaggatctgggaacttattactgctttcaaggttcacttgttccttgggcgttcggtggaggcaccaagctggaaatcaaacgggctgatgctgcaccaactgtatccatcttcccaccatccagtgagcagttaacatctggaggtgcctcagtcgtgtgcttcttgaacaacttctaccccaaagacatcaatgtcaagtggaagattgatggcagtgaacgacaaaatggcgtcctgaacagttggactgatcaggacagcaaagacagcacctacagcatgagcagcaccctcacgttgaccaaggacgagtatgaacgacataacagctatacctgtgaggccactcacaagacatcaacttcacccattgtcaagagcttcaacaggaatgagtgttagtaactcgaggacggggtgaactacgcctgaggatccgatctttttccctctgccaaaaattatggggacatcatgaagccccttgagcatctgacttctggctaataaaggaaatttattttcattgcaatagtgtgttggaattttttgtgtctctcactcggcctaggtagataagtagcatggcgggttaatcattaactacaaggaacccctagtgatggagttggccactccctctctgcgcgctcgctcgctcactgaggccgggcgaccaaaggtcgcccgacgcccgggctttgcccgggcggcctcagtgagcgagcgagcgcgcag

SEQ ID NO: 2271 - DNA, 3384 bp, Artificial Sequence
  Description of Artificial Sequence: Synthetic polynucleotide
ctgcgcgctcgctcgctcactgaggccgcccgggcaaagcccgggcgtcgggcgacctttggtcgcccggcctcagtgagcgagcgagcgcgcagagagggagtggccaactccatcactaggggttccttgtagttaatgattaacccgccatgctacttatctaccagggtaatggggatcctctagaactatagctagtcgacataacgcgtgatctaacatatcctggtgtggagtagcggacgctgctatgacagaggctcgggggcctgagctggctctgtgagctggggaggaggcagacagccaggccttgtctgcaagcagacctggcagcattgggctggccgccccccagggcctcctcttcatgcccagtgaatgactcaccttggcacagacacaatgttcggggtgggcacagtgcctgcttcccgccgcaccccagcccccctcaaatgccttccgagaagcccattgagcagggggcttgcattgcaccccagcctgacagcctggcatcttgggataaaagcagcacagccccctaggggctgcccttgctgtgtggcgccaccggcggtggagaacaaggctctattcagcctgtgcccaggaaaggggatcaggggatgcccaggcatggacagtgggtggcagggggggagaggagggctgtctgcttcccagaagtccaaggacacaaatgggtgaggggagagctctccccatagctgggctgcggcccaaccccaccccctcaggctatgccagggggtgttgccaggggcacccgggcatcgccagtctagcccactccttcataaagccctcgcatcccaggagcgagcagagccagagcaggttggagaggagacgcatcacctccgctgctcgcggggatcctctagaagcttcgtttagtgaaccgtcagatcgcctggagacgccatccacgctgttttgacctccatagaagacaccgggaccgatccagcctccgcggattcgaatcccggccgggaacggtgcattggaacgcggattccccgtgccaagagtgacgtaagtaccgcctatagagtctataggcccacaaaaaatgctttcttcttttaatatacttttttgtttatcttatttctaatactttccctaatctctttctttcagggcaataatgatacaatgtatcatgcctctttgcaccattctaaagaataacagtgataatttctgggttaaggcaatagcaatatttctgcatataaatatttctgcatataaattgtaactgatgtaagaggtttcatattgctaatagcagctacaatccagctaccattctgcttttattttatggttgggataaggctggattattctgagtccaagctaggcccttttgctaatcatgttcatacctcttatcttcctcccacagctcctgggcaacgtgctggtctgtgtgctggcccatcactttggcaaagaattgggattcgaaccggtgccgccaccatgaagttgcctgttaggctgttggtgctgatgttctggattcctgcttccagcagtgatgttttgatgacccaaactccactctccctgcctgtcagtcttggagatcaagcctccatctcttgcaaatctagtcagagcattgtacatagtaatggaaacacctatttagaatggtacctgcagaaaccaggccagtctccaaagctcctggtctacaaagtttccaatcgattttctggggtcccagacaggttcagtggcagtggatcagggacagatttcacactcaagatcagcagagtggaggctgaggatctgggaacttattactgctttcaaggttcacttgttccttgggcgttcggtggaggcaccaagctggaaatcaaacgggctgatgctgcaccaactgtatccatcttcccaccatccagtgagcagttaacatctggaggtgcctcagtcgtgtgcttcttgaacaacttctaccccaaagacatcaatgtcaagtggaagattgatggcagtgaacgacaaaatggcgtcctgaacagttggactgatcaggacagcaaagacagcacctacagcatgagcagcaccctcacgttgaccaaggacgagtatgaacgacataacagctatacctgtgaggccactcacaagacatcaacttcacccattgtcaagagcttcaacaggaatgagtgtgagggcagaggaagtcttctaacatgcggtgacgtggaggagaatcccggccctatgaacttcgggctcagcttgattttccttgtccttgttttaaaaggtgtccagtgtgaggttcatctggtggagtctgggggagccttagtgaagcctggagggtccctgaaactctcctgtgcagcctctggattcagtttcagtaaatatggcatgtcttgggttcgccagactccagacaagaggctggagtgggtcgcaaccattagtagtagtgggagtcgcacctactatccagacagtgtgaagggccaattcaccatctccagagacaatgccaagaacaccctgtacctgcaaatgagcagtctgaagtctgaggacacagccatgtattactgttcaattagctgggacggtgctatggactactggggtcaagggacctcagtcaccgtctcctcagccaaaacgacacccccatctgtctatccactggcccctggatctgctgcccaaactaactccatggtgaccctgggatgcctggtcaagggctatttccctgagccagtgacagtgacctggaactctggatccctgtccagcggtgtgcacaccttcccagctgtcctgcagtctgacctctacactctgagcagctcagtgactgtcccctccagcacctggcccagcgagaccgtcacctgcaacgttgcccacccggccagcagcaccaaggtggacaagaaaattgtgcccagggattgtggttaggcaattgaaggcgaattgttaattaagaattcactcctcatcgaggacggggtgaactacgcctgaggatccgatctttttccctctgccaaaaattatggggacatcatgaagccccttgagcatctgacttctggctaataaaggaaatttattttcattgcaatagtgtgttggaattttttgtgtctctcactcggcctaggtagataagtagcatggcgggttaatcattaactacaaggaacccctagtgatggagttggccactccctctctgcgcgctcgctcgctcactgaggccgggcgaccaaaggtcgcccgacgcccgggctttgcccgggcggcctcagtgagcgagcgagcgcgcag

SEQ ID NO: 2272 - DNA, 2625 bp, Artificial Sequence
  Description of Artificial Sequence: Synthetic polynucleotide
ctgcgcgctcgctcgctcactgaggccgcccgggcaaagcccgggcgtcgggcgacctttggtcgcccggcctcagtgagcgagcgagcgcgcagagagggagtggccaactccatcactaggggttccttgtagttaatgattaacccgccatgctacttatctaccagggtaatggggatcctctagaactatagctagtcgacataacgcgtgatctaacatatcctggtgtggagtagcggacgctgctatgacagaggctcgggggcctgagctggctctgtgagctggggaggaggcagacagccaggccttgtctgcaagcagacctggcagcattgggctggccgccccccagggcctcctcttcatgcccagtgaatgactcaccttggcacagacacaatgttcggggtgggcacagtgcctgcttcccgccgcaccccagcccccctcaaatgccttccgagaagcccattgagcagggggcttgcattgcaccccagcctgacagcctggcatcttgggataaaagcagcacagccccctaggggctgcccttgctgtgtggcgccaccggcggtggagaacaaggctctattcagcctgtgcccaggaaaggggatcaggggatgcccaggcatggacagtgggtggcagggggggagaggagggctgtctgcttcccagaagtccaaggacacaaatgggtgaggggagagctctccccatagctgggctgcggcccaaccccaccccctcaggctatgccagggggtgttgccaggggcacccgggcatcgccagtctagcccactccttcataaagccctcgcatcccaggagcgagcagagccagagcaggttggagaggagacgcatcacctccgctgctcgcggggatcctctagaagcttcgtttagtgaaccgtcagatcgcctggagacgccatccacgctgttttgacctccatagaagacaccgggaccgatccagcctccgcggattcgaatcccggccgggaacggtgcattggaacgcggattccccgtgccaagagtgacgtaagtaccgcctatagagtctataggcccacaaaaaatgctttcttcttttaatatacttttttgtttatcttatttctaatactttccctaatctctttctttcagggcaataatgatacaatgtatcatgcctctttgcaccattctaaagaataacagtgataatttctgggttaaggcaatagcaatatttctgcatataaatatttctgcatataaattgtaactgatgtaagaggtttcatattgctaatagcagctacaatccagctaccattctgcttttattttatggttgggataaggctggattattctgagtccaagctaggcccttttgctaatcatgttcatacctcttatcttcctcccacagctcctgggcaacgtgctggtctgtgtgctggcccatcactttggcaaagaattgggattcgaaccggtgccgccaccatgaacttcgggctcagcttgattttccttgtccttgttttaaaaggtgtccagtgtgaggttcatctggtggagtctgggggagccttagtgaagcctggagggtccctgaaactctcctgtgcagcctctggattcagtttcagtaaatatggcatgtcttgggttcgccagactccagacaagaggctggagtgggtcgcaaccattagtagtagtgggagtcgcacctactatccagacagtgtgaagggccaattcaccatctccagagacaatgccaagaacaccctgtacctgcaaatgagcagtctgaagtctgaggacacagccatgtattactgttcaattagctgggacggtgctatggactactggggtcaagggacctcagtcaccgtctcctcaggtggtggtggatccgatgttttgatgacccaaactccactctccctgcctgtcagtcttggagatcaagcctccatctcttgcaaatctagtcagagcattgtacatagtaatggaaacacctatttagaatggtacctgcagaaaccaggccagtctccaaagctcctggtctacaaagtttccaatcgattttctggggtcccagacaggttcagtggcagtggatcagggacagatttcacactcaagatcagcagagtggaggctgaggatctgggaacttattactgctttcaaggttcacttgttccttgggcgttcggtggaggcaccaagctggaaatcaaatacccatacgatgttccagattacgcttagtgacctgaggatgatctttttccctctgccaaaaattatggggacatcatgaagccccttgagcatctgacttctggctaataaaggaaatttattttcattgcaatagtgtgttggaattttttgtgtctctcactcggcctaggtagataagtagcatggcgggttaatcattaactacaaggaacccctagtgatggagttggccactccctctctgcgcgctcgctcgctcactgaggccgggcgaccaaaggtcgcccgacgcccgggctttgcccgggcggcctcagtgagcgagcgagcgcgcag

SEQ ID NO: 2273 - DNA, 2655 bp, Artificial Sequence
  Description of Artificial Sequence: Synthetic polynucleotide
ctgcgcgctcgctcgctcactgaggccgcccgggcaaagcccgggcgtcgggcgacctttggtcgcccggcctcagtgagcgagcgagcgcgcagagagggagtggccaactccatcactaggggttccttgtagttaatgattaacccgccatgctacttatctaccagggtaatggggatcctctagaactatagctagtcgacataacgcgtgatctaacatatcctggtgtggagtagcggacgctgctatgacagaggctcgggggcctgagctggctctgtgagctggggaggaggcagacagccaggccttgtctgcaagcagacctggcagcattgggctggccgccccccagggcctcctcttcatgcccagtgaatgactcaccttggcacagacacaatgttcggggtgggcacagtgcctgcttcccgccgcaccccagcccccctcaaatgccttccgagaagcccattgagcagggggcttgcattgcaccccagcctgacagcctggcatcttgggataaaagcagcacagccccctaggggctgcccttgctgtgtggcgccaccggcggtggagaacaaggctctattcagcctgtgcccaggaaaggggatcaggggatgcccaggcatggacagtgggtggcagggggggagaggagggctgtctgcttcccagaagtccaaggacacaaatgggtgaggggagagctctccccatagctgggctgcggcccaaccccaccccctcaggctatgccagggggtgttgccaggggcacccgggcatcgccagtctagcccactccttcataaagccctcgcatcccaggagcgagcagagccagagcaggttggagaggagacgcatcacctccgctgctcgcggggatcctctagaagcttcgtttagtgaaccgtcagatcgcctggagacgccatccacgctgttttgacctccatagaagacaccgggaccgatccagcctccgcggattcgaatcccggccgggaacggtgcattggaacgcggattccccgtgccaagagtgacgtaagtaccgcctatagagtctataggcccacaaaaaatgctttcttcttttaatatacttttttgtttatcttatttctaatactttccctaatctctttctttcagggcaataatgatacaatgtatcatgcctctttgcaccattctaaagaataacagtgataatttctgggttaaggcaatagcaatatttctgcatataaatatttctgcatataaattgtaactgatgtaagaggtttcatattgctaatagcagctacaatccagctaccattctgcttttattttatggttgggataaggctggattattctgagtccaagctaggcccttttgctaatcatgttcatacctcttatcttcctcccacagctcctgggcaacgtgctggtctgtgtgctggcccatcactttggcaaagaattgggattcgaaccggtgccgccaccatgaacttcgggctcagcttgattttccttgtccttgttttaaaaggtgtccagtgtgaggttcatctggtggagtctgggggagccttagtgaagcctggagggtccctgaaactctcctgtgcagcctctggattcagtttcagtaaatatggcatgtcttgggttcgccagactccagacaagaggctggagtgggtcgcaaccattagtagtagtgggagtcgcacctactatccagacagtgtgaagggccaattcaccatctccagagacaatgccaagaacaccctgtacctgcaaatgagcagtctgaagtctgaggacacagccatgtattactgttcaattagctgggacggtgctatggactactggggtcaagggacctcagtcaccgtctcctcaggtggtggtggtagcggcggcggcggctctggtggtggtggatccgatgttttgatgacccaaactccactctccctgcctgtcagtcttggagatcaagcctccatctcttgcaaatctagtcagagcattgtacatagtaatggaaacacctatttagaatggtacctgcagaaaccaggccagtctccaaagctcctggtctacaaagtttccaatcgattttctggggtcccagacaggttcagtggcagtggatcagggacagatttcacactcaagatcagcagagtggaggctgaggatctgggaacttattactgctttcaaggttcacttgttccttgggcgttcggtggaggcaccaagctggaaatcaaatacccatacgatgttccagattacgcttagtgacctgaggatgatctttttccctctgccaaaaattatggggacatcatgaagccccttgagcatctgacttctggctaataaaggaaatttattttcattgcaatagtgtgttggaattttttgtgtctctcactcggcctaggtagataagtagcatggcgggttaatcattaactacaaggaacccctagtgatggagttggccactccctctctgcgcgctcgctcgctcactgaggccgggcgaccaaaggtcgcccgacgcccgggctttgcccgggcggcctcagtgagcgagcgagcgcgcag

SEQ ID NO: 2274 - DNA, 2685 bp, Artificial Sequence
  Description of Artificial Sequence: Synthetic polynucleotide
ctgcgcgctcgctcgctcactgaggccgcccgggcaaagcccgggcgtcgggcgacctttggtcgcccggcctcagtgagcgagcgagcgcgcagagagggagtggccaactccatcactaggggttccttgtagttaatgattaacccgccatgctacttatctaccagggtaatggggatcctctagaactatagctagtcgacataacgcgtgatctaacatatcctggtgtggagtagcggacgctgctatgacagaggctcgggggcctgagctggctctgtgagctggggaggaggcagacagccaggccttgtctgcaagcagacctggcagcattgggctggccgccccccagggcctcctcttcatgcccagtgaatgactcaccttggcacagacacaatgttcggggtgggcacagtgcctgcttcccgccgcaccccagcccccctcaaatgccttccgagaagcccattgagcagggggcttgcattgcaccccagcctgacagcctggcatcttgggataaaagcagcacagccccctaggggctgcccttgctgtgtggcgccaccggcggtggagaacaaggctctattcagcctgtgcccaggaaaggggatcaggggatgcccaggcatggacagtgggtggcagggggggagaggagggctgtctgcttcccagaagtccaaggacacaaatgggtgaggggagagctctccccatagctgggctgcggcccaaccccaccccctcaggctatgccagggggtgttgccaggggcacccgggcatcgccagtctagcccactccttcataaagccctcgcatcccaggagcgagcagagccagagcaggttggagaggagacgcatcacctccgctgctcgcggggatcctctagaagcttcgtttagtgaaccgtcagatcgcctggagacgccatccacgctgttttgacctccatagaagacaccgggaccgatccagcctccgcggattcgaatcccggccgggaacggtgcattggaacgcggattccccgtgccaagagtgacgtaagtaccgcctatagagtctataggcccacaaaaaatgctttcttcttttaatatacttttttgtttatcttatttctaatactttccctaatctctttctttcagggcaataatgatacaatgtatcatgcctctttgcaccattctaaagaataacagtgataatttctgggttaaggcaatagcaatatttctgcatataaatatttctgcatataaattgtaactgatgtaagaggtttcatattgctaatagcagctacaatccagctaccattctgcttttattttatggttgggataaggctggattattctgagtccaagctaggcccttttgctaatcatgttcatacctcttatcttcctcccacagctcctgggcaacgtgctggtctgtgtgctggcccatcactttggcaaagaattgggattcgaaccggtgccgccaccatgaacttcgggctcagcttgattttccttgtccttgttttaaaaggtgtccagtgtgaggttcatctggtggagtctgggggagccttagtgaagcctggagggtccctgaaactctcctgtgcagcctctggattcagtttcagtaaatatggcatgtcttgggttcgccagactccagacaagaggctggagtgggtcgcaaccattagtagtagtgggagtcgcacctactatccagacagtgtgaagggccaattcaccatctccagagacaatgccaagaacaccctgtacctgcaaatgagcagtctgaagtctgaggacacagccatgtattactgttcaattagctgggacggtgctatggactactggggtcaagggacctcagtcaccgtctcctcaggtggtggtggtagcggcggcggcggctctggtggtggtggatccggtggtggtggatccggtggtggtggatccgatgttttgatgacccaaactccactctccctgcctgtcagtcttggagatcaagcctccatctcttgcaaatctagtcagagcattgtacatagtaatggaaacacctatttagaatggtacctgcagaaaccaggccagtctccaaagctcctggtctacaaagtttccaatcgattttctggggtcccagacaggttcagtggcagtggatcagggacagatttcacactcaagatcagcagagtggaggctgaggatctgggaacttattactgctttcaaggttcacttgttccttgggcgttcggtggaggcaccaagctggaaatcaaatacccatacgatgttccagattacgcttagtgacctgaggatgatctttttccctctgccaaaaattatggggacatcatgaagccccttgagcatctgacttctggctaataaaggaaatttattttcattgcaatagtgtgttggaattttttgtgtctctcactcggcctaggtagataagtagcatggcgggttaatcattaactacaaggaacccctagtgatggagttggccactccctctctgcgcgctcgctcgctcactgaggccgggcgaccaaaggtcgcccgacgcccgggctttgcccgggcggcctcagtgagcgagcgagcgcgcag

SEQ ID NO: 2275 - DNA, 2730 bp, Artificial Sequence
  Description of Artificial Sequence: Synthetic polynucleotide
ctgcgcgctcgctcgctcactgaggccgcccgggcaaagcccgggcgtcgggcgacctttggtcgcccggcctcagtgagcgagcgagcgcgcagagagggagtggccaactccatcactaggggttccttgtagttaatgattaacccgccatgctacttatctaccagggtaatggggatcctctagaactatagctagtcgacataacgcgtgatctaacatatcctggtgtggagtagcggacgctgctatgacagaggctcgggggcctgagctggctctgtgagctggggaggaggcagacagccaggccttgtctgcaagcagacctggcagcattgggctggccgccccccagggcctcctcttcatgcccagtgaatgactcaccttggcacagacacaatgttcggggtgggcacagtgcctgcttcccgccgcaccccagcccccctcaaatgccttccgagaagcccattgagcagggggcttgcattgcaccccagcctgacagcctggcatcttgggataaaagcagcacagccccctaggggctgcccttgctgtgtggcgccaccggcggtggagaacaaggctctattcagcctgtgcccaggaaaggggatcaggggatgcccaggcatggacagtgggtggcagggggggagaggagggctgtctgcttcccagaagtccaaggacacaaatgggtgaggggagagctctccccatagctgggctgcggcccaaccccaccccctcaggctatgccagggggtgttgccaggggcacccgggcatcgccagtctagcccactccttcataaagccctcgcatcccaggagcgagcagagccagagcaggttggagaggagacgcatcacctccgctgctcgcggggatcctctagaagcttcgtttagtgaaccgtcagatcgcctggagacgccatccacgctgttttgacctccatagaagacaccgggaccgatccagcctccgcggattcgaatcccggccgggaacggtgcattggaacgcggattccccgtgccaagagtgacgtaagtaccgcctatagagtctataggcccacaaaaaatgctttcttcttttaatatacttttttgtttatcttatttctaatactttccctaatctctttctttcagggcaataatgatacaatgtatcatgcctctttgcaccattctaaagaataacagtgataatttctgggttaaggcaatagcaatatttctgcatataaatatttctgcatataaattgtaactgatgtaagaggtttcatattgctaatagcagctacaatccagctaccattctgcttttattttatggttgggataaggctggattattctgagtccaagctaggcccttttgctaatcatgttcatacctcttatcttcctcccacagctcctgggcaacgtgctggtctgtgtgctggcccatcactttggcaaagaattgggattcgaaccggtgccgccaccatgaacttcgggctcagcttgattttccttgtccttgttttaaaaggtgtccagtgtgaggttcatctggtggagtctgggggagccttagtgaagcctggagggtccctgaaactctcctgtgcagcctctggattcagtttcagtaaatatggcatgtcttgggttcgccagactccagacaagaggctggagtgggtcgcaaccattagtagtagtgggagtcgcacctactatccagacagtgtgaagggccaattcaccatctccagagacaatgccaagaacaccctgtacctgcaaatgagcagtctgaagtctgaggacacagccatgtattactgttcaattagctgggacggtgctatggactactggggtcaagggacctcagtcaccgtctcctcaggtggtggtggtagcggcggcggcggctctggtggtggtggatccggtggtggtggatccggtggtggtggatccggtggtggtggatccggtggtggtggatccggtggtggtggatccgatgttttgatgacccaaactccactctccctgcctgtcagtcttggagatcaagcctccatctcttgcaaatctagtcagagcattgtacatagtaatggaaacacctatttagaatggtacctgcagaaaccaggccagtctccaaagctcctggtctacaaagtttccaatcgattttctggggtcccagacaggttcagtggcagtggatcagggacagatttcacactcaagatcagcagagtggaggctgaggatctgggaacttattactgctttcaaggttcacttgttccttgggcgttcggtggaggcaccaagctggaaatcaaatacccatacgatgttccagattacgcttagtgacctgaggatgatctttttccctctgccaaaaattatggggacatcatgaagccccttgagcatctgacttctggctaataaaggaaatttattttcattgcaatagtgtgttggaattttttgtgtctctcactcggcctaggtagataagtagcatggcgggttaatcattaactacaaggaacccctagtgatggagttggccactccctctctgcgcgctcgctcgctcactgaggccgggcgaccaaaggtcgcccgacgcccgggctttgcccgggcggcctcagtgagcgagcgagcgcgcag

SEQ ID NO: 2276 - DNA, 2625 bp, Artificial Sequence
  Description of Artificial Sequence: Synthetic polynucleotide
ctgcgcgctcgctcgctcactgaggccgcccgggcaaagcccgggcgtcgggcgacctttggtcgcccggcctcagtgagcgagcgagcgcgcagagagggagtggccaactccatcactaggggttccttgtagttaatgattaacccgccatgctacttatctaccagggtaatggggatcctctagaactatagctagtcgacataacgcgtgatctaacatatcctggtgtggagtagcggacgctgctatgacagaggctcgggggcctgagctggctctgtgagctggggaggaggcagacagccaggccttgtctgcaagcagacctggcagcattgggctggccgccccccagggcctcctcttcatgcccagtgaatgactcaccttggcacagacacaatgttcggggtgggcacagtgcctgcttcccgccgcaccccagcccccctcaaatgccttccgagaagcccattgagcagggggcttgcattgcaccccagcctgacagcctggcatcttgggataaaagcagcacagccccctaggggctgcccttgctgtgtggcgccaccggcggtggagaacaaggctctattcagcctgtgcccaggaaaggggatcaggggatgcccaggcatggacagtgggtggcagggggggagaggagggctgtctgcttcccagaagtccaaggacacaaatgggtgaggggagagctctccccatagctgggctgcggcccaaccccaccccctcaggctatgccagggggtgttgccaggggcacccgggcatcgccagtctagcccactccttcataaagccctcgcatcccaggagcgagcagagccagagcaggttggagaggagacgcatcacctccgctgctcgcggggatcctctagaagcttcgtttagtgaaccgtcagatcgcctggagacgccatccacgctgttttgacctccatagaagacaccgggaccgatccagcctccgcggattcgaatcccggccgggaacggtgcattggaacgcggattccccgtgccaagagtgacgtaagtaccgcctatagagtctataggcccacaaaaaatgctttcttcttttaatatacttttttgtttatcttatttctaatactttccctaatctctttctttcagggcaataatgatacaatgtatcatgcctctttgcaccattctaaagaataacagtgataatttctgggttaaggcaatagcaatatttctgcatataaatatttctgcatataaattgtaactgatgtaagaggtttcatattgctaatagcagctacaatccagctaccattctgcttttattttatggttgggataaggctggattattctgagtccaagctaggcccttttgctaatcatgttcatacctcttatcttcctcccacagctcctgggcaacgtgctggtctgtgtgctggcccatcactttggcaaagaattgggattcgaaccggtgccgccaccatgaagttgcctgttaggctgttggtgctgatgttctggattcctgcttccagcagtgatgttttgatgacccaaactccactctccctgcctgtcagtcttggagatcaagcctccatctcttgcaaatctagtcagagcattgtacatagtaatggaaacacctatttagaatggtacctgcagaaaccaggccagtctccaaagctcctggtctacaaagtttccaatcgattttctggggtcccagacaggttcagtggcagtggatcagggacagatttcacactcaagatcagcagagtggaggctgaggatctgggaacttattactgctttcaaggttcacttgttccttgggcgttcggtggaggcaccaagctggaaatcaaaggtggtggtggatccgaggttcatctggtggagtctgggggagccttagtgaagcctggagggtccctgaaactctcctgtgcagcctctggattcagtttcagtaaatatggcatgtcttgggttcgccagactccagacaagaggctggagtgggtcgcaaccattagtagtagtgggagtcgcacctactatccagacagtgtgaagggccaattcaccatctccagagacaatgccaagaacaccctgtacctgcaaatgagcagtctgaagtctgaggacacagccatgtattactgttcaattagctgggacggtgctatggactactggggtcaagggacctcagtcaccgtctcctcatacccatacgatgttccagattacgcttagtgacctgaggatgatctttttccctctgccaaaaattatggggacatcatgaagccccttgagcatctgacttctggctaataaaggaaatttattttcattgcaatagtgtgttggaattttttgtgtctctcactcggcctaggtagataagtagcatggcgggttaatcattaactacaaggaacccctagtgatggagttggccactccctctctgcgcgctcgctcgctcactgaggccgggcgaccaaaggtcgcccgacgcccgggctttgcccgggcggcctcagtgagcgagcgagcgcgcag

SEQ ID NO: 2277 - DNA, 2655 bp, Artificial Sequence
  Description of Artificial Sequence: Synthetic polynucleotide
ctgcgcgctcgctcgctcactgaggccgcccgggcaaagcccgggcgtcgggcgacctttggtcgcccggcctcagtgagcgagcgagcgcgcagagagggagtggccaactccatcactaggggttccttgtagttaatgattaacccgccatgctacttatctaccagggtaatggggatcctctagaactatagctagtcgacataacgcgtgatctaacatatcctggtgtggagtagcggacgctgctatgacagaggctcgggggcctgagctggctctgtgagctggggaggaggcagacagccaggccttgtctgcaagcagacctggcagcattgggctggccgccccccagggcctcctcttcatgcccagtgaatgactcaccttggcacagacacaatgttcggggtgggcacagtgcctgcttcccgccgcaccccagcccccctcaaatgccttccgagaagcccattgagcagggggcttgcattgcaccccagcctgacagcctggcatcttgggataaaagcagcacagccccctaggggctgcccttgctgtgtggcgccaccggcggtggagaacaaggctctattcagcctgtgcccaggaaaggggatcaggggatgcccaggcatggacagtgggtggcagggggggagaggagggctgtctgcttcccagaagtccaaggacacaaatgggtgaggggagagctctccccatagctgggctgcggcccaaccccaccccctcaggctatgccagggggtgttgccaggggcacccgggcatcgccagtctagcccactccttcataaagccctcgcatcccaggagcgagcagagccagagcaggttggagaggagacgcatcacctccgctgctcgcggggatcctctagaagcttcgtttagtgaaccgtcagatcgcctggagacgccatccacgctgttttgacctccatagaagacaccgggaccgatccagcctccgcggattcgaatcccggccgggaacggtgcattggaacgcggattccccgtgccaagagtgacgtaagtaccgcctatagagtctataggcccacaaaaaatgctttcttcttttaatatacttttttgtttatcttatttctaatactttccctaatctctttctttcagggcaataatgatacaatgtatcatgcctctttgcaccattctaaagaataacagtgataatttctgggttaaggcaatagcaatatttctgcatataaatatttctgcatataaattgtaactgatgtaagaggtttcatattgctaatagcagctacaatccagctaccattctgcttttattttatggttgggataaggctggattattctgagtccaagctaggcccttttgctaatcatgttcatacctcttatcttcctcccacagctcctgggcaacgtgctggtctgtgtgctggcccatcactttggcaaagaattgggattcgaaccggtgccgccaccatgaagttgcctgttaggctgttggtgctgatgttctggattcctgcttccagcagtgatgttttgatgacccaaactccactctccctgcctgtcagtcttggagatcaagcctccatctcttgcaaatctagtcagagcattgtacatagtaatggaaacacctatttagaatggtacctgcagaaaccaggccagtctccaaagctcctggtctacaaagtttccaatcgattttctggggtcccagacaggttcagtggcagtggatcagggacagatttcacactcaagatcagcagagtggaggctgaggatctgggaacttattactgctttcaaggttcacttgttccttgggcgttcggtggaggcaccaagctggaaatcaaaggtggtggtggatccggtggtggtggatccggtggtggtggatccgaggttcatctggtggagtctgggggagccttagtgaagcctggagggtccctgaaactctcctgtgcagcctctggattcagtttcagtaaatatggcatgtcttgggttcgccagactccagacaagaggctggagtgggtcgcaaccattagtagtagtgggagtcgcacctactatccagacagtgtgaagggccaattcaccatctccagagacaatgccaagaacaccctgtacctgcaaatgagcagtctgaagtctgaggacacagccatgtattactgttcaattagctgggacggtgctatggactactggggtcaagggacctcagtcaccgtctcctcatacccatacgatgttccagattacgcttagtgacctgaggatgatctttttccctctgccaaaaattatggggacatcatgaagccccttgagcatctgacttctggctaataaaggaaatttattttcattgcaatagtgtgttggaattttttgtgtctctcactcggcctaggtagataagtagcatggcgggttaatcattaactacaaggaacccctagtgatggagttggccactccctctctgcgcgctcgctcgctcactgaggccgggcgaccaaaggtcgcccgacgcccgggctttgcccgggcggcctcagtgagcgagcgagcgcgcag

SEQ ID NO: 2278 - DNA, 2685 bp, Artificial Sequence
  Description of Artificial Sequence: Synthetic polynucleotide
ctgcgcgctcgctcgctcactgaggccgcccgggcaaagcccgggcgtcgggcgacctttggtcgcccggcctcagtgagcgagcgagcgcgcagagagggagtggccaactccatcactaggggttccttgtagttaatgattaacccgccatgctacttatctaccagggtaatggggatcctctagaactatagctagtcgacataacgcgtgatctaacatatcctggtgtggagtagcggacgctgctatgacagaggctcgggggcctgagctggctctgtgagctggggaggaggcagacagccaggccttgtctgcaagcagacctggcagcattgggctggccgccccccagggcctcctcttcatgcccagtgaatgactcaccttggcacagacacaatgttcggggtgggcacagtgcctgcttcccgccgcaccccagcccccctcaaatgccttccgagaagcccattgagcagggggcttgcattgcaccccagcctgacagcctggcatcttgggataaaagcagcacagccccctaggggctgcccttgctgtgtggcgccaccggcggtggagaacaaggctctattcagcctgtgcccaggaaaggggatcaggggatgcccaggcatggacagtgggtggcagggggggagaggagggctgtctgcttcccagaagtccaaggacacaaatgggtgaggggagagctctccccatagctgggctgcggcccaaccccaccccctcaggctatgccagggggtgttgccaggggcacccgggcatcgccagtctagcccactccttcataaagccctcgcatcccaggagcgagcagagccagagcaggttggagaggagacgcatcacctccgctgctcgcggggatcctctagaagcttcgtttagtgaaccgtcagatcgcctggagacgccatccacgctgttttgacctccatagaagacaccgggaccgatccagcctccgcggattcgaatcccggccgggaacggtgcattggaacgcggattccccgtgccaagagtgacgtaagtaccgcctatagagtctataggcccacaaaaaatgctttcttcttttaatatacttttttgtttatcttatttctaatactttccctaatctctttctttcagggcaataatgatacaatgtatcatgcctctttgcaccattctaaagaataacagtgataatttctgggttaaggcaatagcaatatttctgcatataaatatttctgcatataaattgtaactgatgtaagaggtttcatattgctaatagcagctacaatccagctaccattctgcttttattttatggttgggataaggctggattattctgagtccaagctaggcccttttgctaatcatgttcatacctcttatcttcctcccacagctcctgggcaacgtgctggtctgtgtgctggcccatcactttggcaaagaattgggattcgaaccggtgccgccaccatgaagttgcctgttaggctgttggtgctgatgttctggattcctgcttccagcagtgatgttttgatgacccaaactccactctccctgcctgtcagtcttggagatcaagcctccatctcttgcaaatctagtcagagcattgtacatagtaatggaaacacctatttagaatggtacctgcagaaaccaggccagtctccaaagctcctggtctacaaagtttccaatcgattttctggggtcccagacaggttcagtggcagtggatcagggacagatttcacactcaagatcagcagagtggaggctgaggatctgggaacttattactgctttcaaggttcacttgttccttgggcgttcggtggaggcaccaagctggaaatcaaaggtggtggtggatccggtggtggtggatccggtggtggtggatccggtggtggtggatccggtggtggtggatccgaggttcatctggtggagtctgggggagccttagtgaagcctggagggtccctgaaactctcctgtgcagcctctggattcagtttcagtaaatatggcatgtcttgggttcgccagactccagacaagaggctggagtgggtcgcaaccattagtagtagtgggagtcgcacctactatccagacagtgtgaagggccaattcaccatctccagagacaatgccaagaacaccctgtacctgcaaatgagcagtctgaagtctgaggacacagccatgtattactgttcaattagctgggacggtgctatggactactggggtcaagggacctcagtcaccgtctcctcatacccatacgatgttccagattacgcttagtgacctgaggatgatctttttccctctgccaaaaattatggggacatcatgaagccccttgagcatctgacttctggctaataaaggaaatttattttcattgcaatagtgtgttggaattttttgtgtctctcactcggcctaggtagataagtagcatggcgggttaatcattaactacaaggaacccctagtgatggagttggccactccctctctgcgcgctcgctcgctcactgaggccgggcgaccaaaggtcgcccgacgcccgggctttgcccgggcggcctcagtgagcgagcgagcgcgcag

SEQ ID NO: 2279 - DNA, 3416 bp, Artificial Sequence
  Description of Artificial Sequence: Synthetic polynucleotide
ctgcgcgctcgctcgctcactgaggccgcccgggcaaagcccgggcgtcgggcgacctttggtcgcccggcctcagtgagcgagcgagcgcgcagagagggagtggccaactccatcactaggggttccttgtagttaatgattaacccgccatgctacttatctaccagggtaatggggatcctctagaactatagctagtcgacataacgcgttagtatctgcagagggccctgcgtatgagtgcaagtgggttttaggaccaggatgaggcggggtgggggtgcctacctgacgaccgaccccgacccactggacaagcacccaacccccattccccaaattgcgcatcccctatcagagagggggaggggaaacaggatgcggcgaggcgcgtgcgcactgccagcttcagcaccgcggacagtgccttcgcccccgcctggcggcgcgcgccaccgccgcctcagcactgaaggcgcgctgacgtcactcgccggtcccccgcaaactccccttcccggccaccttggtcgcgtccgcgccgccgccggcccagccggaccgcaccacgcgaggcgcgagataggggggcacgggcgcgaccatctgcgctgcggcgccggcgactcagcgctgcctcagtctgcggtgggcagcggaggagtcgtgtcgtgcctgagagcgcagctgtgctcctgggcaccgcgcagtccgcccccgcggctcctggccagaccacccctaggaccccctgccccaagtcgcagccaagcttcgtttagtgaaccgtcagatcgcctggagacgccatccacgctgttttgacctccatagaagacaccgggaccgatccagcctccgcggattcgaatcccggccgggaacggtgcattggaacgcggattccccgtgccaagagtgacgtaagtaccgcctatagagtctataggcccacaaaaaatgctttcttcttttaatatacttttttgtttatcttatttctaatactttccctaatctctttctttcagggcaataatgatacaatgtatcatgcctctttgcaccattctaaagaataacagtgataatttctgggttaaggcaatagcaatatttctgcatataaatatttctgcatataaattgtaactgatgtaagaggtttcatattgctaatagcagctacaatccagctaccattctgcttttattttatggttgggataaggctggattattctgagtccaagctaggcccttttgctaatcatgttcatacctcttatcttcctcccacagctcctgggcaacgtgctggtctgtgtgctggcccatcactttggcaaagaattgggattcgaaccggtgccgccaccatgaacttcgggctcagcttgattttccttgtccttgttttaaaaggtgtccagtgtgaggttcatctggtggagtctgggggagccttagtgaagcctggagggtccctgaaactctcctgtgcagcctctggattcagtttcagtaaatatggcatgtcttgggttcgccagactccagacaagaggctggagtgggtcgcaaccattagtagtagtgggagtcgcacctactatccagacagtgtgaagggccaattcaccatctccagagacaatgccaagaacaccctgtacctgcaaatgagcagtctgaagtctgaggacacagccatgtattactgttcaattagctgggacggtgctatggactactggggtcaagggacctcagtcaccgtctcctcagccaaaacgacacccccatctgtctatccactggcccctggatctgctgcccaaactaactccatggtgaccctgggatgcctggtcaagggctatttccctgagccagtgacagtgacctggaactctggatccctgtccagcggtgtgcacaccttcccagctgtcctgcagtctgacctctacactctgagcagctcagtgactgtcccctccagcacctggcccagcgagaccgtcacctgcaacgttgcccacccggccagcagcaccaaggtggacaagaaaattgtgcccagggattgtggtgagctcaaaaccccacttggtgacacaactcacacatgcccacggtgcccagagcccaaatcttgtgacacacctcccccgtgcccacggtgcccagagcccaaatcttgtgacacaactcacacatgcccacggtgcccagagcccaaatcttgtgacacacctcccccgtgcccaaggtgcccagcacctgaactcagaaagaggcgagagggcagaggaagtcttctaacatgcggtgacgtggaggagaatcccggccctatgaagttgcctgttaggctgttggtgctgatgttctggattcctgcttccagcagtgatgttttgatgacccaaactccactctccctgcctgtcagtcttggagatcaagcctccatctcttgcaaatctagtcagagcattgtacatagtaatggaaacacctatttagaatggtacctgcagaaaccaggccagtctccaaagctcctggtctacaaagtttccaatcgattttctggggtcccagacaggttcagtggcagtggatcagggacagatttcacactcaagatcagcagagtggaggctgaggatctgggaacttattactgctttcaaggttcacttgttccttgggcgttcggtggaggcaccaagctggaaatcaaacgggctgatgctgcaccaactgtatccatcttcccaccatccagtgagcagttaacatctggaggtgcctcagtcgtgtgcttcttgaacaacttctaccccaaagacatcaatgtcaagtggaagattgatggcagtgaacgacaaaatggcgtcctgaacagttggactgatcaggacagcaaagacagcacctacagcatgagcagcaccctcacgttgaccaaggacgagtatgaacgacataacagctatacctgtgaggccactcacaagacatcaacttcacccattgtcaagagcttcaacaggaatgagtgttagtaactcgaggacggggtgaactacgcctgaggatccgatctttttccctctgccaaaaattatggggacatcatgaagccccttgagcatctgacttctggctaataaaggaaatttattttcattgcaatagtgtgttggaattttttgtgtctctcactcggcctaggtagataagtagcatggcgggttaatcattaactacaaggaacccctagtgatggagttggccactccctctctgcgcgctcgctcgctcactgaggccgggcgaccaaaggtcgcccgacgcccgggctttgcccgggcggcctcagtgagcgagcgagcgcgcag

SEQ ID NO: 2280 - DNA, 3218 bp, Artificial Sequence
  Description of Artificial Sequence: Synthetic polynucleotide
ctgcgcgctcgctcgctcactgaggccgcccgggcaaagcccgggcgtcgggcgacctttggtcgcccggcctcagtgagcgagcgagcgcgcagagagggagtggccaactccatcactaggggttccttgtagttaatgattaacccgccatgctacttatctaccagggtaatggggatcctctagaactatagctagtcgacataacgcgttagtatctgcagagggccctgcgtatgagtgcaagtgggttttaggaccaggatgaggcggggtgggggtgcctacctgacgaccgaccccgacccactggacaagcacccaacccccattccccaaattgcgcatcccctatcagagagggggaggggaaacaggatgcggcgaggcgcgtgcgcactgccagcttcagcaccgcggacagtgccttcgcccccgcctggcggcgcgcgccaccgccgcctcagcactgaaggcgcgctgacgtcactcgccggtcccccgcaaactccccttcccggccaccttggtcgcgtccgcgccgccgccggcccagccggaccgcaccacgcgaggcgcgagataggggggcacgggcgcgaccatctgcgctgcggcgccggcgactcagcgctgcctcagtctgcggtgggcagcggaggagtcgtgtcgtgcctgagagcgcagctgtgctcctgggcaccgcgcagtccgcccccgcggctcctggccagaccacccctaggaccccctgccccaagtcgcagccaagcttcgtttagtgaaccgtcagatcgcctggagacgccatccacgctgttttgacctccatagaagacaccgggaccgatccagcctccgcggattcgaatcccggccgggaacggtgcattggaacgcggattccccgtgccaagagtgacgtaagtaccgcctatagagtctataggcccacaaaaaatgctttcttcttttaatatacttttttgtttatcttatttctaatactttccctaatctctttctttcagggcaataatgatacaatgtatcatgcctctttgcaccattctaaagaataacagtgataatttctgggttaaggcaatagcaatatttctgcatataaatatttctgcatataaattgtaactgatgtaagaggtttcatattgctaatagcagctacaatccagctaccattctgcttttattttatggttgggataaggctggattattctgagtccaagctaggcccttttgctaatcatgttcatacctcttatcttcctcccacagctcctgggcaacgtgctggtctgtgtgctggcccatcactttggcaaagaattgggattcgaaccggtgccgccaccatgaacttcgggctcagcttgattttccttgtccttgttttaaaaggtgtccagtgtgaggttcatctggtggagtctgggggagccttagtgaagcctggagggtccctgaaactctcctgtgcagcctctggattcagtttcagtaaatatggcatgtcttgggttcgccagactccagacaagaggctggagtgggtcgcaaccattagtagtagtgggagtcgcacctactatccagacagtgtgaagggccaattcaccatctccagagacaatgccaagaacaccctgtacctgcaaatgagcagtctgaagtctgaggacacagccatgtattactgttcaattagctgggacggtgctatggactactggggtcaagggacctcagtcaccgtctcctcagccaaaacgacacccccatctgtctatccactggcccctggatctgctgcccaaactaactccatggtgaccctgggatgcctggtcaagggctatttccctgagccagtgacagtgacctggaactctggatccctgtccagcggtgtgcacaccttcccagctgtcctgcagtctgacctctacactctgagcagctcagtgactgtcccctccagcacctggcccagcgagaccgtcacctgcaacgttgcccacccggccagcagcaccaaggtggacaagaaaattgtgcccagggattgtggtagaaagaggcgagagggcagaggaagtcttctaacatgcggtgacgtggaggagaatcccggccctatgaagttgcctgttaggctgttggtgctgatgttctggattcctgcttccagcagtgatgttttgatgacccaaactccactctccctgcctgtcagtcttggagatcaagcctccatctcttgcaaatctagtcagagcattgtacatagtaatggaaacacctatttagaatggtacctgcagaaaccaggccagtctccaaagctcctggtctacaaagtttccaatcgattttctggggtcccagacaggttcagtggcagtggatcagggacagatttcacactcaagatcagcagagtggaggctgaggatctgggaacttattactgctttcaaggttcacttgttccttgggcgttcggtggaggcaccaagctggaaatcaaacgggctgatgctgcaccaactgtatccatcttcccaccatccagtgagcagttaacatctggaggtgcctcagtcgtgtgcttcttgaacaacttctaccccaaagacatcaatgtcaagtggaagattgatggcagtgaacgacaaaatggcgtcctgaacagttggactgatcaggacagcaaagacagcacctacagcatgagcagcaccctcacgttgaccaaggacgagtatgaacgacataacagctatacctgtgaggccactcacaagacatcaacttcacccattgtcaagagcttcaacaggaatgagtgttagtaactcgaggacggggtgaactacgcctgaggatccgatctttttccctctgccaaaaattatggggacatcatgaagccccttgagcatctgacttctggctaataaaggaaatttattttcattgcaatagtgtgttggaattttttgtgtctctcactcggcctaggtagataagtagcatggcgggttaatcattaactacaaggaacccctagtgatggagttggccactccctctctgcgcgctcgctcgctcactgaggccgggcgaccaaaggtcgcccgacgcccgggctttgcccgggcggcctcagtgagcgagcgagcgcgcag

SEQ ID NO: 2281 - DNA, 3242 bp, Artificial Sequence
  Description of Artificial Sequence: Synthetic polynucleotide
ctgcgcgctcgctcgctcactgaggccgcccgggcaaagcccgggcgtcgggcgacctttggtcgcccggcctcagtgagcgagcgagcgcgcagagagggagtggccaactccatcactaggggttccttgtagttaatgattaacccgccatgctacttatctaccagggtaatggggatcctctagaactatagctagtcgacataacgcgttagtatctgcagagggccctgcgtatgagtgcaagtgggttttaggaccaggatgaggcggggtgggggtgcctacctgacgaccgaccccgacccactggacaagcacccaacccccattccccaaattgcgcatcccctatcagagagggggaggggaaacaggatgcggcgaggcgcgtgcgcactgccagcttcagcaccgcggacagtgccttcgcccccgcctggcggcgcgcgccaccgccgcctcagcactgaaggcgcgctgacgtcactcgccggtcccccgcaaactccccttcccggccaccttggtcgcgtccgcgccgccgccggcccagccggaccgcaccacgcgaggcgcgagataggggggcacgggcgcgaccatctgcgctgcggcgccggcgactcagcgctgcctcagtctgcggtgggcagcggaggagtcgtgtcgtgcctgagagcgcagctgtgctcctgggcaccgcgcagtccgcccccgcggctcctggccagaccacccctaggaccccctgccccaagtcgcagccaagcttcgtttagtgaaccgtcagatcgcctggagacgccatccacgctgttttgacctccatagaagacaccgggaccgatccagcctccgcggattcgaatcccggccgggaacggtgcattggaacgcggattccccgtgccaagagtgacgtaagtaccgcctatagagtctataggcccacaaaaaatgctttcttcttttaatatacttttttgtttatcttatttctaatactttccctaatctctttctttcagggcaataatgatacaatgtatcatgcctctttgcaccattctaaagaataacagtgataatttctgggttaaggcaatagcaatatttctgcatataaatatttctgcatataaattgtaactgatgtaagaggtttcatattgctaatagcagctacaatccagctaccattctgcttttattttatggttgggataaggctggattattctgagtccaagctaggcccttttgctaatcatgttcatacctcttatcttcctcccacagctcctgggcaacgtgctggtctgtgtgctggcccatcactttggcaaagaattgggattcgaaccggtgccgccaccatgaagttgcctgttaggctgttggtgctgatgttctggattcctgcttccagcagtgatgttttgatgacccaaactccactctccctgcctgtcagtcttggagatcaagcctccatctcttgcaaatctagtcagagcattgtacatagtaatggaaacacctatttagaatggtacctgcagaaaccaggccagtctccaaagctcctggtctacaaagtttccaatcgattttctggggtcccagacaggttcagtggcagtggatcagggacagatttcacactcaagatcagcagagtggaggctgaggatctgggaacttattactgctttcaaggttcacttgttccttgggcgttcggtggaggcaccaagctggaaatcaaacgggctgatgctgcaccaactgtatccatcttcccaccatccagtgagcagttaacatctggaggtgcctcagtcgtgtgcttcttgaacaacttctaccccaaagacatcaatgtcaagtggaagattgatggcagtgaacgacaaaatggcgtcctgaacagttggactgatcaggacagcaaagacagcacctacagcatgagcagcaccctcacgttgaccaaggacgagtatgaacgacataacagctatacctgtgaggccactcacaagacatcaacttcacccattgtcaagagcttcaacaggaatgagtgtgagggcagaggaagtcttctaacatgcggtgacgtggaggagaatcccggccctatgaacttcgggctcagcttgattttccttgtccttgttttaaaaggtgtccagtgtgaggttcatctggtggagtctgggggagccttagtgaagcctggagggtccctgaaactctcctgtgcagcctctggattcagtttcagtaaatatggcatgtcttgggttcgccagactccagacaagaggctggagtgggtcgcaaccattagtagtagtgggagtcgcacctactatccagacagtgtgaagggccaattcaccatctccagagacaatgccaagaacaccctgtacctgcaaatgagcagtctgaagtctgaggacacagccatgtattactgttcaattagctgggacggtgctatggactactggggtcaagggacctcagtcaccgtctcctcagccaaaacgacacccccatctgtctatccactggcccctggatctgctgcccaaactaactccatggtgaccctgggatgcctggtcaagggctatttccctgagccagtgacagtgacctggaactctggatccctgtccagcggtgtgcacaccttcccagctgtcctgcagtctgacctctacactctgagcagctcagtgactgtcccctccagcacctggcccagcgagaccgtcacctgcaacgttgcccacccggccagcagcaccaaggtggacaagaaaattgtgcccagggattgtggttaggcaattgaaggcgaattgttaattaagaattcactcctcatcgaggacggggtgaactacgcctgaggatccgatctttttccctctgccaaaaattatggggacatcatgaagccccttgagcatctgacttctggctaataaaggaaatttattttcattgcaatagtgtgttggaattttttgtgtctctcactcggcctaggtagataagtagcatggcgggttaatcattaactacaaggaacccctagtgatggagttggccactccctctctgcgcgctcgctcgctcactgaggccgggcgaccaaaggtcgcccgacgcccgggctttgcccgggcggcctcagtgagcgagcgagcgcgcag

SEQ ID NO: 2282 - DNA, 2483 bp, Artificial Sequence
  Description of Artificial Sequence: Synthetic polynucleotide
ctgcgcgctcgctcgctcactgaggccgcccgggcaaagcccgggcgtcgggcgacctttggtcgcccggcctcagtgagcgagcgagcgcgcagagagggagtggccaactccatcactaggggttccttgtagttaatgattaacccgccatgctacttatctaccagggtaatggggatcctctagaactatagctagtcgacataacgcgttagtatctgcagagggccctgcgtatgagtgcaagtgggttttaggaccaggatgaggcggggtgggggtgcctacctgacgaccgaccccgacccactggacaagcacccaacccccattccccaaattgcgcatcccctatcagagagggggaggggaaacaggatgcggcgaggcgcgtgcgcactgccagcttcagcaccgcggacagtgccttcgcccccgcctggcggcgcgcgccaccgccgcctcagcactgaaggcgcgctgacgtcactcgccggtcccccgcaaactccccttcccggccaccttggtcgcgtccgcgccgccgccggcccagccggaccgcaccacgcgaggcgcgagataggggggcacgggcgcgaccatctgcgctgcggcgccggcgactcagcgctgcctcagtctgcggtgggcagcggaggagtcgtgtcgtgcctgagagcgcagctgtgctcctgggcaccgcgcagtccgcccccgcggctcctggccagaccacccctaggaccccctgccccaagtcgcagccaagcttcgtttagtgaaccgtcagatcgcctggagacgccatccacgctgttttgacctccatagaagacaccgggaccgatccagcctccgcggattcgaatcccggccgggaacggtgcattggaacgcggattccccgtgccaagagtgacgtaagtaccgcctatagagtctataggcccacaaaaaatgctttcttcttttaatatacttttttgtttatcttatttctaatactttccctaatctctttctttcagggcaataatgatacaatgtatcatgcctctttgcaccattctaaagaataacagtgataatttctgggttaaggcaatagcaatatttctgcatataaatatttctgcatataaattgtaactgatgtaagaggtttcatattgctaatagcagctacaatccagctaccattctgcttttattttatggttgggataaggctggattattctgagtccaagctaggcccttttgctaatcatgttcatacctcttatcttcctcccacagctcctgggcaacgtgctggtctgtgtgctggcccatcactttggcaaagaattgggattcgaaccggtgccgccaccatgaacttcgggctcagcttgattttccttgtccttgttttaaaaggtgtccagtgtgaggttcatctggtggagtctgggggagccttagtgaagcctggagggtccctgaaactctcctgtgcagcctctggattcagtttcagtaaatatggcatgtcttgggttcgccagactccagacaagaggctggagtgggtcgcaaccattagtagtagtgggagtcgcacctactatccagacagtgtgaagggccaattcaccatctccagagacaatgccaagaacaccctgtacctgcaaatgagcagtctgaagtctgaggacacagccatgtattactgttcaattagctgggacggtgctatggactactggggtcaagggacctcagtcaccgtctcctcaggtggtggtggatccgatgttttgatgacccaaactccactctccctgcctgtcagtcttggagatcaagcctccatctcttgcaaatctagtcagagcattgtacatagtaatggaaacacctatttagaatggtacctgcagaaaccaggccagtctccaaagctcctggtctacaaagtttccaatcgattttctggggtcccagacaggttcagtggcagtggatcagggacagatttcacactcaagatcagcagagtggaggctgaggatctgggaacttattactgctttcaaggttcacttgttccttgggcgttcggtggaggcaccaagctggaaatcaaatacccatacgatgttccagattacgcttagtgacctgaggatgatctttttccctctgccaaaaattatggggacatcatgaagccccttgagcatctgacttctggctaataaaggaaatttattttcattgcaatagtgtgttggaattttttgtgtctctcactcggcctaggtagataagtagcatggcgggttaatcattaactacaaggaacccctagtgatggagttggccactccctctctgcgcgctcgctcgctcactgaggccgggcgaccaaaggtcgcccgacgcccgggctttgcccgggcggcctcagtgagcgagcgagcgcgcag

SEQ ID NO: 2283 - DNA, 2513 bp, Artificial Sequence
  Description of Artificial Sequence: Synthetic polynucleotide
ctgcgcgctcgctcgctcactgaggccgcccgggcaaagcccgggcgtcgggcgacctttggtcgcccggcctcagtgagcgagcgagcgcgcagagagggagtggccaactccatcactaggggttccttgtagttaatgattaacccgccatgctacttatctaccagggtaatggggatcctctagaactatagctagtcgacataacgcgttagtatctgcagagggccctgcgtatgagtgcaagtgggttttaggaccaggatgaggcggggtgggggtgcctacctgacgaccgaccccgacccactggacaagcacccaacccccattccccaaattgcgcatcccctatcagagagggggaggggaaacaggatgcggcgaggcgcgtgcgcactgccagcttcagcaccgcggacagtgccttcgcccccgcctggcggcgcgcgccaccgccgcctcagcactgaaggcgcgctgacgtcactcgccggtcccccgcaaactccccttcccggccaccttggtcgcgtccgcgccgccgccggcccagccggaccgcaccacgcgaggcgcgagataggggggcacgggcgcgaccatctgcgctgcggcgccggcgactcagcgctgcctcagtctgcggtgggcagcggaggagtcgtgtcgtgcctgagagcgcagctgtgctcctgggcaccgcgcagtccgcccccgcggctcctggccagaccacccctaggaccccctgccccaagtcgcagccaagcttcgtttagtgaaccgtcagatcgcctggagacgccatccacgctgttttgacctccatagaagacaccgggaccgatccagcctccgcggattcgaatcccggccgggaacggtgcattggaacgcggattccccgtgccaagagtgacgtaagtaccgcctatagagtctataggcccacaaaaaatgctttcttcttttaatatacttttttgtttatcttatttctaatactttccctaatctctttctttcagggcaataatgatacaatgtatcatgcctctttgcaccattctaaagaataacagtgataatttctgggttaaggcaatagcaatatttctgcatataaatatttctgcatataaattgtaactgatgtaagaggtttcatattgctaatagcagctacaatccagctaccattctgcttttattttatggttgggataaggctggattattctgagtccaagctaggcccttttgctaatcatgttcatacctcttatcttcctcccacagctcctgggcaacgtgctggtctgtgtgctggcccatcactttggcaaagaattgggattcgaaccggtgccgccaccatgaacttcgggctcagcttgattttccttgtccttgttttaaaaggtgtccagtgtgaggttcatctggtggagtctgggggagccttagtgaagcctggagggtccctgaaactctcctgtgcagcctctggattcagtttcagtaaatatggcatgtcttgggttcgccagactccagacaagaggctggagtgggtcgcaaccattagtagtagtgggagtcgcacctactatccagacagtgtgaagggccaattcaccatctccagagacaatgccaagaacaccctgtacctgcaaatgagcagtctgaagtctgaggacacagccatgtattactgttcaattagctgggacggtgctatggactactggggtcaagggacctcagtcaccgtctcctcaggtggtggtggtagcggcggcggcggctctggtggtggtggatccgatgttttgatgacccaaactccactctccctgcctgtcagtcttggagatcaagcctccatctcttgcaaatctagtcagagcattgtacatagtaatggaaacacctatttagaatggtacctgcagaaaccaggccagtctccaaagctcctggtctacaaagtttccaatcgattttctggggtcccagacaggttcagtggcagtggatcagggacagatttcacactcaagatcagcagagtggaggctgaggatctgggaacttattactgctttcaaggttcacttgttccttgggcgttcggtggaggcaccaagctggaaatcaaatacccatacgatgttccagattacgcttagtgacctgaggatgatctttttccctctgccaaaaattatggggacatcatgaagccccttgagcatctgacttctggctaataaaggaaatttattttcattgcaatagtgtgttggaattttttgtgtctctcactcggcctaggtagataagtagcatggcgggttaatcattaactacaaggaacccctagtgatggagttggccactccctctctgcgcgctcgctcgctcactgaggccgggcgaccaaaggtcgcccgacgcccgggctttgcccgggcggcctcagtgagcgagcgagcgcgcag

SEQ ID NO: 2284 - DNA, 2543 bp, Artificial Sequence
  Description of Artificial Sequence: Synthetic polynucleotide
ctgcgcgctcgctcgctcactgaggccgcccgggcaaagcccgggcgtcgggcgacctttggtcgcccggcctcagtgagcgagcgagcgcgcagagagggagtggccaactccatcactaggggttccttgtagttaatgattaacccgccatgctacttatctaccagggtaatggggatcctctagaactatagctagtcgacataacgcgttagtatctgcagagggccctgcgtatgagtgcaagtgggttttaggaccaggatgaggcggggtgggggtgcctacctgacgaccgaccccgacccactggacaagcacccaacccccattccccaaattgcgcatcccctatcagagagggggaggggaaacaggatgcggcgaggcgcgtgcgcactgccagcttcagcaccgcggacagtgccttcgcccccgcctggcggcgcgcgccaccgccgcctcagcactgaaggcgcgctgacgtcactcgccggtcccccgcaaactccccttcccggccaccttggtcgcgtccgcgccgccgccggcccagccggaccgcaccacgcgaggcgcgagataggggggcacgggcgcgaccatctgcgctgcggcgccggcgactcagcgctgcctcagtctgcggtgggcagcggaggagtcgtgtcgtgcctgagagcgcagctgtgctcctgggcaccgcgcagtccgcccccgcggctcctggccagaccacccctaggaccccctgccccaagtcgcagccaagcttcgtttagtgaaccgtcagatcgcctggagacgccatccacgctgttttgacctccatagaagacaccgggaccgatccagcctccgcggattcgaatcccggccgggaacggtgcattggaacgcggattccccgtgccaagagtgacgtaagtaccgcctatagagtctataggcccacaaaaaatgctttcttcttttaatatacttttttgtttatcttatttctaatactttccctaatctctttctttcagggcaataatgatacaatgtatcatgcctctttgcaccattctaaagaataacagtgataatttctgggttaaggcaatagcaatatttctgcatataaatatttctgcatataaattgtaactgatgtaagaggtttcatattgctaatagcagctacaatccagctaccattctgcttttattttatggttgggataaggctggattattctgagtccaagctaggcccttttgctaatcatgttcatacctcttatcttcctcccacagctcctgggcaacgtgctggtctgtgtgctggcccatcactttggcaaagaattgggattcgaaccggtgccgccaccatgaacttcgggctcagcttgattttccttgtccttgttttaaaaggtgtccagtgtgaggttcatctggtggagtctgggggagccttagtgaagcctggagggtccctgaaactctcctgtgcagcctctggattcagtttcagtaaatatggcatgtcttgggttcgccagactccagacaagaggctggagtgggtcgcaaccattagtagtagtgggagtcgcacctactatccagacagtgtgaagggccaattcaccatctccagagacaatgccaagaacaccctgtacctgcaaatgagcagtctgaagtctgaggacacagccatgtattactgttcaattagctgggacggtgctatggactactggggtcaagggacctcagtcaccgtctcctcaggtggtggtggtagcggcggcggcggctctggtggtggtggatccggtggtggtggatccggtggtggtggatccgatgttttgatgacccaaactccactctccctgcctgtcagtcttggagatcaagcctccatctcttgcaaatctagtcagagcattgtacatagtaatggaaacacctatttagaatggtacctgcagaaaccaggccagtctccaaagctcctggtctacaaagtttccaatcgattttctggggtcccagacaggttcagtggcagtggatcagggacagatttcacactcaagatcagcagagtggaggctgaggatctgggaacttattactgctttcaaggttcacttgttccttgggcgttcggtggaggcaccaagctggaaatcaaatacccatacgatgttccagattacgcttagtgacctgaggatgatctttttccctctgccaaaaattatggggacatcatgaagccccttgagcatctgacttctggctaataaaggaaatttattttcattgcaatagtgtgttggaattttttgtgtctctcactcggcctaggtagataagtagcatggcgggttaatcattaactacaaggaacccctagtgatggagttggccactccctctctgcgcgctcgctcgctcactgaggccgggcgaccaaaggtcgcccgacgcccgggctttgcccgggcggcctcagtgagcgagcgagcgcgcag

SEQ ID NO: 2285 - DNA, 2588 bp, Artificial Sequence
  Description of Artificial Sequence: Synthetic polynucleotide
ctgcgcgctcgctcgctcactgaggccgcccgggcaaagcccgggcgtcgggcgacctttggtcgcccggcctcagtgagcgagcgagcgcgcagagagggagtggccaactccatcactaggggttccttgtagttaatgattaacccgccatgctacttatctaccagggtaatggggatcctctagaactatagctagtcgacataacgcgttagtatctgcagagggccctgcgtatgagtgcaagtgggttttaggaccaggatgaggcggggtgggggtgcctacctgacgaccgaccccgacccactggacaagcacccaacccccattccccaaattgcgcatcccctatcagagagggggaggggaaacaggatgcggcgaggcgcgtgcgcactgccagcttcagcaccgcggacagtgccttcgcccccgcctggcggcgcgcgccaccgccgcctcagcactgaaggcgcgctgacgtcactcgccggtcccccgcaaactccccttcccggccaccttggtcgcgtccgcgccgccgccggcccagccggaccgcaccacgcgaggcgcgagataggggggcacgggcgcgaccatctgcgctgcggcgccggcgactcagcgctgcctcagtctgcggtgggcagcggaggagtcgtgtcgtgcctgagagcgcagctgtgctcctgggcaccgcgcagtccgcccccgcggctcctggccagaccacccctaggaccccctgccccaagtcgcagccaagcttcgtttagtgaaccgtcagatcgcctggagacgccatccacgctgttttgacctccatagaagacaccgggaccgatccagcctccgcggattcgaatcccggccgggaacggtgcattggaacgcggattccccgtgccaagagtgacgtaagtaccgcctatagagtctataggcccacaaaaaatgctttcttcttttaatatacttttttgtttatcttatttctaatactttccctaatctctttctttcagggcaataatgatacaatgtatcatgcctctttgcaccattctaaagaataacagtgataatttctgggttaaggcaatagcaatatttctgcatataaatatttctgcatataaattgtaactgatgtaagaggtttcatattgctaatagcagctacaatccagctaccattctgcttttattttatggttgggataaggctggattattctgagtccaagctaggcccttttgctaatcatgttcatacctcttatcttcctcccacagctcctgggcaacgtgctggtctgtgtgctggcccatcactttggcaaagaattgggattcgaaccggtgccgccaccatgaacttcgggctcagcttgattttccttgtccttgttttaaaaggtgtccagtgtgaggttcatctggtggagtctgggggagccttagtgaagcctggagggtccctgaaactctcctgtgcagcctctggattcagtttcagtaaatatggcatgtcttgggttcgccagactccagacaagaggctggagtgggtcgcaaccattagtagtagtgggagtcgcacctactatccagacagtgtgaagggccaattcaccatctccagagacaatgccaagaacaccctgtacctgcaaatgagcagtctgaagtctgaggacacagccatgtattactgttcaattagctgggacggtgctatggactactggggtcaagggacctcagtcaccgtctcctcaggtggtggtggtagcggcggcggcggctctggtggtggtggatccggtggtggtggatccggtggtggtggatccggtggtggtggatccggtggtggtggatccggtggtggtggatccgatgttttgatgacccaaactccactctccctgcctgtcagtcttggagatcaagcctccatctcttgcaaatctagtcagagcattgtacatagtaatggaaacacctatttagaatggtacctgcagaaaccaggccagtctccaaagctcctggtctacaaagtttccaatcgattttctggggtcccagacaggttcagtggcagtggatcagggacagatttcacactcaagatcagcagagtggaggctgaggatctgggaacttattactgctttcaaggttcacttgttccttgggcgttcggtggaggcaccaagctggaaatcaaatacccatacgatgttccagattacgcttagtgacctgaggatgatctttttccctctgccaaaaattatggggacatcatgaagccccttgagcatctgacttctggctaataaaggaaatttattttcattgcaatagtgtgttggaattttttgtgtctctcactcggcctaggtagataagtagcatggcgggttaatcattaactacaaggaacccctagtgatggagttggccactccctctctgcgcgctcgctcgctcactgaggccgggcgaccaaaggtcgcccgacgcccgggctttgcccgggcggcctcagtgagcgagcgagcgcgcag

SEQ ID NO: 2286 - DNA, 2483 bp, Artificial Sequence
  Description of Artificial Sequence: Synthetic polynucleotide
ctgcgcgctcgctcgctcactgaggccgcccgggcaaagcccgggcgtcgggcgacctttggtcgcccggcctcagtgagcgagcgagcgcgcagagagggagtggccaactccatcactaggggttccttgtagttaatgattaacccgccatgctacttatctaccagggtaatggggatcctctagaactatagctagtcgacataacgcgttagtatctgcagagggccctgcgtatgagtgcaagtgggttttaggaccaggatgaggcggggtgggggtgcctacctgacgaccgaccccgacccactggacaagcacccaacccccattccccaaattgcgcatcccctatcagagagggggaggggaaacaggatgcggcgaggcgcgtgcgcactgccagcttcagcaccgcggacagtgccttcgcccccgcctggcggcgcgcgccaccgccgcctcagcactgaaggcgcgctgacgtcactcgccggtcccccgcaaactccccttcccggccaccttggtcgcgtccgcgccgccgccggcccagccggaccgcaccacgcgaggcgcgagataggggggcacgggcgcgaccatctgcgctgcggcgccggcgactcagcgctgcctcagtctgcggtgggcagcggaggagtcgtgtcgtgcctgagagcgcagctgtgctcctgggcaccgcgcagtccgcccccgcggctcctggccagaccacccctaggaccccctgccccaagtcgcagccaagcttcgtttagtgaaccgtcagatcgcctggagacgccatccacgctgttttgacctccatagaagacaccgggaccgatccagcctccgcggattcgaatcccggccgggaacggtgcattggaacgcggattccccgtgccaagagtgacgtaagtaccgcctatagagtctataggcccacaaaaaatgctttcttcttttaatatacttttttgtttatcttatttctaatactttccctaatctctttctttcagggcaataatgatacaatgtatcatgcctctttgcaccattctaaagaataacagtgataatttctgggttaaggcaatagcaatatttctgcatataaatatttctgcatataaattgtaactgatgtaagaggtttcatattgctaatagcagctacaatccagctaccattctgcttttattttatggttgggataaggctggattattctgagtccaagctaggcccttttgctaatcatgttcatacctcttatcttcctcccacagctcctgggcaacgtgctggtctgtgtgctggcccatcactttggcaaagaattgggattcgaaccggtgccgccaccatgaagttgcctgttaggctgttggtgctgatgttctggattcctgcttccagcagtgatgttttgatgacccaaactccactctccctgcctgtcagtcttggagatcaagcctccatctcttgcaaatctagtcagagcattgtacatagtaatggaaacacctatttagaatggtacctgcagaaaccaggccagtctccaaagctcctggtctacaaagtttccaatcgattttctggggtcccagacaggttcagtggcagtggatcagggacagatttcacactcaagatcagcagagtggaggctgaggatctgggaacttattactgctttcaaggttcacttgttccttgggcgttcggtggaggcaccaagctggaaatcaaaggtggtggtggatccgaggttcatctggtggagtctgggggagccttagtgaagcctggagggtccctgaaactctcctgtgcagcctctggattcagtttcagtaaatatggcatgtcttgggttcgccagactccagacaagaggctggagtgggtcgcaaccattagtagtagtgggagtcgcacctactatccagacagtgtgaagggccaattcaccatctccagagacaatgccaagaacaccctgtacctgcaaatgagcagtctgaagtctgaggacacagccatgtattactgttcaattagctgggacggtgctatggactactggggtcaagggacctcagtcaccgtctcctcatacccatacgatgttccagattacgcttagtgacctgaggatgatctttttccctctgccaaaaattatggggacatcatgaagccccttgagcatctgacttctggctaataaaggaaatttattttcattgcaatagtgtgttggaattttttgtgtctctcactcggcctaggtagataagtagcatggcgggttaatcattaactacaaggaacccctagtgatggagttggccactccctctctgcgcgctcgctcgctcactgaggccgggcgaccaaaggtcgcccgacgcccgggctttgcccgggcggcctcagtgagcgagcgagcgcgcag

SEQ ID NO: 2287 - DNA, 2513 bp, Artificial Sequence
  Description of Artificial Sequence: Synthetic polynucleotide
ctgcgcgctcgctcgctcactgaggccgcccgggcaaagcccgggcgtcgggcgacctttggtcgcccggcctcagtgagcgagcgagcgcgcagagagggagtggccaactccatcactaggggttccttgtagttaatgattaacccgccatgctacttatctaccagggtaatggggatcctctagaactatagctagtcgacataacgcgttagtatctgcagagggccctgcgtatgagtgcaagtgggttttaggaccaggatgaggcggggtgggggtgcctacctgacgaccgaccccgacccactggacaagcacccaacccccattccccaaattgcgcatcccctatcagagagggggaggggaaacaggatgcggcgaggcgcgtgcgcactgccagcttcagcaccgcggacagtgccttcgcccccgcctggcggcgcgcgccaccgccgcctcagcactgaaggcgcgctgacgtcactcgccggtcccccgcaaactccccttcccggccaccttggtcgcgtccgcgccgccgccggcccagccggaccgcaccacgcgaggcgcgagataggggggcacgggcgcgaccatctgcgctgcggcgccggcgactcagcgctgcctcagtctgcggtgggcagcggaggagtcgtgtcgtgcctgagagcgcagctgtgctcctgggcaccgcgcagtccgcccccgcggctcctggccagaccacccctaggaccccctgccccaagtcgcagccaagcttcgtttagtgaaccgtcagatcgcctggagacgccatccacgctgttttgacctccatagaagacaccgggaccgatccagcctccgcggattcgaatcccggccgggaacggtgcattggaacgcggattccccgtgccaagagtgacgtaagtaccgcctatagagtctataggcccacaaaaaatgctttcttcttttaatatacttttttgtttatcttatttctaatactttccctaatctctttctttcagggcaataatgatacaatgtatcatgcctctttgcaccattctaaagaataacagtgataatttctgggttaaggcaatagcaatatttctgcatataaatatttctgcatataaattgtaactgatgtaagaggtttcatattgctaatagcagctacaatccagctaccattctgcttttattttatggttgggataaggctggattattctgagtccaagctaggcccttttgctaatcatgttcatacctcttatcttcctcccacagctcctgggcaacgtgctggtctgtgtgctggcccatcactttggcaaagaattgggattcgaaccggtgccgccaccatgaagttgcctgttaggctgttggtgctgatgttctggattcctgcttccagcagtgatgttttgatgacccaaactccactctccctgcctgtcagtcttggagatcaagcctccatctcttgcaaatctagtcagagcattgtacatagtaatggaaacacctatttagaatggtacctgcagaaaccaggccagtctccaaagctcctggtctacaaagtttccaatcgattttctggggtcccagacaggttcagtggcagtggatcagggacagatttcacactcaagatcagcagagtggaggctgaggatctgggaacttattactgctttcaaggttcacttgttccttgggcgttcggtggaggcaccaagctggaaatcaaaggtggtggtggatccggtggtggtggatccggtggtggtggatccgaggttcatctggtggagtctgggggagccttagtgaagcctggagggtccctgaaactctcctgtgcagcctctggattcagtttcagtaaatatggcatgtcttgggttcgccagactccagacaagaggctggagtgggtcgcaaccattagtagtagtgggagtcgcacctactatccagacagtgtgaagggccaattcaccatctccagagacaatgccaagaacaccctgtacctgcaaatgagcagtctgaagtctgaggacacagccatgtattactgttcaattagctgggacggtgctatggactactggggtcaagggacctcagtcaccgtctcctcatacccatacgatgttccagattacgcttagtgacctgaggatgatctttttccctctgccaaaaattatggggacatcatgaagccccttgagcatctgacttctggctaataaaggaaatttattttcattgcaatagtgtgttggaattttttgtgtctctcactcggcctaggtagataagtagcatggcgggttaatcattaactacaaggaacccctagtgatggagttggccactccctctctgcgcgctcgctcgctcactgaggccgggcgaccaaaggtcgcccgacgcccgggctttgcccgggcggcctcagtgagcgagcgagcgcgcag

SEQ ID NO: 2288 - DNA, 2543 bp, Artificial Sequence
  Description of Artificial Sequence: Synthetic polynucleotide
ctgcgcgctcgctcgctcactgaggccgcccgggcaaagcccgggcgtcgggcgacctttggtcgcccggcctcagtgagcgagcgagcgcgcagagagggagtggccaactccatcactaggggttccttgtagttaatgattaacccgccatgctacttatctaccagggtaatggggatcctctagaactatagctagtcgacataacgcgttagtatctgcagagggccctgcgtatgagtgcaagtgggttttaggaccaggatgaggcggggtgggggtgcctacctgacgaccgaccccgacccactggacaagcacccaacccccattccccaaattgcgcatcccctatcagagagggggaggggaaacaggatgcggcgaggcgcgtgcgcactgccagcttcagcaccgcggacagtgccttcgcccccgcctggcggcgcgcgccaccgccgcctcagcactgaaggcgcgctgacgtcactcgccggtcccccgcaaactccccttcccggccaccttggtcgcgtccgcgccgccgccggcccagccggaccgcaccacgcgaggcgcgagataggggggcacgggcgcgaccatctgcgctgcggcgccggcgactcagcgctgcctcagtctgcggtgggcagcggaggagtcgtgtcgtgcctgagagcgcagctgtgctcctgggcaccgcgcagtccgcccccgcggctcctggccagaccacccctaggaccccctgccccaagtcgcagccaagcttcgtttagtgaaccgtcagatcgcctggagacgccatccacgctgttttgacctccatagaagacaccgggaccgatccagcctccgcggattcgaatcccggccgggaacggtgcattggaacgcggattccccgtgccaagagtgacgtaagtaccgcctatagagtctataggcccacaaaaaatgctttcttcttttaatatacttttttgtttatcttatttctaatactttccctaatctctttctttcagggcaataatgatacaatgtatcatgcctctttgcaccattctaaagaataacagtgataatttctgggttaaggcaatagcaatatttctgcatataaatatttctgcatataaattgtaactgatgtaagaggtttcatattgctaatagcagctacaatccagctaccattctgcttttattttatggttgggataaggctggattattctgagtccaagctaggcccttttgctaatcatgttcatacctcttatcttcctcccacagctcctgggcaacgtgctggtctgtgtgctggcccatcactttggcaaagaattgggattcgaaccggtgccgccaccatgaagttgcctgttaggctgttggtgctgatgttctggattcctgcttccagcagtgatgttttgatgacccaaactccactctccctgcctgtcagtcttggagatcaagcctccatctcttgcaaatctagtcagagcattgtacatagtaatggaaacacctatttagaatggtacctgcagaaaccaggccagtctccaaagctcctggtctacaaagtttccaatcgattttctggggtcccagacaggttcagtggcagtggatcagggacagatttcacactcaagatcagcagagtggaggctgaggatctgggaacttattactgctttcaaggttcacttgttccttgggcgttcggtggaggcaccaagctggaaatcaaaggtggtggtggatccggtggtggtggatccggtggtggtggatccggtggtggtggatccggtggtggtggatccgaggttcatctggtggagtctgggggagccttagtgaagcctggagggtccctgaaactctcctgtgcagcctctggattcagtttcagtaaatatggcatgtcttgggttcgccagactccagacaagaggctggagtgggtcgcaaccattagtagtagtgggagtcgcacctactatccagacagtgtgaagggccaattcaccatctccagagacaatgccaagaacaccctgtacctgcaaatgagcagtctgaagtctgaggacacagccatgtattactgttcaattagctgggacggtgctatggactactggggtcaagggacctcagtcaccgtctcctcatacccatacgatgttccagattacgcttagtgacctgaggatgatctttttccctctgccaaaaattatggggacatcatgaagccccttgagcatctgacttctggctaataaaggaaatttattttcattgcaatagtgtgttggaattttttgtgtctctcactcggcctaggtagataagtagcatggcgggttaatcattaactacaaggaacccctagtgatggagttggccactccctctctgcgcgctcgctcgctcactgaggccgggcgaccaaaggtcgcccgacgcccgggctttgcccgggcggcctcagtgagcgagcgagcgcgcag

SEQ ID NO: 2289 - DNA, 3967 bp, Artificial Sequence
  Description of Artificial Sequence: Synthetic polynucleotide
ctgcgcgctcgctcgctcactgaggccgcccgggcaaagcccgggcgtcgggcgacctttggtcgcccggcctcagtgagcgagcgagcgcgcagagagggagtggccaactccatcactaggggttccttgtagttaatgattaacccgccatgctacttatctaccagggtaatggggatcctctagaactatagctagtcgacataacgcgtctagttattaatagtaatcaattacggggtcattagttcatagcccatatatggagttccgcgttacataacttacggtaaatggcccgcctggctgaccgcccaacgacccccgcccattgacgtcaataatgacgtatgttcccatagtaacgccaatagggactttccattgacgtcaatgggtggagtatttacggtaaactgcccacttggcagtacatcaagtgtatcatatgccaagtacgccccctattgacgtcaatgacggtaaatggcccgcctggcattatgcccagtacatgaccttatgggactttcctacttggcagtacatctacgtattagtcatcgctattaccatggtcgaggtgagccccacgttctgcttcactctccccatctcccccccctccccacccccaattttgtatttatttattttttaattattttgtgcagcgatgggggcggggggggggggggggcgcgcgccaggcggggcggggcggggcgaggggcggggcggggcgaggcggagaggtgcggcggcagccaatcagagcggcgcgctccgaaagtttccttttatggcgaggcggcggcggcggcggccctataaaaagcgaagcgcgcggcgggcgggagtcgctgcgcgctgccttcgccccgtgccccgctccgccgccgcctcgcgccgcccgccccggctctgactgaccgcgttactcccacaggtgagcgggcgggacggcccttctcctccgggctgtaattagcgcttggtttaatgacggcttgtttcttttctgtggctgcgtgaaagccttgaggggctccgggagggccctttgtgcggggggagcggctcggggggtgcgtgcgtgtgtgtgtgcgtggggagcgccgcgtgcggctccgcgctgcccggcggctgtgagcgctgcgggcgcggcgcggggctttgtgcgctccgcagtgtgcgcgaggggagcgcggccgggggcggtgccccgcggtgcggggggggctgcgaggggaacaaaggctgcgtgcggggtgtgtgcgtgggggggtgagcagggggtgtgggcgcgtcggtcgggctgcaaccccccctgcacccccctccccgagttgctgagcacggcccggcttcgggtgcggggctccgtacggggcgtggcgcggggctcgccgtgccgggcggggggtggcggcaggtgggggtgccgggcggggcggggccgcctcgggccggggagggctcgggggaggggcgcggcggcccccggagcgccggcggctgtcgaggcgcggcgagccgcagccattgccttttatggtaatcgtgcgagagggcgcagggacttcctttgtcccaaatctgtgcggagccgaaatctgggaggcgccgccgcaccccctctagcgggcgcggggcgaagcggtgcggcgccggcaggaaggaaatgggcggggagggccttcgtgcgtcgccgcgccgccgtccccttctccctctccagcctcggggctgtccgcggggggacggctgccttcgggggggacggggcagggcggggttcggcttctggcgtgtgaccggcggctctagagcctctgctaaccatgttcatgccttcttctttttcctacagctcctgggcaacgtgctggttattgtgctgtctcatcattttggcaaagaattcgggattcgaaccggtgccgccaccatgaacttcgggctcagcttgattttccttgtccttgttttaaaaggtgtccagtgtcaggtgcagctgcagcagagcgacgccgagctggtgaaacctggggccagcgtcaagatcagctgcaaggcctccggctacaccttcaccgaccgcaccatccactgggtgaagcagcggcccgagcaggggctggagtggatcgggtacatctaccccggggacggctccaccaagtacaacgagaacttcaagggcaaagccaccctgacggccgacaagtccagcagcaccgcctacatgcagctgaacagcctgaccagcgaggacagcgccgtgtacttctgcgcccggcggggggctatggactactggggccagggcacctccgtgaccgtgtcctccgccaaaacgacacccccatctgtctatccactggcccctggatctgctgcccaaactaactccatggtgaccctgggatgcctggtcaagggctatttccctgagccagtgacagtgacctggaactctggatccctgtccagcggtgtgcacaccttcccagctgtcctgcagtctgacctctacactctgagcagctcagtgactgtcccctccagcacctggcccagcgagaccgtcacctgcaacgttgcccacccggccagcagcaccaaggtggacaagaaaattgtgcccagggattgtggtgagctcaaaaccccacttggtgacacaactcacacatgcccacggtgcccagagcccaaatcttgtgacacacctcccccgtgcccacggtgcccagagcccaaatcttgtgacacaactcacacatgcccacggtgcccagagcccaaatcttgtgacacacctcccccgtgcccaaggtgcccagcacctgaactcagaaagaggcgagagggcagaggaagtcttctaacatgcggtgacgtggaggagaatcccggccctatgaagttgcctgttaggctgttggtgctgatgttctggattcctgcttccagcagtgacgtgcagatgatccagagccccagcagcctgagcgcctcgctgggggacatcgtgaccatgacctgccaggcctcccagggcaccagcatcaacctcaactggttccagcagaagcccggcaaggcccccaagctcctcatctacggggccagcaacctggaggacggcgtgccctcccgcttcagcggctcccgctacggcacggacttcacgctgaccatctcctccctggaggacgaggacatggccacctacttctgcctgcagcacacctacctgcccttcaccttcggcagcgggaccaagctggagatcaagcgggctgatgctgcaccaactgtatccatcttcccaccatccagtgagcagttaacatctggaggtgcctcagtcgtgtgcttcttgaacaacttctaccccaaagacatcaatgtcaagtggaagattgatggcagtgaacgacaaaatggcgtcctgaacagttggactgatcaggacagcaaagacagcacctacagcatgagcagcaccctcacgttgaccaaggacgagtatgaacgacataacagctatacctgtgaggccactcacaagacatcaacttcacccattgtcaagagcttcaacaggaatgagtgttagtaactcgaggacggggtgaactacgcctgaggatccgatctttttccctctgccaaaaattatggggacatcatgaagccccttgagcatctgacttctggctaataaaggaaatttattttcattgcaatagtgtgttggaattttttgtgtctctcactcggcctaggtagataagtagcatggcgggttaatcattaactacaaggaacccctagtgatggagttggccactccctctctgcgcgctcgctcgctcactgaggccgggcgaccaaaggtcgcccgacgcccgggctttgcccgggcggcctcagtgagcgagcgagcgcgcag

SEQ ID NO: 2290 - DNA, 3769 bp, Artificial Sequence
  Description of Artificial Sequence: Synthetic polynucleotide
ctgcgcgctcgctcgctcactgaggccgcccgggcaaagcccgggcgtcgggcgacctttggtcgcccggcctcagtgagcgagcgagcgcgcagagagggagtggccaactccatcactaggggttccttgtagttaatgattaacccgccatgctacttatctaccagggtaatggggatcctctagaactatagctagtcgacataacgcgtctagttattaatagtaatcaattacggggtcattagttcatagcccatatatggagttccgcgttacataacttacggtaaatggcccgcctggctgaccgcccaacgacccccgcccattgacgtcaataatgacgtatgttcccatagtaacgccaatagggactttccattgacgtcaatgggtggagtatttacggtaaactgcccacttggcagtacatcaagtgtatcatatgccaagtacgccccctattgacgtcaatgacggtaaatggcccgcctggcattatgcccagtacatgaccttatgggactttcctacttggcagtacatctacgtattagtcatcgctattaccatggtcgaggtgagccccacgttctgcttcactctccccatctcccccccctccccacccccaattttgtatttatttattttttaattattttgtgcagcgatgggggcggggggggggggggggcgcgcgccaggcggggcggggcggggcgaggggcggggcggggcgaggcggagaggtgcggcggcagccaatcagagcggcgcgctccgaaagtttccttttatggcgaggcggcggcggcggcggccctataaaaagcgaagcgcgcggcgggcgggagtcgctgcgcgctgccttcgccccgtgccccgctccgccgccgcctcgcgccgcccgccccggctctgactgaccgcgttactcccacaggtgagcgggcgggacggcccttctcctccgggctgtaattagcgcttggtttaatgacggcttgtttcttttctgtggctgcgtgaaagccttgaggggctccgggagggccctttgtgcggggggagcggctcggggggtgcgtgcgtgtgtgtgtgcgtggggagcgccgcgtgcggctccgcgctgcccggcggctgtgagcgctgcgggcgcggcgcggggctttgtgcgctccgcagtgtgcgcgaggggagcgcggccgggggcggtgccccgcggtgcggggggggctgcgaggggaacaaaggctgcgtgcggggtgtgtgcgtgggggggtgagcagggggtgtgggcgcgtcggtcgggctgcaaccccccctgcacccccctccccgagttgctgagcacggcccggcttcgggtgcggggctccgtacggggcgtggcgcggggctcgccgtgccgggcggggggtggcggcaggtgggggtgccgggcggggcggggccgcctcgggccggggagggctcgggggaggggcgcggcggcccccggagcgccggcggctgtcgaggcgcggcgagccgcagccattgccttttatggtaatcgtgcgagagggcgcagggacttcctttgtcccaaatctgtgcggagccgaaatctgggaggcgccgccgcaccccctctagcgggcgcggggcgaagcggtgcggcgccggcaggaaggaaatgggcggggagggccttcgtgcgtcgccgcgccgccgtccccttctccctctccagcctcggggctgtccgcggggggacggctgccttcgggggggacggggcagggcggggttcggcttctggcgtgtgaccggcggctctagagcctctgctaaccatgttcatgccttcttctttttcctacagctcctgggcaacgtgctggttattgtgctgtctcatcattttggcaaagaattcgggattcgaaccggtgccgccaccatgaacttcgggctcagcttgattttccttgtccttgttttaaaaggtgtccagtgtcaggtgcagctgcagcagagcgacgccgagctggtgaaacctggggccagcgtcaagatcagctgcaaggcctccggctacaccttcaccgaccgcaccatccactgggtgaagcagcggcccgagcaggggctggagtggatcgggtacatctaccccggggacggctccaccaagtacaacgagaacttcaagggcaaagccaccctgacggccgacaagtccagcagcaccgcctacatgcagctgaacagcctgaccagcgaggacagcgccgtgtacttctgcgcccggcggggggctatggactactggggccagggcacctccgtgaccgtgtcctccgccaaaacgacacccccatctgtctatccactggcccctggatctgctgcccaaactaactccatggtgaccctgggatgcctggtcaagggctatttccctgagccagtgacagtgacctggaactctggatccctgtccagcggtgtgcacaccttcccagctgtcctgcagtctgacctctacactctgagcagctcagtgactgtcccctccagcacctggcccagcgagaccgtcacctgcaacgttgcccacccggccagcagcaccaaggtggacaagaaaattgtgcccagggattgtggtagaaagaggcgagagggcagaggaagtcttctaacatgcggtgacgtggaggagaatcccggccctatgaagttgcctgttaggctgttggtgctgatgttctggattcctgcttccagcagtgacgtgcagatgatccagagccccagcagcctgagcgcctcgctgggggacatcgtgaccatgacctgccaggcctcccagggcaccagcatcaacctcaactggttccagcagaagcccggcaaggcccccaagctcctcatctacggggccagcaacctggaggacggcgtgccctcccgcttcagcggctcccgctacggcacggacttcacgctgaccatctcctccctggaggacgaggacatggccacctacttctgcctgcagcacacctacctgcccttcaccttcggcagcgggaccaagctggagatcaagcgggctgatgctgcaccaactgtatccatcttcccaccatccagtgagcagttaacatctggaggtgcctcagtcgtgtgcttcttgaacaacttctaccccaaagacatcaatgtcaagtggaagattgatggcagtgaacgacaaaatggcgtcctgaacagttggactgatcaggacagcaaagacagcacctacagcatgagcagcaccctcacgttgaccaaggacgagtatgaacgacataacagctatacctgtgaggccactcacaagacatcaacttcacccattgtcaagagcttcaacaggaatgagtgttagtaactcgaggacggggtgaactacgcctgaggatccgatctttttccctctgccaaaaattatggggacatcatgaagccccttgagcatctgacttctggctaataaaggaaatttattttcattgcaatagtgtgttggaattttttgtgtctctcactcggcctaggtagataagtagcatggcgggttaatcattaactacaaggaacccctagtgatggagttggccactccctctctgcgcgctcgctcgctcactgaggccgggcgaccaaaggtcgcccgacgcccgggctttgcccgggcggcctcagtgagcgagcgagcgcgcag

SEQ ID NO: 2291 - DNA, 3792 bp, Artificial Sequence
  Description of Artificial Sequence: Synthetic polynucleotide
ctgcgcgctcgctcgctcactgaggccgcccgggcaaagcccgggcgtcgggcgacctttggtcgcccggcctcagtgagcgagcgagcgcgcagagagggagtggccaactccatcactaggggttccttgtagttaatgattaacccgccatgctacttatctaccagggtaatggggatcctctagaactatagctagtcgacataacgcgtctagttattaatagtaatcaattacggggtcattagttcatagcccatatatggagttccgcgttacataacttacggtaaatggcccgcctggctgaccgcccaacgacccccgcccattgacgtcaataatgacgtatgttcccatagtaacgccaatagggactttccattgacgtcaatgggtggagtatttacggtaaactgcccacttggcagtacatcaagtgtatcatatgccaagtacgccccctattgacgtcaatgacggtaaatggcccgcctggcattatgcccagtacatgaccttatgggactttcctacttggcagtacatctacgtattagtcatcgctattaccatggtcgaggtgagccccacgttctgcttcactctccccatctcccccccctccccacccccaattttgtatttatttattttttaattattttgtgcagcgatgggggcggggggggggggggggcgcgcgccaggcggggcggggcggggcgaggggcggggcggggcgaggcggagaggtgcggcggcagccaatcagagcggcgcgctccgaaagtttccttttatggcgaggcggcggcggcggcggccctataaaaagcgaagcgcgcggcgggcgggagtcgctgcgcgctgccttcgccccgtgccccgctccgccgccgcctcgcgccgcccgccccggctctgactgaccgcgttactcccacaggtgagcgggcgggacggcccttctcctccgggctgtaattagcgcttggtttaatgacggcttgtttcttttctgtggctgcgtgaaagccttgaggggctccgggagggccctttgtgcggggggagcggctcggggggtgcgtgcgtgtgtgtgtgcgtggggagcgccgcgtgcggctccgcgctgcccggcggctgtgagcgctgcgggcgcggcgcggggctttgtgcgctccgcagtgtgcgcgaggggagcgcggccgggggcggtgccccgcggtgcggggggggctgcgaggggaacaaaggctgcgtgcggggtgtgtgcgtgggggggtgagcagggggtgtgggcgcgtcggtcgggctgcaaccccccctgcacccccctccccgagttgctgagcacggcccggcttcgggtgcggggctccgtacggggcgtggcgcggggctcgccgtgccgggcggggggtggcggcaggtgggggtgccgggcggggcggggccgcctcgggccggggagggctcgggggaggggcgcggcggcccccggagcgccggcggctgtcgaggcgcggcgagccgcagccattgccttttatggtaatcgtgcgagagggcgcagggacttcctttgtcccaaatctgtgcggagccgaaatctgggaggcgccgccgcaccccctctagcgggcgcggggcgaagcggtgcggcgccggcaggaaggaaatgggcggggagggccttcgtgcgtcgccgcgccgccgtccccttctccctctccagcctcggggctgtccgcggggggacggctgccttcgggggggacggggcagggcggggttcggcttctggcgtgtgaccggcggctctagagcctctgctaaccatgttcatgccttcttctttttcctacagctcctgggcaacgtgctggttattgtgctgtctcatcattttggcaaagaattcgggattcgaaccggtgccgccaccatgaagttgcctgttaggctgttggtgctgatgttctggattcctgcttccagcagtgacgtgcagatgatccagagccccagcagcctgagcgcctcgctgggggacatcgtgaccatgacctgccaggcctcccagggcaccagcatcaacctcaactggttccagcagaagcccggcaaggcccccaagctcctcatctacggggccagcaacctggaggacggcgtgccctcccgcttcagcggctcccgctacggcacggacttcacgctgaccatctcctccctggaggacgaggacatggccacctacttctgcctgcagcacacctacctgcccttcaccttcggcagcgggaccaagctggagatcaagcgggctgatgctgcaccaactgtatccatcttcccaccatccagtgagcagttaacatctggaggtgcctcagtcgtgtgcttcttgaacaacttctaccccaaagacatcaatgtcaagtggaagattgatggcagtgaacgacaaaatggcgtcctgaacagttggactgatcaggacagcaaagacagcacctacagcatgagcagcaccctcacgttgaccaaggacgagtatgaacgacataacagctatacctgtgaggccactcacaagacatcaacttcacccattgtcaagagcttcaacaggaatgagtgtgagggcagaggaagtcttctaacatgcggtgacgtggaggagaatcccggccctatgaacttcgggctcagcttgattttccttgtccttgttttaaaaggtgtccagtgtcaggtgcagctgcagcagagcgacgccgagctggtgaaacctggggccagcgtcaagatcagctgcaaggcctccggctacaccttcaccgaccgcaccatccactgggtgaagcagcggcccgagcaggggctggagtggatcgggtacatctaccccggggacggctccaccaagtacaacgagaacttcaagggcaaagccaccctgacggccgacaagtccagcagcaccgcctacatgcagctgaacagcctgaccagcgaggacagcgccgtgtacttctgcgcccggcggggggctatggactactggggccagggcacctccgtgaccgtgtcctccgccaaaacgacacccccatctgtctatccactggcccctggatctgctgcccaaactaactccatggtgaccctgggatgcctggtcaagggctatttccctgagccagtgacagtgacctggaactctggatccctgtccagcggtgtgcacaccttcccagctgtcctgcagtctgacctctacactctgagcagctcagtgactgtcccctccagcacctggcccagcgagaccgtcacctgcaacgttgcccacccggccagcagcaccaaggtggacaagaaaattgtgcccagggattgtggttaggcaattgaaggcgaattgttaattaagaattcactcctctcgaggacggggtgaactacgcctgaggatccgatctttttccctctgccaaaaattatggggacatcatgaagccccttgagcatctgacttctggctaataaaggaaatttattttcattgcaatagtgtgttggaattttttgtgtctctcactcggcctaggtagataagtagcatggcgggttaatcattaactacaaggaacccctagtgatggagttggccactccctctctgcgcgctcgctcgctcactgaggccgggcgaccaaaggtcgcccgacgcccgggctttgcccgggcggcctcagtgagcgagcgagcgcgcag

SEQ ID NO: 2292 - DNA, 3751 bp, Artificial Sequence
  Description of Artificial Sequence: Synthetic polynucleotide
ctgcgcgctcgctcgctcactgaggccgcccgggcaaagcccgggcgtcgggcgacctttggtcgcccggcctcagtgagcgagcgagcgcgcagagagggagtggccaactccatcactaggggttccttgtagttaatgattaacccgccatgctacttatctaccagggtaatggggatcctctagaactatagctagtcgacataacgcgtctagttattaatagtaatcaattacggggtcattagttcatagcccatatatggagttccgcgttacataacttacggtaaatggcccgcctggctgaccgcccaacgacccccgcccattgacgtcaataatgacgtatgttcccatagtaacgccaatagggactttccattgacgtcaatgggtggagtatttacggtaaactgcccacttggcagtacatcaagtgtatcatatgccaagtacgccccctattgacgtcaatgacggtaaatggcccgcctggcattatgcccagtacatgaccttatgggactttcctacttggcagtacatctacgtattagtcatcgctattaccatggtcgaggtgagccccacgttctgcttcactctccccatctcccccccctccccacccccaattttgtatttatttattttttaattattttgtgcagcgatgggggcggggggggggggggggcgcgcgccaggcggggcggggcggggcgaggggcggggcggggcgaggcggagaggtgcggcggcagccaatcagagcggcgcgctccgaaagtttccttttatggcgaggcggcggcggcggcggccctataaaaagcgaagcgcgcggcgggcgggagtcgctgcgcgctgccttcgccccgtgccccgctccgccgccgcctcgcgccgcccgccccggctctgactgaccgcgttactcccacaggtgagcgggcgggacggcccttctcctccgggctgtaattagcgcttggtttaatgacggcttgtttcttttctgtggctgcgtgaaagccttgaggggctccgggagggccctttgtgcggggggagcggctcggggggtgcgtgcgtgtgtgtgtgcgtggggagcgccgcgtgcggctccgcgctgcccggcggctgtgagcgctgcgggcgcggcgcggggctttgtgcgctccgcagtgtgcgcgaggggagcgcggccgggggcggtgccccgcggtgcggggggggctgcgaggggaacaaaggctgcgtgcggggtgtgtgcgtgggggggtgagcagggggtgtgggcgcgtcggtcgggctgcaaccccccctgcacccccctccccgagttgctgagcacggcccggcttcgggtgcggggctccgtacggggcgtggcgcggggctcgccgtgccgggcggggggtggcggcaggtgggggtgccgggcggggcggggccgcctcgggccggggagggctcgggggaggggcgcggcggcccccggagcgccggcggctgtcgaggcgcggcgagccgcagccattgccttttatggtaatcgtgcgagagggcgcagggacttcctttgtcccaaatctgtgcggagccgaaatctgggaggcgccgccgcaccccctctagcgggcgcggggcgaagcggtgcggcgccggcaggaaggaaatgggcggggagggccttcgtgcgtcgccgcgccgccgtccccttctccctctccagcctcggggctgtccgcggggggacggctgccttcgggggggacggggcagggcggggttcggcttctggcgtgtgaccggcggctctagagcctctgctaaccatgttcatgccttcttctttttcctacagctcctgggcaacgtgctggttattgtgctgtctcatcattttggcaaagaattcgggattcgaaccggtgccgccaccatgaacttcgggctcagcttgattttccttgtccttgttttaaaaggtgtccagtgtcaggtgcagctgcagcagagcgacgccgagctggtgaaacctggggccagcgtcaagatcagctgcaaggcctccggctacaccttcaccgaccgcaccatccactgggtgaagcagcggcccgagcaggggctggagtggatcgggtacatctaccccggggacggctccaccaagtacaacgagaacttcaagggcaaagccaccctgacggccgacaagtccagcagcaccgcctacatgcagctgaacagcctgaccagcgaggacagcgccgtgtacttctgcgcccggcggggggctatggactactggggccagggcacctccgtgaccgtgtcctccgccaaaacgacacccccatctgtctatccactggcccctggatctgctgcccaaactaactccatggtgaccctgggatgcctggtcaagggctatttccctgagccagtgacagtgacctggaactctggatccctgtccagcggtgtgcacaccttcccagctgtcctgcagtctgacctctacactctgagcagctcagtgactgtcccctccagcacctggcccagcgagaccgtcacctgcaacgttgcccacccggccagcagcaccaaggtggacaagaaaattagaaagaggcgagagggcagaggaagtcttctaacatgcggtgacgtggaggagaatcccggccctatgaagttgcctgttaggctgttggtgctgatgttctggattcctgcttccagcagtgacgtgcagatgatccagagccccagcagcctgagcgcctcgctgggggacatcgtgaccatgacctgccaggcctcccagggcaccagcatcaacctcaactggttccagcagaagcccggcaaggcccccaagctcctcatctacggggccagcaacctggaggacggcgtgccctcccgcttcagcggctcccgctacggcacggacttcacgctgaccatctcctccctggaggacgaggacatggccacctacttctgcctgcagcacacctacctgcccttcaccttcggcagcgggaccaagctggagatcaagcgggctgatgctgcaccaactgtatccatcttcccaccatccagtgagcagttaacatctggaggtgcctcagtcgtgtgcttcttgaacaacttctaccccaaagacatcaatgtcaagtggaagattgatggcagtgaacgacaaaatggcgtcctgaacagttggactgatcaggacagcaaagacagcacctacagcatgagcagcaccctcacgttgaccaaggacgagtatgaacgacataacagctatacctgtgaggccactcacaagacatcaacttcacccattgtcaagagcttcaacaggaatgagtgttagtaactcgaggacggggtgaactacgcctgaggatccgatctttttccctctgccaaaaattatggggacatcatgaagccccttgagcatctgacttctggctaataaaggaaatttattttcattgcaatagtgtgttggaattttttgtgtctctcactcggcctaggtagataagtagcatggcgggttaatcattaactacaaggaacccctagtgatggagttggccactccctctctgcgcgctcgctcgctcactgaggccgggcgaccaaaggtcgcccgacgcccgggctttgcccgggcggcctcagtgagcgagcgagcgcgcag

SEQ ID NO: 2293 - DNA, 3058 bp, Artificial Sequence
  Description of Artificial Sequence: Synthetic polynucleotide
ctgcgcgctcgctcgctcactgaggccgcccgggcaaagcccgggcgtcgggcgacctttggtcgcccggcctcagtgagcgagcgagcgcgcagagagggagtggccaactccatcactaggggttccttgtagttaatgattaacccgccatgctacttatctaccagggtaatggggatcctctagaactatagctagtcgacataacgcgtctagttattaatagtaatcaattacggggtcattagttcatagcccatatatggagttccgcgttacataacttacggtaaatggcccgcctggctgaccgcccaacgacccccgcccattgacgtcaataatgacgtatgttcccatagtaacgccaatagggactttccattgacgtcaatgggtggagtatttacggtaaactgcccacttggcagtacatcaagtgtatcatatgccaagtacgccccctattgacgtcaatgacggtaaatggcccgcctggcattatgcccagtacatgaccttatgggactttcctacttggcagtacatctacgtattagtcatcgctattaccatggtcgaggtgagccccacgttctgcttcactctccccatctcccccccctccccacccccaattttgtatttatttattttttaattattttgtgcagcgatgggggcggggggggggggggggcgcgcgccaggcggggcggggcggggcgaggggcggggcggggcgaggcggagaggtgcggcggcagccaatcagagcggcgcgctccgaaagtttccttttatggcgaggcggcggcggcggcggccctataaaaagcgaagcgcgcggcgggcgggagtcgctgcgcgctgccttcgccccgtgccccgctccgccgccgcctcgcgccgcccgccccggctctgactgaccgcgttactcccacaggtgagcgggcgggacggcccttctcctccgggctgtaattagcgcttggtttaatgacggcttgtttcttttctgtggctgcgtgaaagccttgaggggctccgggagggccctttgtgcggggggagcggctcggggggtgcgtgcgtgtgtgtgtgcgtggggagcgccgcgtgcggctccgcgctgcccggcggctgtgagcgctgcgggcgcggcgcggggctttgtgcgctccgcagtgtgcgcgaggggagcgcggccgggggcggtgccccgcggtgcggggggggctgcgaggggaacaaaggctgcgtgcggggtgtgtgcgtgggggggtgagcagggggtgtgggcgcgtcggtcgggctgcaaccccccctgcacccccctccccgagttgctgagcacggcccggcttcgggtgcggggctccgtacggggcgtggcgcggggctcgccgtgccgggcggggggtggcggcaggtgggggtgccgggcggggcggggccgcctcgggccggggagggctcgggggaggggcgcggcggcccccggagcgccggcggctgtcgaggcgcggcgagccgcagccattgccttttatggtaatcgtgcgagagggcgcagggacttcctttgtcccaaatctgtgcggagccgaaatctgggaggcgccgccgcaccccctctagcgggcgcggggcgaagcggtgcggcgccggcaggaaggaaatgggcggggagggccttcgtgcgtcgccgcgccgccgtccccttctccctctccagcctcggggctgtccgcggggggacggctgccttcgggggggacggggcagggcggggttcggcttctggcgtgtgaccggcggctctagagcctctgctaaccatgttcatgccttcttctttttcctacagctcctgggcaacgtgctggttattgtgctgtctcatcattttggcaaagaattcgggattcgaaccggtgccgccaccatgaagttgcctgttaggctgttggtgctgatgttctggattcctgcttccagcagtgacgtgcagatgatccagagccccagcagcctgagcgcctcgctgggggacatcgtgaccatgacctgccaggcctcccagggcaccagcatcaacctcaactggttccagcagaagcccggcaaggcccccaagctcctcatctacggggccagcaacctggaggacggcgtgccctcccgcttcagcggctcccgctacggcacggacttcacgctgaccatctcctccctggaggacgaggacatggccacctacttctgcctgcagcacacctacctgcccttcaccttcggcagcgggaccaagctggagatcaagggtggtggtggatcccaggtgcagctgcagcagagcgacgccgagctggtgaaacctggggccagcgtcaagatcagctgcaaggcctccggctacaccttcaccgaccgcaccatccactgggtgaagcagcggcccgagcaggggctggagtggatcgggtacatctaccccggggacggctccaccaagtacaacgagaacttcaagggcaaagccaccctgacggccgacaagtccagcagcaccgcctacatgcagctgaacagcctgaccagcgaggacagcgccgtgtacttctgcgcccggcggggggctatggactactggggccagggcacctccgtgaccgtgtcctcctacccatacgatgttccagattacgcttagtaactcgaggacggggtgaactacgcctgaggatccgatctttttccctctgccaaaaattatggggacatcatgaagccccttgagcatctgacttctggctaataaaggaaatttattttcattgcaatagtgtgttggaattttttgtgtctctcactcggcctaggtagataagtagcatggcgggttaatcattaactacaaggaacccctagtgatggagttggccactccctctctgcgcgctcgctcgctcactgaggccgggcgaccaaaggtcgcccgacgcccgggctttgcccgggcggcctcagtgagcgagcgagcgcgcag

SEQ ID NO: 2294 - DNA, 3088 bp, Artificial Sequence
  Description of Artificial Sequence: Synthetic polynucleotide
ctgcgcgctcgctcgctcactgaggccgcccgggcaaagcccgggcgtcgggcgacctttggtcgcccggcctcagtgagcgagcgagcgcgcagagagggagtggccaactccatcactaggggttccttgtagttaatgattaacccgccatgctacttatctaccagggtaatggggatcctctagaactatagctagtcgacataacgcgtctagttattaatagtaatcaattacggggtcattagttcatagcccatatatggagttccgcgttacataacttacggtaaatggcccgcctggctgaccgcccaacgacccccgcccattgacgtcaataatgacgtatgttcccatagtaacgccaatagggactttccattgacgtcaatgggtggagtatttacggtaaactgcccacttggcagtacatcaagtgtatcatatgccaagtacgccccctattgacgtcaatgacggtaaatggcccgcctggcattatgcccagtacatgaccttatgggactttcctacttggcagtacatctacgtattagtcatcgctattaccatggtcgaggtgagccccacgttctgcttcactctccccatctcccccccctccccacccccaattttgtatttatttattttttaattattttgtgcagcgatgggggcggggggggggggggggcgcgcgccaggcggggcggggcggggcgaggggcggggcggggcgaggcggagaggtgcggcggcagccaatcagagcggcgcgctccgaaagtttccttttatggcgaggcggcggcggcggcggccctataaaaagcgaagcgcgcggcgggcgggagtcgctgcgcgctgccttcgccccgtgccccgctccgccgccgcctcgcgccgcccgccccggctctgactgaccgcgttactcccacaggtgagcgggcgggacggcccttctcctccgggctgtaattagcgcttggtttaatgacggcttgtttcttttctgtggctgcgtgaaagccttgaggggctccgggagggccctttgtgcggggggagcggctcggggggtgcgtgcgtgtgtgtgtgcgtggggagcgccgcgtgcggctccgcgctgcccggcggctgtgagcgctgcgggcgcggcgcggggctttgtgcgctccgcagtgtgcgcgaggggagcgcggccgggggcggtgccccgcggtgcggggggggctgcgaggggaacaaaggctgcgtgcggggtgtgtgcgtgggggggtgagcagggggtgtgggcgcgtcggtcgggctgcaaccccccctgcacccccctccccgagttgctgagcacggcccggcttcgggtgcggggctccgtacggggcgtggcgcggggctcgccgtgccgggcggggggtggcggcaggtgggggtgccgggcggggcggggccgcctcgggccggggagggctcgggggaggggcgcggcggcccccggagcgccggcggctgtcgaggcgcggcgagccgcagccattgccttttatggtaatcgtgcgagagggcgcagggacttcctttgtcccaaatctgtgcggagccgaaatctgggaggcgccgccgcaccccctctagcgggcgcggggcgaagcggtgcggcgccggcaggaaggaaatgggcggggagggccttcgtgcgtcgccgcgccgccgtccccttctccctctccagcctcggggctgtccgcggggggacggctgccttcgggggggacggggcagggcggggttcggcttctggcgtgtgaccggcggctctagagcctctgctaaccatgttcatgccttcttctttttcctacagctcctgggcaacgtgctggttattgtgctgtctcatcattttggcaaagaattcgggattcgaaccggtgccgccaccatgaagttgcctgttaggctgttggtgctgatgttctggattcctgcttccagcagtgacgtgcagatgatccagagccccagcagcctgagcgcctcgctgggggacatcgtgaccatgacctgccaggcctcccagggcaccagcatcaacctcaactggttccagcagaagcccggcaaggcccccaagctcctcatctacggggccagcaacctggaggacggcgtgccctcccgcttcagcggctcccgctacggcacggacttcacgctgaccatctcctccctggaggacgaggacatggccacctacttctgcctgcagcacacctacctgcccttcaccttcggcagcgggaccaagctggagatcaagggtggtggtggatccggtggtggtggatccggtggtggtggatcccaggtgcagctgcagcagagcgacgccgagctggtgaaacctggggccagcgtcaagatcagctgcaaggcctccggctacaccttcaccgaccgcaccatccactgggtgaagcagcggcccgagcaggggctggagtggatcgggtacatctaccccggggacggctccaccaagtacaacgagaacttcaagggcaaagccaccctgacggccgacaagtccagcagcaccgcctacatgcagctgaacagcctgaccagcgaggacagcgccgtgtacttctgcgcccggcggggggctatggactactggggccagggcacctccgtgaccgtgtcctcctacccatacgatgttccagattacgcttagtaactcgaggacggggtgaactacgcctgaggatccgatctttttccctctgccaaaaattatggggacatcatgaagccccttgagcatctgacttctggctaataaaggaaatttattttcattgcaatagtgtgttggaattttttgtgtctctcactcggcctaggtagataagtagcatggcgggttaatcattaactacaaggaacccctagtgatggagttggccactccctctctgcgcgctcgctcgctcactgaggccgggcgaccaaaggtcgcccgacgcccgggctttgcccgggcggcctcagtgagcgagcgagcgcgcag

SEQ ID NO: 2295 - DNA, 3118 bp, Artificial Sequence
  Description of Artificial Sequence: Synthetic polynucleotide
ctgcgcgctcgctcgctcactgaggccgcccgggcaaagcccgggcgtcgggcgacctttggtcgcccggcctcagtgagcgagcgagcgcgcagagagggagtggccaactccatcactaggggttccttgtagttaatgattaacccgccatgctacttatctaccagggtaatggggatcctctagaactatagctagtcgacataacgcgtctagttattaatagtaatcaattacggggtcattagttcatagcccatatatggagttccgcgttacataacttacggtaaatggcccgcctggctgaccgcccaacgacccccgcccattgacgtcaataatgacgtatgttcccatagtaacgccaatagggactttccattgacgtcaatgggtggagtatttacggtaaactgcccacttggcagtacatcaagtgtatcatatgccaagtacgccccctattgacgtcaatgacggtaaatggcccgcctggcattatgcccagtacatgaccttatgggactttcctacttggcagtacatctacgtattagtcatcgctattaccatggtcgaggtgagccccacgttctgcttcactctccccatctcccccccctccccacccccaattttgtatttatttattttttaattattttgtgcagcgatgggggcggggggggggggggggcgcgcgccaggcggggcggggcggggcgaggggcggggcggggcgaggcggagaggtgcggcggcagccaatcagagcggcgcgctccgaaagtttccttttatggcgaggcggcggcggcggcggccctataaaaagcgaagcgcgcggcgggcgggagtcgctgcgcgctgccttcgccccgtgccccgctccgccgccgcctcgcgccgcccgccccggctctgactgaccgcgttactcccacaggtgagcgggcgggacggcccttctcctccgggctgtaattagcgcttggtttaatgacggcttgtttcttttctgtggctgcgtgaaagccttgaggggctccgggagggccctttgtgcggggggagcggctcggggggtgcgtgcgtgtgtgtgtgcgtggggagcgccgcgtgcggctccgcgctgcccggcggctgtgagcgctgcgggcgcggcgcggggctttgtgcgctccgcagtgtgcgcgaggggagcgcggccgggggcggtgccccgcggtgcggggggggctgcgaggggaacaaaggctgcgtgcggggtgtgtgcgtgggggggtgagcagggggtgtgggcgcgtcggtcgggctgcaaccccccctgcacccccctccccgagttgctgagcacggcccggcttcgggtgcggggctccgtacggggcgtggcgcggggctcgccgtgccgggcggggggtggcggcaggtgggggtgccgggcggggcggggccgcctcgggccggggagggctcgggggaggggcgcggcggcccccggagcgccggcggctgtcgaggcgcggcgagccgcagccattgccttttatggtaatcgtgcgagagggcgcagggacttcctttgtcccaaatctgtgcggagccgaaatctgggaggcgccgccgcaccccctctagcgggcgcggggcgaagcggtgcggcgccggcaggaaggaaatgggcggggagggccttcgtgcgtcgccgcgccgccgtccccttctccctctccagcctcggggctgtccgcggggggacggctgccttcgggggggacggggcagggcggggttcggcttctggcgtgtgaccggcggctctagagcctctgctaaccatgttcatgccttcttctttttcctacagctcctgggcaacgtgctggttattgtgctgtctcatcattttggcaaagaattcgggattcgaaccggtgccgccaccatgaagttgcctgttaggctgttggtgctgatgttctggattcctgcttccagcagtgacgtgcagatgatccagagccccagcagcctgagcgcctcgctgggggacatcgtgaccatgacctgccaggcctcccagggcaccagcatcaacctcaactggttccagcagaagcccggcaaggcccccaagctcctcatctacggggccagcaacctggaggacggcgtgccctcccgcttcagcggctcccgctacggcacggacttcacgctgaccatctcctccctggaggacgaggacatggccacctacttctgcctgcagcacacctacctgcccttcaccttcggcagcgggaccaagctggagatcaagggtggtggtggatccggtggtggtggatccggtggtggtggatccggtggtggtggatccggtggtggtggatcccaggtgcagctgcagcagagcgacgccgagctggtgaaacctggggccagcgtcaagatcagctgcaaggcctccggctacaccttcaccgaccgcaccatccactgggtgaagcagcggcccgagcaggggctggagtggatcgggtacatctaccccggggacggctccaccaagtacaacgagaacttcaagggcaaagccaccctgacggccgacaagtccagcagcaccgcctacatgcagctgaacagcctgaccagcgaggacagcgccgtgtacttctgcgcccggcggggggctatggactactggggccagggcacctccgtgaccgtgtcctcctacccatacgatgttccagattacgcttagtaactcgaggacggggtgaactacgcctgaggatccgatctttttccctctgccaaaaattatggggacatcatgaagccccttgagcatctgacttctggctaataaaggaaatttattttcattgcaatagtgtgttggaattttttgtgtctctcactcggcctaggtagataagtagcatggcgggttaatcattaactacaaggaacccctagtgatggagttggccactccctctctgcgcgctcgctcgctcactgaggccgggcgaccaaaggtcgcccgacgcccgggctttgcccgggcggcctcagtgagcgagcgagcgcgcag

SEQ ID NO: 2296 - DNA, 3163 bp, Artificial Sequence
  Description of Artificial Sequence: Synthetic polynucleotide
ctgcgcgctcgctcgctcactgaggccgcccgggcaaagcccgggcgtcgggcgacctttggtcgcccggcctcagtgagcgagcgagcgcgcagagagggagtggccaactccatcactaggggttccttgtagttaatgattaacccgccatgctacttatctaccagggtaatggggatcctctagaactatagctagtcgacataacgcgtctagttattaatagtaatcaattacggggtcattagttcatagcccatatatggagttccgcgttacataacttacggtaaatggcccgcctggctgaccgcccaacgacccccgcccattgacgtcaataatgacgtatgttcccatagtaacgccaatagggactttccattgacgtcaatgggtggagtatttacggtaaactgcccacttggcagtacatcaagtgtatcatatgccaagtacgccccctattgacgtcaatgacggtaaatggcccgcctggcattatgcccagtacatgaccttatgggactttcctacttggcagtacatctacgtattagtcatcgctattaccatggtcgaggtgagccccacgttctgcttcactctccccatctcccccccctccccacccccaattttgtatttatttattttttaattattttgtgcagcgatgggggcggggggggggggggggcgcgcgccaggcggggcggggcggggcgaggggcggggcggggcgaggcggagaggtgcggcggcagccaatcagagcggcgcgctccgaaagtttccttttatggcgaggcggcggcggcggcggccctataaaaagcgaagcgcgcggcgggcgggagtcgctgcgcgctgccttcgccccgtgccccgctccgccgccgcctcgcgccgcccgccccggctctgactgaccgcgttactcccacaggtgagcgggcgggacggcccttctcctccgggctgtaattagcgcttggtttaatgacggcttgtttcttttctgtggctgcgtgaaagccttgaggggctccgggagggccctttgtgcggggggagcggctcggggggtgcgtgcgtgtgtgtgtgcgtggggagcgccgcgtgcggctccgcgctgcccggcggctgtgagcgctgcgggcgcggcgcggggctttgtgcgctccgcagtgtgcgcgaggggagcgcggccgggggcggtgccccgcggtgcggggggggctgcgaggggaacaaaggctgcgtgcggggtgtgtgcgtgggggggtgagcagggggtgtgggcgcgtcggtcgggctgcaaccccccctgcacccccctccccgagttgctgagcacggcccggcttcgggtgcggggctccgtacggggcgtggcgcggggctcgccgtgccgggcggggggtggcggcaggtgggggtgccgggcggggcggggccgcctcgggccggggagggctcgggggaggggcgcggcggcccccggagcgccggcggctgtcgaggcgcggcgagccgcagccattgccttttatggtaatcgtgcgagagggcgcagggacttcctttgtcccaaatctgtgcggagccgaaatctgggaggcgccgccgcaccccctctagcgggcgcggggcgaagcggtgcggcgccggcaggaaggaaatgggcggggagggccttcgtgcgtcgccgcgccgccgtccccttctccctctccagcctcggggctgtccgcggggggacggctgccttcgggggggacggggcagggcggggttcggcttctggcgtgtgaccggcggctctagagcctctgctaaccatgttcatgccttcttctttttcctacagctcctgggcaacgtgctggttattgtgctgtctcatcattttggcaaagaattcgggattcgaaccggtgccgccaccatgaagttgcctgttaggctgttggtgctgatgttctggattcctgcttccagcagtgacgtgcagatgatccagagccccagcagcctgagcgcctcgctgggggacatcgtgaccatgacctgccaggcctcccagggcaccagcatcaacctcaactggttccagcagaagcccggcaaggcccccaagctcctcatctacggggccagcaacctggaggacggcgtgccctcccgcttcagcggctcccgctacggcacggacttcacgctgaccatctcctccctggaggacgaggacatggccacctacttctgcctgcagcacacctacctgcccttcaccttcggcagcgggaccaagctggagatcaagggtggtggtggatccggtggtggtggatccggtggtggtggatccggtggtggtggatccggtggtggtggatccggtggtggtggatccggtggtggtggatccggtggtggtggatcccaggtgcagctgcagcagagcgacgccgagctggtgaaacctggggccagcgtcaagatcagctgcaaggcctccggctacaccttcaccgaccgcaccatccactgggtgaagcagcggcccgagcaggggctggagtggatcgggtacatctaccccggggacggctccaccaagtacaacgagaacttcaagggcaaagccaccctgacggccgacaagtccagcagcaccgcctacatgcagctgaacagcctgaccagcgaggacagcgccgtgtacttctgcgcccggcggggggctatggactactggggccagggcacctccgtgaccgtgtcctcctacccatacgatgttccagattacgcttagtaactcgaggacggggtgaactacgcctgaggatccgatctttttccctctgccaaaaattatggggacatcatgaagccccttgagcatctgacttctggctaataaaggaaatttattttcattgcaatagtgtgttggaattttttgtgtctctcactcggcctaggtagataagtagcatggcgggttaatcattaactacaaggaacccctagtgatggagttggccactccctctctgcgcgctcgctcgctcactgaggccgggcgaccaaaggtcgcccgacgcccgggctttgcccgggcggcctcagtgagcgagcgagcgcgcag

SEQ ID NO: 2297 - DNA, 3537 bp, Artificial Sequence
  Description of Artificial Sequence: Synthetic polynucleotide
ctgcgcgctcgctcgctcactgaggccgcccgggcaaagcccgggcgtcgggcgacctttggtcgcccggcctcagtgagcgagcgagcgcgcagagagggagtggccaactccatcactaggggttccttgtagttaatgattaacccgccatgctacttatctaccagggtaatggggatcctctagaactatagctagtcgacataacgcgtgatctaacatatcctggtgtggagtagcggacgctgctatgacagaggctcgggggcctgagctggctctgtgagctggggaggaggcagacagccaggccttgtctgcaagcagacctggcagcattgggctggccgccccccagggcctcctcttcatgcccagtgaatgactcaccttggcacagacacaatgttcggggtgggcacagtgcctgcttcccgccgcaccccagcccccctcaaatgccttccgagaagcccattgagcagggggcttgcattgcaccccagcctgacagcctggcatcttgggataaaagcagcacagccccctaggggctgcccttgctgtgtggcgccaccggcggtggagaacaaggctctattcagcctgtgcccaggaaaggggatcaggggatgcccaggcatggacagtgggtggcagggggggagaggagggctgtctgcttcccagaagtccaaggacacaaatgggtgaggggagagctctccccatagctgggctgcggcccaaccccaccccctcaggctatgccagggggtgttgccaggggcacccgggcatcgccagtctagcccactccttcataaagccctcgcatcccaggagcgagcagagccagagcaggttggagaggagacgcatcacctccgctgctcgcggggatcctctagaagcttcgtttagtgaaccgtcagatcgcctggagacgccatccacgctgttttgacctccatagaagacaccgggaccgatccagcctccgcggattcgaatcccggccgggaacggtgcattggaacgcggattccccgtgccaagagtgacgtaagtaccgcctatagagtctataggcccacaaaaaatgctttcttcttttaatatacttttttgtttatcttatttctaatactttccctaatctctttctttcagggcaataatgatacaatgtatcatgcctctttgcaccattctaaagaataacagtgataatttctgggttaaggcaatagcaatatttctgcatataaatatttctgcatataaattgtaactgatgtaagaggtttcatattgctaatagcagctacaatccagctaccattctgcttttattttatggttgggataaggctggattattctgagtccaagctaggcccttttgctaatcatgttcatacctcttatcttcctcccacagctcctgggcaacgtgctggtctgtgtgctggcccatcactttggcaaagaattgggattcgaaccggtgccgccaccatgaacttcgggctcagcttgattttccttgtccttgttttaaaaggtgtccagtgtcaggtgcagctgcagcagagcgacgccgagctggtgaaacctggggccagcgtcaagatcagctgcaaggcctccggctacaccttcaccgaccgcaccatccactgggtgaagcagcggcccgagcaggggctggagtggatcgggtacatctaccccggggacggctccaccaagtacaacgagaacttcaagggcaaagccaccctgacggccgacaagtccagcagcaccgcctacatgcagctgaacagcctgaccagcgaggacagcgccgtgtacttctgcgcccggcggggggctatggactactggggccagggcacctccgtgaccgtgtcctccgccaaaacgacacccccatctgtctatccactggcccctggatctgctgcccaaactaactccatggtgaccctgggatgcctggtcaagggctatttccctgagccagtgacagtgacctggaactctggatccctgtccagcggtgtgcacaccttcccagctgtcctgcagtctgacctctacactctgagcagctcagtgactgtcccctccagcacctggcccagcgagaccgtcacctgcaacgttgcccacccggccagcagcaccaaggtggacaagaaaattgtgcccagggattgtggtgagctcaaaaccccacttggtgacacaactcacacatgcccacggtgcccagagcccaaatcttgtgacacacctcccccgtgcccacggtgcccagagcccaaatcttgtgacacaactcacacatgcccacggtgcccagagcccaaatcttgtgacacacctcccccgtgcccaaggtgcccagcacctgaactcagaaagaggcgagagggcagaggaagtcttctaacatgcggtgacgtggaggagaatcccggccctatgaagttgcctgttaggctgttggtgctgatgttctggattcctgcttccagcagtgacgtgcagatgatccagagccccagcagcctgagcgcctcgctgggggacatcgtgaccatgacctgccaggcctcccagggcaccagcatcaacctcaactggttccagcagaagcccggcaaggcccccaagctcctcatctacggggccagcaacctggaggacggcgtgccctcccgcttcagcggctcccgctacggcacggacttcacgctgaccatctcctccctggaggacgaggacatggccacctacttctgcctgcagcacacctacctgcccttcaccttcggcagcgggaccaagctggagatcaagcgggctgatgctgcaccaactgtatccatcttcccaccatccagtgagcagttaacatctggaggtgcctcagtcgtgtgcttcttgaacaacttctaccccaaagacatcaatgtcaagtggaagattgatggcagtgaacgacaaaatggcgtcctgaacagttggactgatcaggacagcaaagacagcacctacagcatgagcagcaccctcacgttgaccaaggacgagtatgaacgacataacagctatacctgtgaggccactcacaagacatcaacttcacccattgtcaagagcttcaacaggaatgagtgttagtaactcgaggacggggtgaactacgcctgaggatccgatctttttccctctgccaaaaattatggggacatcatgaagccccttgagcatctgacttctggctaataaaggaaatttattttcattgcaatagtgtgttggaattttttgtgtctctcactcggcctaggtagataagtagcatggcgggttaatcattaactacaaggaacccctagtgatggagttggccactccctctctgcgcgctcgctcgctcactgaggccgggcgaccaaaggtcgcccgacgcccgggctttgcccgggcggcctcagtgagcgagcgagcgcgcag

SEQ ID NO: 2298 - DNA, 3339 bp, Artificial Sequence
  Description of Artificial Sequence: Synthetic polynucleotide
ctgcgcgctcgctcgctcactgaggccgcccgggcaaagcccgggcgtcgggcgacctttggtcgcccggcctcagtgagcgagcgagcgcgcagagagggagtggccaactccatcactaggggttccttgtagttaatgattaacccgccatgctacttatctaccagggtaatggggatcctctagaactatagctagtcgacataacgcgtgatctaacatatcctggtgtggagtagcggacgctgctatgacagaggctcgggggcctgagctggctctgtgagctggggaggaggcagacagccaggccttgtctgcaagcagacctggcagcattgggctggccgccccccagggcctcctcttcatgcccagtgaatgactcaccttggcacagacacaatgttcggggtgggcacagtgcctgcttcccgccgcaccccagcccccctcaaatgccttccgagaagcccattgagcagggggcttgcattgcaccccagcctgacagcctggcatcttgggataaaagcagcacagccccctaggggctgcccttgctgtgtggcgccaccggcggtggagaacaaggctctattcagcctgtgcccaggaaaggggatcaggggatgcccaggcatggacagtgggtggcagggggggagaggagggctgtctgcttcccagaagtccaaggacacaaatgggtgaggggagagctctccccatagctgggctgcggcccaaccccaccccctcaggctatgccagggggtgttgccaggggcacccgggcatcgccagtctagcccactccttcataaagccctcgcatcccaggagcgagcagagccagagcaggttggagaggagacgcatcacctccgctgctcgcggggatcctctagaagcttcgtttagtgaaccgtcagatcgcctggagacgccatccacgctgttttgacctccatagaagacaccgggaccgatccagcctccgcggattcgaatcccggccgggaacggtgcattggaacgcggattccccgtgccaagagtgacgtaagtaccgcctatagagtctataggcccacaaaaaatgctttcttcttttaatatacttttttgtttatcttatttctaatactttccctaatctctttctttcagggcaataatgatacaatgtatcatgcctctttgcaccattctaaagaataacagtgataatttctgggttaaggcaatagcaatatttctgcatataaatatttctgcatataaattgtaactgatgtaagaggtttcatattgctaatagcagctacaatccagctaccattctgcttttattttatggttgggataaggctggattattctgagtccaagctaggcccttttgctaatcatgttcatacctcttatcttcctcccacagctcctgggcaacgtgctggtctgtgtgctggcccatcactttggcaaagaattgggattcgaaccggtgccgccaccatgaacttcgggctcagcttgattttccttgtccttgttttaaaaggtgtccagtgtcaggtgcagctgcagcagagcgacgccgagctggtgaaacctggggccagcgtcaagatcagctgcaaggcctccggctacaccttcaccgaccgcaccatccactgggtgaagcagcggcccgagcaggggctggagtggatcgggtacatctaccccggggacggctccaccaagtacaacgagaacttcaagggcaaagccaccctgacggccgacaagtccagcagcaccgcctacatgcagctgaacagcctgaccagcgaggacagcgccgtgtacttctgcgcccggcggggggctatggactactggggccagggcacctccgtgaccgtgtcctccgccaaaacgacacccccatctgtctatccactggcccctggatctgctgcccaaactaactccatggtgaccctgggatgcctggtcaagggctatttccctgagccagtgacagtgacctggaactctggatccctgtccagcggtgtgcacaccttcccagctgtcctgcagtctgacctctacactctgagcagctcagtgactgtcccctccagcacctggcccagcgagaccgtcacctgcaacgttgcccacccggccagcagcaccaaggtggacaagaaaattgtgcccagggattgtggtagaaagaggcgagagggcagaggaagtcttctaacatgcggtgacgtggaggagaatcccggccctatgaagttgcctgttaggctgttggtgctgatgttctggattcctgcttccagcagtgacgtgcagatgatccagagccccagcagcctgagcgcctcgctgggggacatcgtgaccatgacctgccaggcctcccagggcaccagcatcaacctcaactggttccagcagaagcccggcaaggcccccaagctcctcatctacggggccagcaacctggaggacggcgtgccctcccgcttcagcggctcccgctacggcacggacttcacgctgaccatctcctccctggaggacgaggacatggccacctacttctgcctgcagcacacctacctgcccttcaccttcggcagcgggaccaagctggagatcaagcgggctgatgctgcaccaactgtatccatcttcccaccatccagtgagcagttaacatctggaggtgcctcagtcgtgtgcttcttgaacaacttctaccccaaagacatcaatgtcaagtggaagattgatggcagtgaacgacaaaatggcgtcctgaacagttggactgatcaggacagcaaagacagcacctacagcatgagcagcaccctcacgttgaccaaggacgagtatgaacgacataacagctatacctgtgaggccactcacaagacatcaacttcacccattgtcaagagcttcaacaggaatgagtgttagtaactcgaggacggggtgaactacgcctgaggatccgatctttttccctctgccaaaaattatggggacatcatgaagccccttgagcatctgacttctggctaataaaggaaatttattttcattgcaatagtgtgttggaattttttgtgtctctcactcggcctaggtagataagtagcatggcgggttaatcattaactacaaggaacccctagtgatggagttggccactccctctctgcgcgctcgctcgctcactgaggccgggcgaccaaaggtcgcccgacgcccgggctttgcccgggcggcctcagtgagcgagcgagcgcgcag

SEQ ID NO: 2299 - DNA, 3362 bp, Artificial Sequence
  Description of Artificial Sequence: Synthetic polynucleotide
ctgcgcgctcgctcgctcactgaggccgcccgggcaaagcccgggcgtcgggcgacctttggtcgcccggcctcagtgagcgagcgagcgcgcagagagggagtggccaactccatcactaggggttccttgtagttaatgattaacccgccatgctacttatctaccagggtaatggggatcctctagaactatagctagtcgacataacgcgtgatctaacatatcctggtgtggagtagcggacgctgctatgacagaggctcgggggcctgagctggctctgtgagctggggaggaggcagacagccaggccttgtctgcaagcagacctggcagcattgggctggccgccccccagggcctcctcttcatgcccagtgaatgactcaccttggcacagacacaatgttcggggtgggcacagtgcctgcttcccgccgcaccccagcccccctcaaatgccttccgagaagcccattgagcagggggcttgcattgcaccccagcctgacagcctggcatcttgggataaaagcagcacagccccctaggggctgcccttgctgtgtggcgccaccggcggtggagaacaaggctctattcagcctgtgcccaggaaaggggatcaggggatgcccaggcatggacagtgggtggcagggggggagaggagggctgtctgcttcccagaagtccaaggacacaaatgggtgaggggagagctctccccatagctgggctgcggcccaaccccaccccctcaggctatgccagggggtgttgccaggggcacccgggcatcgccagtctagcccactccttcataaagccctcgcatcccaggagcgagcagagccagagcaggttggagaggagacgcatcacctccgctgctcgcggggatcctctagaagcttcgtttagtgaaccgtcagatcgcctggagacgccatccacgctgttttgacctccatagaagacaccgggaccgatccagcctccgcggattcgaatcccggccgggaacggtgcattggaacgcggattccccgtgccaagagtgacgtaagtaccgcctatagagtctataggcccacaaaaaatgctttcttcttttaatatacttttttgtttatcttatttctaatactttccctaatctctttctttcagggcaataatgatacaatgtatcatgcctctttgcaccattctaaagaataacagtgataatttctgggttaaggcaatagcaatatttctgcatataaatatttctgcatataaattgtaactgatgtaagaggtttcatattgctaatagcagctacaatccagctaccattctgcttttattttatggttgggataaggctggattattctgagtccaagctaggcccttttgctaatcatgttcatacctcttatcttcctcccacagctcctgggcaacgtgctggtctgtgtgctggcccatcactttggcaaagaattgggattcgaaccggtgccgccaccatgaagttgcctgttaggctgttggtgctgatgttctggattcctgcttccagcagtgacgtgcagatgatccagagccccagcagcctgagcgcctcgctgggggacatcgtgaccatgacctgccaggcctcccagggcaccagcatcaacctcaactggttccagcagaagcccggcaaggcccccaagctcctcatctacggggccagcaacctggaggacggcgtgccctcccgcttcagcggctcccgctacggcacggacttcacgctgaccatctcctccctggaggacgaggacatggccacctacttctgcctgcagcacacctacctgcccttcaccttcggcagcgggaccaagctggagatcaagcgggctgatgctgcaccaactgtatccatcttcccaccatccagtgagcagttaacatctggaggtgcctcagtcgtgtgcttcttgaacaacttctaccccaaagacatcaatgtcaagtggaagattgatggcagtgaacgacaaaatggcgtcctgaacagttggactgatcaggacagcaaagacagcacctacagcatgagcagcaccctcacgttgaccaaggacgagtatgaacgacataacagctatacctgtgaggccactcacaagacatcaacttcacccattgtcaagagcttcaacaggaatgagtgtgagggcagaggaagtcttctaacatgcggtgacgtggaggagaatcccggccctatgaacttcgggctcagcttgattttccttgtccttgttttaaaaggtgtccagtgtcaggtgcagctgcagcagagcgacgccgagctggtgaaacctggggccagcgtcaagatcagctgcaaggcctccggctacaccttcaccgaccgcaccatccactgggtgaagcagcggcccgagcaggggctggagtggatcgggtacatctaccccggggacggctccaccaagtacaacgagaacttcaagggcaaagccaccctgacggccgacaagtccagcagcaccgcctacatgcagctgaacagcctgaccagcgaggacagcgccgtgtacttctgcgcccggcggggggctatggactactggggccagggcacctccgtgaccgtgtcctccgccaaaacgacacccccatctgtctatccactggcccctggatctgctgcccaaactaactccatggtgaccctgggatgcctggtcaagggctatttccctgagccagtgacagtgacctggaactctggatccctgtccagcggtgtgcacaccttcccagctgtcctgcagtctgacctctacactctgagcagctcagtgactgtcccctccagcacctggcccagcgagaccgtcacctgcaacgttgcccacccggccagcagcaccaaggtggacaagaaaattgtgcccagggattgtggttaggcaattgaaggcgaattgttaattaagaattcactcctcacgaggacggggtgaactacgcctgaggatccgatctttttccctctgccaaaaattatggggacatcatgaagccccttgagcatctgacttctggctaataaaggaaatttattttcattgcaatagtgtgttggaattttttgtgtctctcactcggcctaggtagataagtagcatggcgggttaatcattaactacaaggaacccctagtgatggagttggccactccctctctgcgcgctcgctcgctcactgaggccgggcgaccaaaggtcgcccgacgcccgggctttgcccgggcggcctcagtgagcgagcgagcgcgcag

SEQ ID NO: 2300 - DNA, 3321 bp, Artificial Sequence
  Description of Artificial Sequence: Synthetic polynucleotide
ctgcgcgctcgctcgctcactgaggccgcccgggcaaagcccgggcgtcgggcgacctttggtcgcccggcctcagtgagcgagcgagcgcgcagagagggagtggccaactccatcactaggggttccttgtagttaatgattaacccgccatgctacttatctaccagggtaatggggatcctctagaactatagctagtcgacataacgcgtgatctaacatatcctggtgtggagtagcggacgctgctatgacagaggctcgggggcctgagctggctctgtgagctggggaggaggcagacagccaggccttgtctgcaagcagacctggcagcattgggctggccgccccccagggcctcctcttcatgcccagtgaatgactcaccttggcacagacacaatgttcggggtgggcacagtgcctgcttcccgccgcaccccagcccccctcaaatgccttccgagaagcccattgagcagggggcttgcattgcaccccagcctgacagcctggcatcttgggataaaagcagcacagccccctaggggctgcccttgctgtgtggcgccaccggcggtggagaacaaggctctattcagcctgtgcccaggaaaggggatcaggggatgcccaggcatggacagtgggtggcagggggggagaggagggctgtctgcttcccagaagtccaaggacacaaatgggtgaggggagagctctccccatagctgggctgcggcccaaccccaccccctcaggctatgccagggggtgttgccaggggcacccgggcatcgccagtctagcccactccttcataaagccctcgcatcccaggagcgagcagagccagagcaggttggagaggagacgcatcacctccgctgctcgcggggatcctctagaagcttcgtttagtgaaccgtcagatcgcctggagacgccatccacgctgttttgacctccatagaagacaccgggaccgatccagcctccgcggattcgaatcccggccgggaacggtgcattggaacgcggattccccgtgccaagagtgacgtaagtaccgcctatagagtctataggcccacaaaaaatgctttcttcttttaatatacttttttgtttatcttatttctaatactttccctaatctctttctttcagggcaataatgatacaatgtatcatgcctctttgcaccattctaaagaataacagtgataatttctgggttaaggcaatagcaatatttctgcatataaatatttctgcatataaattgtaactgatgtaagaggtttcatattgctaatagcagctacaatccagctaccattctgcttttattttatggttgggataaggctggattattctgagtccaagctaggcccttttgctaatcatgttcatacctcttatcttcctcccacagctcctgggcaacgtgctggtctgtgtgctggcccatcactttggcaaagaattgggattcgaaccggtgccgccaccatgaacttcgggctcagcttgattttccttgtccttgttttaaaaggtgtccagtgtcaggtgcagctgcagcagagcgacgccgagctggtgaaacctggggccagcgtcaagatcagctgcaaggcctccggctacaccttcaccgaccgcaccatccactgggtgaagcagcggcccgagcaggggctggagtggatcgggtacatctaccccggggacggctccaccaagtacaacgagaacttcaagggcaaagccaccctgacggccgacaagtccagcagcaccgcctacatgcagctgaacagcctgaccagcgaggacagcgccgtgtacttctgcgcccggcggggggctatggactactggggccagggcacctccgtgaccgtgtcctccgccaaaacgacacccccatctgtctatccactggcccctggatctgctgcccaaactaactccatggtgaccctgggatgcctggtcaagggctatttccctgagccagtgacagtgacctggaactctggatccctgtccagcggtgtgcacaccttcccagctgtcctgcagtctgacctctacactctgagcagctcagtgactgtcccctccagcacctggcccagcgagaccgtcacctgcaacgttgcccacccggccagcagcaccaaggtggacaagaaaattagaaagaggcgagagggcagaggaagtcttctaacatgcggtgacgtggaggagaatcccggccctatgaagttgcctgttaggctgttggtgctgatgttctggattcctgcttccagcagtgacgtgcagatgatccagagccccagcagcctgagcgcctcgctgggggacatcgtgaccatgacctgccaggcctcccagggcaccagcatcaacctcaactggttccagcagaagcccggcaaggcccccaagctcctcatctacggggccagcaacctggaggacggcgtgccctcccgcttcagcggctcccgctacggcacggacttcacgctgaccatctcctccctggaggacgaggacatggccacctacttctgcctgcagcacacctacctgcccttcaccttcggcagcgggaccaagctggagatcaagcgggctgatgctgcaccaactgtatccatcttcccaccatccagtgagcagttaacatctggaggtgcctcagtcgtgtgcttcttgaacaacttctaccccaaagacatcaatgtcaagtggaagattgatggcagtgaacgacaaaatggcgtcctgaacagttggactgatcaggacagcaaagacagcacctacagcatgagcagcaccctcacgttgaccaaggacgagtatgaacgacataacagctatacctgtgaggccactcacaagacatcaacttcacccattgtcaagagcttcaacaggaatgagtgttagtaactcgaggacggggtgaactacgcctgaggatccgatctttttccctctgccaaaaattatggggacatcatgaagccccttgagcatctgacttctggctaataaaggaaatttattttcattgcaatagtgtgttggaattttttgtgtctctcactcggcctaggtagataagtagcatggcgggttaatcattaactacaaggaacccctagtgatggagttggccactccctctctgcgcgctcgctcgctcactgaggccgggcgaccaaaggtcgcccgacgcccgggctttgcccgggcggcctcagtgagcgagcgagcgcgcag

SEQ ID NO: 2301 - DNA, 2628 bp, Artificial Sequence
  Description of Artificial Sequence: Synthetic polynucleotide
ctgcgcgctcgctcgctcactgaggccgcccgggcaaagcccgggcgtcgggcgacctttggtcgcccggcctcagtgagcgagcgagcgcgcagagagggagtggccaactccatcactaggggttccttgtagttaatgattaacccgccatgctacttatctaccagggtaatggggatcctctagaactatagctagtcgacataacgcgtgatctaacatatcctggtgtggagtagcggacgctgctatgacagaggctcgggggcctgagctggctctgtgagctggggaggaggcagacagccaggccttgtctgcaagcagacctggcagcattgggctggccgccccccagggcctcctcttcatgcccagtgaatgactcaccttggcacagacacaatgttcggggtgggcacagtgcctgcttcccgccgcaccccagcccccctcaaatgccttccgagaagcccattgagcagggggcttgcattgcaccccagcctgacagcctggcatcttgggataaaagcagcacagccccctaggggctgcccttgctgtgtggcgccaccggcggtggagaacaaggctctattcagcctgtgcccaggaaaggggatcaggggatgcccaggcatggacagtgggtggcagggggggagaggagggctgtctgcttcccagaagtccaaggacacaaatgggtgaggggagagctctccccatagctgggctgcggcccaaccccaccccctcaggctatgccagggggtgttgccaggggcacccgggcatcgccagtctagcccactccttcataaagccctcgcatcccaggagcgagcagagccagagcaggttggagaggagacgcatcacctccgctgctcgcggggatcctctagaagcttcgtttagtgaaccgtcagatcgcctggagacgccatccacgctgttttgacctccatagaagacaccgggaccgatccagcctccgcggattcgaatcccggccgggaacggtgcattggaacgcggattccccgtgccaagagtgacgtaagtaccgcctatagagtctataggcccacaaaaaatgctttcttcttttaatatacttttttgtttatcttatttctaatactttccctaatctctttctttcagggcaataatgatacaatgtatcatgcctctttgcaccattctaaagaataacagtgataatttctgggttaaggcaatagcaatatttctgcatataaatatttctgcatataaattgtaactgatgtaagaggtttcatattgctaatagcagctacaatccagctaccattctgcttttattttatggttgggataaggctggattattctgagtccaagctaggcccttttgctaatcatgttcatacctcttatcttcctcccacagctcctgggcaacgtgctggtctgtgtgctggcccatcactttggcaaagaattgggattcgaaccggtgccgccaccatgaagttgcctgttaggctgttggtgctgatgttctggattcctgcttccagcagtgacgtgcagatgatccagagccccagcagcctgagcgcctcgctgggggacatcgtgaccatgacctgccaggcctcccagggcaccagcatcaacctcaactggttccagcagaagcccggcaaggcccccaagctcctcatctacggggccagcaacctggaggacggcgtgccctcccgcttcagcggctcccgctacggcacggacttcacgctgaccatctcctccctggaggacgaggacatggccacctacttctgcctgcagcacacctacctgcccttcaccttcggcagcgggaccaagctggagatcaagggtggtggtggatcccaggtgcagctgcagcagagcgacgccgagctggtgaaacctggggccagcgtcaagatcagctgcaaggcctccggctacaccttcaccgaccgcaccatccactgggtgaagcagcggcccgagcaggggctggagtggatcgggtacatctaccccggggacggctccaccaagtacaacgagaacttcaagggcaaagccaccctgacggccgacaagtccagcagcaccgcctacatgcagctgaacagcctgaccagcgaggacagcgccgtgtacttctgcgcccggcggggggctatggactactggggccagggcacctccgtgaccgtgtcctcctacccatacgatgttccagattacgcttagtaactcgaggacggggtgaactacgcctgaggatccgatctttttccctctgccaaaaattatggggacatcatgaagccccttgagcatctgacttctggctaataaaggaaatttattttcattgcaatagtgtgttggaattttttgtgtctctcactcggcctaggtagataagtagcatggcgggttaatcattaactacaaggaacccctagtgatggagttggccactccctctctgcgcgctcgctcgctcactgaggccgggcgaccaaaggtcgcccgacgcccgggctttgcccgggcggcctcagtgagcgagcgagcgcgcag

SEQ ID NO: 2302 - DNA, 2658 bp, Artificial Sequence
  Description of Artificial Sequence: Synthetic polynucleotide
ctgcgcgctcgctcgctcactgaggccgcccgggcaaagcccgggcgtcgggcgacctttggtcgcccggcctcagtgagcgagcgagcgcgcagagagggagtggccaactccatcactaggggttccttgtagttaatgattaacccgccatgctacttatctaccagggtaatggggatcctctagaactatagctagtcgacataacgcgtgatctaacatatcctggtgtggagtagcggacgctgctatgacagaggctcgggggcctgagctggctctgtgagctggggaggaggcagacagccaggccttgtctgcaagcagacctggcagcattgggctggccgccccccagggcctcctcttcatgcccagtgaatgactcaccttggcacagacacaatgttcggggtgggcacagtgcctgcttcccgccgcaccccagcccccctcaaatgccttccgagaagcccattgagcagggggcttgcattgcaccccagcctgacagcctggcatcttgggataaaagcagcacagccccctaggggctgcccttgctgtgtggcgccaccggcggtggagaacaaggctctattcagcctgtgcccaggaaaggggatcaggggatgcccaggcatggacagtgggtggcagggggggagaggagggctgtctgcttcccagaagtccaaggacacaaatgggtgaggggagagctctccccatagctgggctgcggcccaaccccaccccctcaggctatgccagggggtgttgccaggggcacccgggcatcgccagtctagcccactccttcataaagccctcgcatcccaggagcgagcagagccagagcaggttggagaggagacgcatcacctccgctgctcgcggggatcctctagaagcttcgtttagtgaaccgtcagatcgcctggagacgccatccacgctgttttgacctccatagaagacaccgggaccgatccagcctccgcggattcgaatcccggccgggaacggtgcattggaacgcggattccccgtgccaagagtgacgtaagtaccgcctatagagtctataggcccacaaaaaatgctttcttcttttaatatacttttttgtttatcttatttctaatactttccctaatctctttctttcagggcaataatgatacaatgtatcatgcctctttgcaccattctaaagaataacagtgataatttctgggttaaggcaatagcaatatttctgcatataaatatttctgcatataaattgtaactgatgtaagaggtttcatattgctaatagcagctacaatccagctaccattctgcttttattttatggttgggataaggctggattattctgagtccaagctaggcccttttgctaatcatgttcatacctcttatcttcctcccacagctcctgggcaacgtgctggtctgtgtgctggcccatcactttggcaaagaattgggattcgaaccggtgccgccaccatgaagttgcctgttaggctgttggtgctgatgttctggattcctgcttccagcagtgacgtgcagatgatccagagccccagcagcctgagcgcctcgctgggggacatcgtgaccatgacctgccaggcctcccagggcaccagcatcaacctcaactggttccagcagaagcccggcaaggcccccaagctcctcatctacggggccagcaacctggaggacggcgtgccctcccgcttcagcggctcccgctacggcacggacttcacgctgaccatctcctccctggaggacgaggacatggccacctacttctgcctgcagcacacctacctgcccttcaccttcggcagcgggaccaagctggagatcaagggtggtggtggatccggtggtggtggatccggtggtggtggatcccaggtgcagctgcagcagagcgacgccgagctggtgaaacctggggccagcgtcaagatcagctgcaaggcctccggctacaccttcaccgaccgcaccatccactgggtgaagcagcggcccgagcaggggctggagtggatcgggtacatctaccccggggacggctccaccaagtacaacgagaacttcaagggcaaagccaccctgacggccgacaagtccagcagcaccgcctacatgcagctgaacagcctgaccagcgaggacagcgccgtgtacttctgcgcccggcggggggctatggactactggggccagggcacctccgtgaccgtgtcctcctacccatacgatgttccagattacgcttagtaactcgaggacggggtgaactacgcctgaggatccgatctttttccctctgccaaaaattatggggacatcatgaagccccttgagcatctgacttctggctaataaaggaaatttattttcattgcaatagtgtgttggaattttttgtgtctctcactcggcctaggtagataagtagcatggcgggttaatcattaactacaaggaacccctagtgatggagttggccactccctctctgcgcgctcgctcgctcactgaggccgggcgaccaaaggtcgcccgacgcccgggctttgcccgggcggcctcagtgagcgagcgagcgcgcag

SEQ ID NO: 2303 - DNA, 2688 bp, Artificial Sequence
  Description of Artificial Sequence: Synthetic polynucleotide
ctgcgcgctcgctcgctcactgaggccgcccgggcaaagcccgggcgtcgggcgacctttggtcgcccggcctcagtgagcgagcgagcgcgcagagagggagtggccaactccatcactaggggttccttgtagttaatgattaacccgccatgctacttatctaccagggtaatggggatcctctagaactatagctagtcgacataacgcgtgatctaacatatcctggtgtggagtagcggacgctgctatgacagaggctcgggggcctgagctggctctgtgagctggggaggaggcagacagccaggccttgtctgcaagcagacctggcagcattgggctggccgccccccagggcctcctcttcatgcccagtgaatgactcaccttggcacagacacaatgttcggggtgggcacagtgcctgcttcccgccgcaccccagcccccctcaaatgccttccgagaagcccattgagcagggggcttgcattgcaccccagcctgacagcctggcatcttgggataaaagcagcacagccccctaggggctgcccttgctgtgtggcgccaccggcggtggagaacaaggctctattcagcctgtgcccaggaaaggggatcaggggatgcccaggcatggacagtgggtggcagggggggagaggagggctgtctgcttcccagaagtccaaggacacaaatgggtgaggggagagctctccccatagctgggctgcggcccaaccccaccccctcaggctatgccagggggtgttgccaggggcacccgggcatcgccagtctagcccactccttcataaagccctcgcatcccaggagcgagcagagccagagcaggttggagaggagacgcatcacctccgctgctcgcggggatcctctagaagcttcgtttagtgaaccgtcagatcgcctggagacgccatccacgctgttttgacctccatagaagacaccgggaccgatccagcctccgcggattcgaatcccggccgggaacggtgcattggaacgcggattccccgtgccaagagtgacgtaagtaccgcctatagagtctataggcccacaaaaaatgctttcttcttttaatatacttttttgtttatcttatttctaatactttccctaatctctttctttcagggcaataatgatacaatgtatcatgcctctttgcaccattctaaagaataacagtgataatttctgggttaaggcaatagcaatatttctgcatataaatatttctgcatataaattgtaactgatgtaagaggtttcatattgctaatagcagctacaatccagctaccattctgcttttattttatggttgggataaggctggattattctgagtccaagctaggcccttttgctaatcatgttcatacctcttatcttcctcccacagctcctgggcaacgtgctggtctgtgtgctggcccatcactttggcaaagaattgggattcgaaccggtgccgccaccatgaagttgcctgttaggctgttggtgctgatgttctggattcctgcttccagcagtgacgtgcagatgatccagagccccagcagcctgagcgcctcgctgggggacatcgtgaccatgacctgccaggcctcccagggcaccagcatcaacctcaactggttccagcagaagcccggcaaggcccccaagctcctcatctacggggccagcaacctggaggacggcgtgccctcccgcttcagcggctcccgctacggcacggacttcacgctgaccatctcctccctggaggacgaggacatggccacctacttctgcctgcagcacacctacctgcccttcaccttcggcagcgggaccaagctggagatcaagggtggtggtggatccggtggtggtggatccggtggtggtggatccggtggtggtggatccggtggtggtggatcccaggtgcagctgcagcagagcgacgccgagctggtgaaacctggggccagcgtcaagatcagctgcaaggcctccggctacaccttcaccgaccgcaccatccactgggtgaagcagcggcccgagcaggggctggagtggatcgggtacatctaccccggggacggctccaccaagtacaacgagaacttcaagggcaaagccaccctgacggccgacaagtccagcagcaccgcctacatgcagctgaacagcctgaccagcgaggacagcgccgtgtacttctgcgcccggcggggggctatggactactggggccagggcacctccgtgaccgtgtcctcctacccatacgatgttccagattacgcttagtaactcgaggacggggtgaactacgcctgaggatccgatctttttccctctgccaaaaattatggggacatcatgaagccccttgagcatctgacttctggctaataaaggaaatttattttcattgcaatagtgtgttggaattttttgtgtctctcactcggcctaggtagataagtagcatggcgggttaatcattaactacaaggaacccctagtgatggagttggccactccctctctgcgcgctcgctcgctcactgaggccgggcgaccaaaggtcgcccgacgcccgggctttgcccgggcggcctcagtgagcgagcgagcgcgcag

SEQ ID NO: 2304 - DNA, 2733 bp, Artificial Sequence
  Description of Artificial Sequence: Synthetic polynucleotide
ctgcgcgctcgctcgctcactgaggccgcccgggcaaagcccgggcgtcgggcgacctttggtcgcccggcctcagtgagcgagcgagcgcgcagagagggagtggccaactccatcactaggggttccttgtagttaatgattaacccgccatgctacttatctaccagggtaatggggatcctctagaactatagctagtcgacataacgcgtgatctaacatatcctggtgtggagtagcggacgctgctatgacagaggctcgggggcctgagctggctctgtgagctggggaggaggcagacagccaggccttgtctgcaagcagacctggcagcattgggctggccgccccccagggcctcctcttcatgcccagtgaatgactcaccttggcacagacacaatgttcggggtgggcacagtgcctgcttcccgccgcaccccagcccccctcaaatgccttccgagaagcccattgagcagggggcttgcattgcaccccagcctgacagcctggcatcttgggataaaagcagcacagccccctaggggctgcccttgctgtgtggcgccaccggcggtggagaacaaggctctattcagcctgtgcccaggaaaggggatcaggggatgcccaggcatggacagtgggtggcagggggggagaggagggctgtctgcttcccagaagtccaaggacacaaatgggtgaggggagagctctccccatagctgggctgcggcccaaccccaccccctcaggctatgccagggggtgttgccaggggcacccgggcatcgccagtctagcccactccttcataaagccctcgcatcccaggagcgagcagagccagagcaggttggagaggagacgcatcacctccgctgctcgcggggatcctctagaagcttcgtttagtgaaccgtcagatcgcctggagacgccatccacgctgttttgacctccatagaagacaccgggaccgatccagcctccgcggattcgaatcccggccgggaacggtgcattggaacgcggattccccgtgccaagagtgacgtaagtaccgcctatagagtctataggcccacaaaaaatgctttcttcttttaatatacttttttgtttatcttatttctaatactttccctaatctctttctttcagggcaataatgatacaatgtatcatgcctctttgcaccattctaaagaataacagtgataatttctgggttaaggcaatagcaatatttctgcatataaatatttctgcatataaattgtaactgatgtaagaggtttcatattgctaatagcagctacaatccagctaccattctgcttttattttatggttgggataaggctggattattctgagtccaagctaggcccttttgctaatcatgttcatacctcttatcttcctcccacagctcctgggcaacgtgctggtctgtgtgctggcccatcactttggcaaagaattgggattcgaaccggtgccgccaccatgaagttgcctgttaggctgttggtgctgatgttctggattcctgcttccagcagtgacgtgcagatgatccagagccccagcagcctgagcgcctcgctgggggacatcgtgaccatgacctgccaggcctcccagggcaccagcatcaacctcaactggttccagcagaagcccggcaaggcccccaagctcctcatctacggggccagcaacctggaggacggcgtgccctcccgcttcagcggctcccgctacggcacggacttcacgctgaccatctcctccctggaggacgaggacatggccacctacttctgcctgcagcacacctacctgcccttcaccttcggcagcgggaccaagctggagatcaagggtggtggtggatccggtggtggtggatccggtggtggtggatccggtggtggtggatccggtggtggtggatccggtggtggtggatccggtggtggtggatccggtggtggtggatcccaggtgcagctgcagcagagcgacgccgagctggtgaaacctggggccagcgtcaagatcagctgcaaggcctccggctacaccttcaccgaccgcaccatccactgggtgaagcagcggcccgagcaggggctggagtggatcgggtacatctaccccggggacggctccaccaagtacaacgagaacttcaagggcaaagccaccctgacggccgacaagtccagcagcaccgcctacatgcagctgaacagcctgaccagcgaggacagcgccgtgtacttctgcgcccggcggggggctatggactactggggccagggcacctccgtgaccgtgtcctcctacccatacgatgttccagattacgcttagtaactcgaggacggggtgaactacgcctgaggatccgatctttttccctctgccaaaaattatggggacatcatgaagccccttgagcatctgacttctggctaataaaggaaatttattttcattgcaatagtgtgttggaattttttgtgtctctcactcggcctaggtagataagtagcatggcgggttaatcattaactacaaggaacccctagtgatggagttggccactccctctctgcgcgctcgctcgctcactgaggccgggcgaccaaaggtcgcccgacgcccgggctttgcccgggcggcctcagtgagcgagcgagcgcgcag

SEQ ID NO: 2305 - DNA, 3395 bp, Artificial Sequence
  Description of Artificial Sequence: Synthetic polynucleotide
ctgcgcgctcgctcgctcactgaggccgcccgggcaaagcccgggcgtcgggcgacctttggtcgcccggcctcagtgagcgagcgagcgcgcagagagggagtggccaactccatcactaggggttccttgtagttaatgattaacccgccatgctacttatctaccagggtaatggggatcctctagaactatagctagtcgacataacgcgttagtatctgcagagggccctgcgtatgagtgcaagtgggttttaggaccaggatgaggcggggtgggggtgcctacctgacgaccgaccccgacccactggacaagcacccaacccccattccccaaattgcgcatcccctatcagagagggggaggggaaacaggatgcggcgaggcgcgtgcgcactgccagcttcagcaccgcggacagtgccttcgcccccgcctggcggcgcgcgccaccgccgcctcagcactgaaggcgcgctgacgtcactcgccggtcccccgcaaactccccttcccggccaccttggtcgcgtccgcgccgccgccggcccagccggaccgcaccacgcgaggcgcgagataggggggcacgggcgcgaccatctgcgctgcggcgccggcgactcagcgctgcctcagtctgcggtgggcagcggaggagtcgtgtcgtgcctgagagcgcagctgtgctcctgggcaccgcgcagtccgcccccgcggctcctggccagaccacccctaggaccccctgccccaagtcgcagccaagcttcgtttagtgaaccgtcagatcgcctggagacgccatccacgctgttttgacctccatagaagacaccgggaccgatccagcctccgcggattcgaatcccggccgggaacggtgcattggaacgcggattccccgtgccaagagtgacgtaagtaccgcctatagagtctataggcccacaaaaaatgctttcttcttttaatatacttttttgtttatcttatttctaatactttccctaatctctttctttcagggcaataatgatacaatgtatcatgcctctttgcaccattctaaagaataacagtgataatttctgggttaaggcaatagcaatatttctgcatataaatatttctgcatataaattgtaactgatgtaagaggtttcatattgctaatagcagctacaatccagctaccattctgcttttattttatggttgggataaggctggattattctgagtccaagctaggcccttttgctaatcatgttcatacctcttatcttcctcccacagctcctgggcaacgtgctggtctgtgtgctggcccatcactttggcaaagaattgggattcgaaccggtgccgccaccatgaacttcgggctcagcttgattttccttgtccttgttttaaaaggtgtccagtgtcaggtgcagctgcagcagagcgacgccgagctggtgaaacctggggccagcgtcaagatcagctgcaaggcctccggctacaccttcaccgaccgcaccatccactgggtgaagcagcggcccgagcaggggctggagtggatcgggtacatctaccccggggacggctccaccaagtacaacgagaacttcaagggcaaagccaccctgacggccgacaagtccagcagcaccgcctacatgcagctgaacagcctgaccagcgaggacagcgccgtgtacttctgcgcccggcggggggctatggactactggggccagggcacctccgtgaccgtgtcctccgccaaaacgacacccccatctgtctatccactggcccctggatctgctgcccaaactaactccatggtgaccctgggatgcctggtcaagggctatttccctgagccagtgacagtgacctggaactctggatccctgtccagcggtgtgcacaccttcccagctgtcctgcagtctgacctctacactctgagcagctcagtgactgtcccctccagcacctggcccagcgagaccgtcacctgcaacgttgcccacccggccagcagcaccaaggtggacaagaaaattgtgcccagggattgtggtgagctcaaaaccccacttggtgacacaactcacacatgcccacggtgcccagagcccaaatcttgtgacacacctcccccgtgcccacggtgcccagagcccaaatcttgtgacacaactcacacatgcccacggtgcccagagcccaaatcttgtgacacacctcccccgtgcccaaggtgcccagcacctgaactcagaaagaggcgagagggcagaggaagtcttctaacatgcggtgacgtggaggagaatcccggccctatgaagttgcctgttaggctgttggtgctgatgttctggattcctgcttccagcagtgacgtgcagatgatccagagccccagcagcctgagcgcctcgctgggggacatcgtgaccatgacctgccaggcctcccagggcaccagcatcaacctcaactggttccagcagaagcccggcaaggcccccaagctcctcatctacggggccagcaacctggaggacggcgtgccctcccgcttcagcggctcccgctacggcacggacttcacgctgaccatctcctccctggaggacgaggacatggccacctacttctgcctgcagcacacctacctgcccttcaccttcggcagcgggaccaagctggagatcaagcgggctgatgctgcaccaactgtatccatcttcccaccatccagtgagcagttaacatctggaggtgcctcagtcgtgtgcttcttgaacaacttctaccccaaagacatcaatgtcaagtggaagattgatggcagtgaacgacaaaatggcgtcctgaacagttggactgatcaggacagcaaagacagcacctacagcatgagcagcaccctcacgttgaccaaggacgagtatgaacgacataacagctatacctgtgaggccactcacaagacatcaacttcacccattgtcaagagcttcaacaggaatgagtgttagtaactcgaggacggggtgaactacgcctgaggatccgatctttttccctctgccaaaaattatggggacatcatgaagccccttgagcatctgacttctggctaataaaggaaatttattttcattgcaatagtgtgttggaattttttgtgtctctcactcggcctaggtagataagtagcatggcgggttaatcattaactacaaggaacccctagtgatggagttggccactccctctctgcgcgctcgctcgctcactgaggccgggcgaccaaaggtcgcccgacgcccgggctttgcccgggcggcctcagtgagcgagcgagcgcgcag

SEQ ID NO: 2306 - DNA, 3197 bp, Artificial Sequence
  Description of Artificial Sequence: Synthetic polynucleotide
ctgcgcgctcgctcgctcactgaggccgcccgggcaaagcccgggcgtcgggcgacctttggtcgcccggcctcagtgagcgagcgagcgcgcagagagggagtggccaactccatcactaggggttccttgtagttaatgattaacccgccatgctacttatctaccagggtaatggggatcctctagaactatagctagtcgacataacgcgttagtatctgcagagggccctgcgtatgagtgcaagtgggttttaggaccaggatgaggcggggtgggggtgcctacctgacgaccgaccccgacccactggacaagcacccaacccccattccccaaattgcgcatcccctatcagagagggggaggggaaacaggatgcggcgaggcgcgtgcgcactgccagcttcagcaccgcggacagtgccttcgcccccgcctggcggcgcgcgccaccgccgcctcagcactgaaggcgcgctgacgtcactcgccggtcccccgcaaactccccttcccggccaccttggtcgcgtccgcgccgccgccggcccagccggaccgcaccacgcgaggcgcgagataggggggcacgggcgcgaccatctgcgctgcggcgccggcgactcagcgctgcctcagtctgcggtgggcagcggaggagtcgtgtcgtgcctgagagcgcagctgtgctcctgggcaccgcgcagtccgcccccgcggctcctggccagaccacccctaggaccccctgccccaagtcgcagccaagcttcgtttagtgaaccgtcagatcgcctggagacgccatccacgctgttttgacctccatagaagacaccgggaccgatccagcctccgcggattcgaatcccggccgggaacggtgcattggaacgcggattccccgtgccaagagtgacgtaagtaccgcctatagagtctataggcccacaaaaaatgctttcttcttttaatatacttttttgtttatcttatttctaatactttccctaatctctttctttcagggcaataatgatacaatgtatcatgcctctttgcaccattctaaagaataacagtgataatttctgggttaaggcaatagcaatatttctgcatataaatatttctgcatataaattgtaactgatgtaagaggtttcatattgctaatagcagctacaatccagctaccattctgcttttattttatggttgggataaggctggattattctgagtccaagctaggcccttttgctaatcatgttcatacctcttatcttcctcccacagctcctgggcaacgtgctggtctgtgtgctggcccatcactttggcaaagaattgggattcgaaccggtgccgccaccatgaacttcgggctcagcttgattttccttgtccttgttttaaaaggtgtccagtgtcaggtgcagctgcagcagagcgacgccgagctggtgaaacctggggccagcgtcaagatcagctgcaaggcctccggctacaccttcaccgaccgcaccatccactgggtgaagcagcggcccgagcaggggctggagtggatcgggtacatctaccccggggacggctccaccaagtacaacgagaacttcaagggcaaagccaccctgacggccgacaagtccagcagcaccgcctacatgcagctgaacagcctgaccagcgaggacagcgccgtgtacttctgcgcccggcggggggctatggactactggggccagggcacctccgtgaccgtgtcctccgccaaaacgacacccccatctgtctatccactggcccctggatctgctgcccaaactaactccatggtgaccctgggatgcctggtcaagggctatttccctgagccagtgacagtgacctggaactctggatccctgtccagcggtgtgcacaccttcccagctgtcctgcagtctgacctctacactctgagcagctcagtgactgtcccctccagcacctggcccagcgagaccgtcacctgcaacgttgcccacccggccagcagcaccaaggtggacaagaaaattgtgcccagggattgtggtagaaagaggcgagagggcagaggaagtcttctaacatgcggtgacgtggaggagaatcccggccctatgaagttgcctgttaggctgttggtgctgatgttctggattcctgcttccagcagtgacgtgcagatgatccagagccccagcagcctgagcgcctcgctgggggacatcgtgaccatgacctgccaggcctcccagggcaccagcatcaacctcaactggttccagcagaagcccggcaaggcccccaagctcctcatctacggggccagcaacctggaggacggcgtgccctcccgcttcagcggctcccgctacggcacggacttcacgctgaccatctcctccctggaggacgaggacatggccacctacttctgcctgcagcacacctacctgcccttcaccttcggcagcgggaccaagctggagatcaagcgggctgatgctgcaccaactgtatccatcttcccaccatccagtgagcagttaacatctggaggtgcctcagtcgtgtgcttcttgaacaacttctaccccaaagacatcaatgtcaagtggaagattgatggcagtgaacgacaaaatggcgtcctgaacagttggactgatcaggacagcaaagacagcacctacagcatgagcagcaccctcacgttgaccaaggacgagtatgaacgacataacagctatacctgtgaggccactcacaagacatcaacttcacccattgtcaagagcttcaacaggaatgagtgttagtaactcgaggacggggtgaactacgcctgaggatccgatctttttccctctgccaaaaattatggggacatcatgaagccccttgagcatctgacttctggctaataaaggaaatttattttcattgcaatagtgtgttggaattttttgtgtctctcactcggcctaggtagataagtagcatggcgggttaatcattaactacaaggaacccctagtgatggagttggccactccctctctgcgcgctcgctcgctcactgaggccgggcgaccaaaggtcgcccgacgcccgggctttgcccgggcggcctcagtgagcgagcgagcgcgcag

SEQ ID NO: 2307 - DNA, 3220 bp, Artificial Sequence
  Description of Artificial Sequence: Synthetic polynucleotide
ctgcgcgctcgctcgctcactgaggccgcccgggcaaagcccgggcgtcgggcgacctttggtcgcccggcctcagtgagcgagcgagcgcgcagagagggagtggccaactccatcactaggggttccttgtagttaatgattaacccgccatgctacttatctaccagggtaatggggatcctctagaactatagctagtcgacataacgcgttagtatctgcagagggccctgcgtatgagtgcaagtgggttttaggaccaggatgaggcggggtgggggtgcctacctgacgaccgaccccgacccactggacaagcacccaacccccattccccaaattgcgcatcccctatcagagagggggaggggaaacaggatgcggcgaggcgcgtgcgcactgccagcttcagcaccgcggacagtgccttcgcccccgcctggcggcgcgcgccaccgccgcctcagcactgaaggcgcgctgacgtcactcgccggtcccccgcaaactccccttcccggccaccttggtcgcgtccgcgccgccgccggcccagccggaccgcaccacgcgaggcgcgagataggggggcacgggcgcgaccatctgcgctgcggcgccggcgactcagcgctgcctcagtctgcggtgggcagcggaggagtcgtgtcgtgcctgagagcgcagctgtgctcctgggcaccgcgcagtccgcccccgcggctcctggccagaccacccctaggaccccctgccccaagtcgcagccaagcttcgtttagtgaaccgtcagatcgcctggagacgccatccacgctgttttgacctccatagaagacaccgggaccgatccagcctccgcggattcgaatcccggccgggaacggtgcattggaacgcggattccccgtgccaagagtgacgtaagtaccgcctatagagtctataggcccacaaaaaatgctttcttcttttaatatacttttttgtttatcttatttctaatactttccctaatctctttctttcagggcaataatgatacaatgtatcatgcctctttgcaccattctaaagaataacagtgataatttctgggttaaggcaatagcaatatttctgcatataaatatttctgcatataaattgtaactgatgtaagaggtttcatattgctaatagcagctacaatccagctaccattctgcttttattttatggttgggataaggctggattattctgagtccaagctaggcccttttgctaatcatgttcatacctcttatcttcctcccacagctcctgggcaacgtgctggtctgtgtgctggcccatcactttggcaaagaattgggattcgaaccggtgccgccaccatgaagttgcctgttaggctgttggtgctgatgttctggattcctgcttccagcagtgacgtgcagatgatccagagccccagcagcctgagcgcctcgctgggggacatcgtgaccatgacctgccaggcctcccagggcaccagcatcaacctcaactggttccagcagaagcccggcaaggcccccaagctcctcatctacggggccagcaacctggaggacggcgtgccctcccgcttcagcggctcccgctacggcacggacttcacgctgaccatctcctccctggaggacgaggacatggccacctacttctgcctgcagcacacctacctgcccttcaccttcggcagcgggaccaagctggagatcaagcgggctgatgctgcaccaactgtatccatcttcccaccatccagtgagcagttaacatctggaggtgcctcagtcgtgtgcttcttgaacaacttctaccccaaagacatcaatgtcaagtggaagattgatggcagtgaacgacaaaatggcgtcctgaacagttggactgatcaggacagcaaagacagcacctacagcatgagcagcaccctcacgttgaccaaggacgagtatgaacgacataacagctatacctgtgaggccactcacaagacatcaacttcacccattgtcaagagcttcaacaggaatgagtgtgagggcagaggaagtcttctaacatgcggtgacgtggaggagaatcccggccctatgaacttcgggctcagcttgattttccttgtccttgttttaaaaggtgtccagtgtcaggtgcagctgcagcagagcgacgccgagctggtgaaacctggggccagcgtcaagatcagctgcaaggcctccggctacaccttcaccgaccgcaccatccactgggtgaagcagcggcccgagcaggggctggagtggatcgggtacatctaccccggggacggctccaccaagtacaacgagaacttcaagggcaaagccaccctgacggccgacaagtccagcagcaccgcctacatgcagctgaacagcctgaccagcgaggacagcgccgtgtacttctgcgcccggcggggggctatggactactggggccagggcacctccgtgaccgtgtcctccgccaaaacgacacccccatctgtctatccactggcccctggatctgctgcccaaactaactccatggtgaccctgggatgcctggtcaagggctatttccctgagccagtgacagtgacctggaactctggatccctgtccagcggtgtgcacaccttcccagctgtcctgcagtctgacctctacactctgagcagctcagtgactgtcccctccagcacctggcccagcgagaccgtcacctgcaacgttgcccacccggccagcagcaccaaggtggacaagaaaattgtgcccagggattgtggttaggcaattgaaggcgaattgttaattaagaattcactcctctcgaggacggggtgaactacgcctgaggatccgatctttttccctctgccaaaaattatggggacatcatgaagccccttgagcatctgacttctggctaataaaggaaatttattttcattgcaatagtgtgttggaattttttgtgtctctcactcggcctaggtagataagtagcatggcgggttaatcattaactacaaggaacccctagtgatggagttggccactccctctctgcgcgctcgctcgctcactgaggccgggcgaccaaaggtcgcccgacgcccgggctttgcccgggcggcctcagtgagcgagcgagcgcgcag

SEQ ID NO: 2308 - DNA, 3179 bp, Artificial Sequence
  Description of Artificial Sequence: Synthetic polynucleotide
ctgcgcgctcgctcgctcactgaggccgcccgggcaaagcccgggcgtcgggcgacctttggtcgcccggcctcagtgagcgagcgagcgcgcagagagggagtggccaactccatcactaggggttccttgtagttaatgattaacccgccatgctacttatctaccagggtaatggggatcctctagaactatagctagtcgacataacgcgttagtatctgcagagggccctgcgtatgagtgcaagtgggttttaggaccaggatgaggcggggtgggggtgcctacctgacgaccgaccccgacccactggacaagcacccaacccccattccccaaattgcgcatcccctatcagagagggggaggggaaacaggatgcggcgaggcgcgtgcgcactgccagcttcagcaccgcggacagtgccttcgcccccgcctggcggcgcgcgccaccgccgcctcagcactgaaggcgcgctgacgtcactcgccggtcccccgcaaactccccttcccggccaccttggtcgcgtccgcgccgccgccggcccagccggaccgcaccacgcgaggcgcgagataggggggcacgggcgcgaccatctgcgctgcggcgccggcgactcagcgctgcctcagtctgcggtgggcagcggaggagtcgtgtcgtgcctgagagcgcagctgtgctcctgggcaccgcgcagtccgcccccgcggctcctggccagaccacccctaggaccccctgccccaagtcgcagccaagcttcgtttagtgaaccgtcagatcgcctggagacgccatccacgctgttttgacctccatagaagacaccgggaccgatccagcctccgcggattcgaatcccggccgggaacggtgcattggaacgcggattccccgtgccaagagtgacgtaagtaccgcctatagagtctataggcccacaaaaaatgctttcttcttttaatatacttttttgtttatcttatttctaatactttccctaatctctttctttcagggcaataatgatacaatgtatcatgcctctttgcaccattctaaagaataacagtgataatttctgggttaaggcaatagcaatatttctgcatataaatatttctgcatataaattgtaactgatgtaagaggtttcatattgctaatagcagctacaatccagctaccattctgcttttattttatggttgggataaggctggattattctgagtccaagctaggcccttttgctaatcatgttcatacctcttatcttcctcccacagctcctgggcaacgtgctggtctgtgtgctggcccatcactttggcaaagaattgggattcgaaccggtgccgccaccatgaacttcgggctcagcttgattttccttgtccttgttttaaaaggtgtccagtgtcaggtgcagctgcagcagagcgacgccgagctggtgaaacctggggccagcgtcaagatcagctgcaaggcctccggctacaccttcaccgaccgcaccatccactgggtgaagcagcggcccgagcaggggctggagtggatcgggtacatctaccccggggacggctccaccaagtacaacgagaacttcaagggcaaagccaccctgacggccgacaagtccagcagcaccgcctacatgcagctgaacagcctgaccagcgaggacagcgccgtgtacttctgcgcccggcggggggctatggactactggggccagggcacctccgtgaccgtgtcctccgccaaaacgacacccccatctgtctatccactggcccctggatctgctgcccaaactaactccatggtgaccctgggatgcctggtcaagggctatttccctgagccagtgacagtgacctggaactctggatccctgtccagcggtgtgcacaccttcccagctgtcctgcagtctgacctctacactctgagcagctcagtgactgtcccctccagcacctggcccagcgagaccgtcacctgcaacgttgcccacccggccagcagcaccaaggtggacaagaaaattagaaagaggcgagagggcagaggaagtcttctaacatgcggtgacgtggaggagaatcccggccctatgaagttgcctgttaggctgttggtgctgatgttctggattcctgcttccagcagtgacgtgcagatgatccagagccccagcagcctgagcgcctcgctgggggacatcgtgaccatgacctgccaggcctcccagggcaccagcatcaacctcaactggttccagcagaagcccggcaaggcccccaagctcctcatctacggggccagcaacctggaggacggcgtgccctcccgcttcagcggctcccgctacggcacggacttcacgctgaccatctcctccctggaggacgaggacatggccacctacttctgcctgcagcacacctacctgcccttcaccttcggcagcgggaccaagctggagatcaagcgggctgatgctgcaccaactgtatccatcttcccaccatccagtgagcagttaacatctggaggtgcctcagtcgtgtgcttcttgaacaacttctaccccaaagacatcaatgtcaagtggaagattgatggcagtgaacgacaaaatggcgtcctgaacagttggactgatcaggacagcaaagacagcacctacagcatgagcagcaccctcacgttgaccaaggacgagtatgaacgacataacagctatacctgtgaggccactcacaagacatcaacttcacccattgtcaagagcttcaacaggaatgagtgttagtaactcgaggacggggtgaactacgcctgaggatccgatctttttccctctgccaaaaattatggggacatcatgaagccccttgagcatctgacttctggctaataaaggaaatttattttcattgcaatagtgtgttggaattttttgtgtctctcactcggcctaggtagataagtagcatggcgggttaatcattaactacaaggaacccctagtgatggagttggccactccctctctgcgcgctcgctcgctcactgaggccgggcgaccaaaggtcgcccgacgcccgggctttgcccgggcggcctcagtgagcgagcgagcgcgcag

SEQ ID NO: 2309 - DNA, 2486 bp, Artificial Sequence
  Description of Artificial Sequence: Synthetic polynucleotide
ctgcgcgctcgctcgctcactgaggccgcccgggcaaagcccgggcgtcgggcgacctttggtcgcccggcctcagtgagcgagcgagcgcgcagagagggagtggccaactccatcactaggggttccttgtagttaatgattaacccgccatgctacttatctaccagggtaatggggatcctctagaactatagctagtcgacataacgcgttagtatctgcagagggccctgcgtatgagtgcaagtgggttttaggaccaggatgaggcggggtgggggtgcctacctgacgaccgaccccgacccactggacaagcacccaacccccattccccaaattgcgcatcccctatcagagagggggaggggaaacaggatgcggcgaggcgcgtgcgcactgccagcttcagcaccgcggacagtgccttcgcccccgcctggcggcgcgcgccaccgccgcctcagcactgaaggcgcgctgacgtcactcgccggtcccccgcaaactccccttcccggccaccttggtcgcgtccgcgccgccgccggcccagccggaccgcaccacgcgaggcgcgagataggggggcacgggcgcgaccatctgcgctgcggcgccggcgactcagcgctgcctcagtctgcggtgggcagcggaggagtcgtgtcgtgcctgagagcgcagctgtgctcctgggcaccgcgcagtccgcccccgcggctcctggccagaccacccctaggaccccctgccccaagtcgcagccaagcttcgtttagtgaaccgtcagatcgcctggagacgccatccacgctgttttgacctccatagaagacaccgggaccgatccagcctccgcggattcgaatcccggccgggaacggtgcattggaacgcggattccccgtgccaagagtgacgtaagtaccgcctatagagtctataggcccacaaaaaatgctttcttcttttaatatacttttttgtttatcttatttctaatactttccctaatctctttctttcagggcaataatgatacaatgtatcatgcctctttgcaccattctaaagaataacagtgataatttctgggttaaggcaatagcaatatttctgcatataaatatttctgcatataaattgtaactgatgtaagaggtttcatattgctaatagcagctacaatccagctaccattctgcttttattttatggttgggataaggctggattattctgagtccaagctaggcccttttgctaatcatgttcatacctcttatcttcctcccacagctcctgggcaacgtgctggtctgtgtgctggcccatcactttggcaaagaattgggattcgaaccggtgccgccaccatgaagttgcctgttaggctgttggtgctgatgttctggattcctgcttccagcagtgacgtgcagatgatccagagccccagcagcctgagcgcctcgctgggggacatcgtgaccatgacctgccaggcctcccagggcaccagcatcaacctcaactggttccagcagaagcccggcaaggcccccaagctcctcatctacggggccagcaacctggaggacggcgtgccctcccgcttcagcggctcccgctacggcacggacttcacgctgaccatctcctccctggaggacgaggacatggccacctacttctgcctgcagcacacctacctgcccttcaccttcggcagcgggaccaagctggagatcaagggtggtggtggatcccaggtgcagctgcagcagagcgacgccgagctggtgaaacctggggccagcgtcaagatcagctgcaaggcctccggctacaccttcaccgaccgcaccatccactgggtgaagcagcggcccgagcaggggctggagtggatcgggtacatctaccccggggacggctccaccaagtacaacgagaacttcaagggcaaagccaccctgacggccgacaagtccagcagcaccgcctacatgcagctgaacagcctgaccagcgaggacagcgccgtgtacttctgcgcccggcggggggctatggactactggggccagggcacctccgtgaccgtgtcctcctacccatacgatgttccagattacgcttagtaactcgaggacggggtgaactacgcctgaggatccgatctttttccctctgccaaaaattatggggacatcatgaagccccttgagcatctgacttctggctaataaaggaaatttattttcattgcaatagtgtgttggaattttttgtgtctctcactcggcctaggtagataagtagcatggcgggttaatcattaactacaaggaacccctagtgatggagttggccactccctctctgcgcgctcgctcgctcactgaggccgggcgaccaaaggtcgcccgacgcccgggctttgcccgggcggcctcagtgagcgagcgagcgcgcag

SEQ ID NO: 2310 - DNA, 2516 bp, Artificial Sequence
  Description of Artificial Sequence: Synthetic polynucleotide
ctgcgcgctcgctcgctcactgaggccgcccgggcaaagcccgggcgtcgggcgacctttggtcgcccggcctcagtgagcgagcgagcgcgcagagagggagtggccaactccatcactaggggttccttgtagttaatgattaacccgccatgctacttatctaccagggtaatggggatcctctagaactatagctagtcgacataacgcgttagtatctgcagagggccctgcgtatgagtgcaagtgggttttaggaccaggatgaggcggggtgggggtgcctacctgacgaccgaccccgacccactggacaagcacccaacccccattccccaaattgcgcatcccctatcagagagggggaggggaaacaggatgcggcgaggcgcgtgcgcactgccagcttcagcaccgcggacagtgccttcgcccccgcctggcggcgcgcgccaccgccgcctcagcactgaaggcgcgctgacgtcactcgccggtcccccgcaaactccccttcccggccaccttggtcgcgtccgcgccgccgccggcccagccggaccgcaccacgcgaggcgcgagataggggggcacgggcgcgaccatctgcgctgcggcgccggcgactcagcgctgcctcagtctgcggtgggcagcggaggagtcgtgtcgtgcctgagagcgcagctgtgctcctgggcaccgcgcagtccgcccccgcggctcctggccagaccacccctaggaccccctgccccaagtcgcagccaagcttcgtttagtgaaccgtcagatcgcctggagacgccatccacgctgttttgacctccatagaagacaccgggaccgatccagcctccgcggattcgaatcccggccgggaacggtgcattggaacgcggattccccgtgccaagagtgacgtaagtaccgcctatagagtctataggcccacaaaaaatgctttcttcttttaatatacttttttgtttatcttatttctaatactttccctaatctctttctttcagggcaataatgatacaatgtatcatgcctctttgcaccattctaaagaataacagtgataatttctgggttaaggcaatagcaatatttctgcatataaatatttctgcatataaattgtaactgatgtaagaggtttcatattgctaatagcagctacaatccagctaccattctgcttttattttatggttgggataaggctggattattctgagtccaagctaggcccttttgctaatcatgttcatacctcttatcttcctcccacagctcctgggcaacgtgctggtctgtgtgctggcccatcactttggcaaagaattgggattcgaaccggtgccgccaccatgaagttgcctgttaggctgttggtgctgatgttctggattcctgcttccagcagtgacgtgcagatgatccagagccccagcagcctgagcgcctcgctgggggacatcgtgaccatgacctgccaggcctcccagggcaccagcatcaacctcaactggttccagcagaagcccggcaaggcccccaagctcctcatctacggggccagcaacctggaggacggcgtgccctcccgcttcagcggctcccgctacggcacggacttcacgctgaccatctcctccctggaggacgaggacatggccacctacttctgcctgcagcacacctacctgcccttcaccttcggcagcgggaccaagctggagatcaagggtggtggtggatccggtggtggtggatccggtggtggtggatcccaggtgcagctgcagcagagcgacgccgagctggtgaaacctggggccagcgtcaagatcagctgcaaggcctccggctacaccttcaccgaccgcaccatccactgggtgaagcagcggcccgagcaggggctggagtggatcgggtacatctaccccggggacggctccaccaagtacaacgagaacttcaagggcaaagccaccctgacggccgacaagtccagcagcaccgcctacatgcagctgaacagcctgaccagcgaggacagcgccgtgtacttctgcgcccggcggggggctatggactactggggccagggcacctccgtgaccgtgtcctcctacccatacgatgttccagattacgcttagtaactcgaggacggggtgaactacgcctgaggatccgatctttttccctctgccaaaaattatggggacatcatgaagccccttgagcatctgacttctggctaataaaggaaatttattttcattgcaatagtgtgttggaattttttgtgtctctcactcggcctaggtagataagtagcatggcgggttaatcattaactacaaggaacccctagtgatggagttggccactccctctctgcgcgctcgctcgctcactgaggccgggcgaccaaaggtcgcccgacgcccgggctttgcccgggcggcctcagtgagcgagcgagcgcgcag

SEQ ID NO: 2311 - DNA, 2546 bp, Artificial Sequence
  Description of Artificial Sequence: Synthetic polynucleotide
ctgcgcgctcgctcgctcactgaggccgcccgggcaaagcccgggcgtcgggcgacctttggtcgcccggcctcagtgagcgagcgagcgcgcagagagggagtggccaactccatcactaggggttccttgtagttaatgattaacccgccatgctacttatctaccagggtaatggggatcctctagaactatagctagtcgacataacgcgttagtatctgcagagggccctgcgtatgagtgcaagtgggttttaggaccaggatgaggcggggtgggggtgcctacctgacgaccgaccccgacccactggacaagcacccaacccccattccccaaattgcgcatcccctatcagagagggggaggggaaacaggatgcggcgaggcgcgtgcgcactgccagcttcagcaccgcggacagtgccttcgcccccgcctggcggcgcgcgccaccgccgcctcagcactgaaggcgcgctgacgtcactcgccggtcccccgcaaactccccttcccggccaccttggtcgcgtccgcgccgccgccggcccagccggaccgcaccacgcgaggcgcgagataggggggcacgggcgcgaccatctgcgctgcggcgccggcgactcagcgctgcctcagtctgcggtgggcagcggaggagtcgtgtcgtgcctgagagcgcagctgtgctcctgggcaccgcgcagtccgcccccgcggctcctggccagaccacccctaggaccccctgccccaagtcgcagccaagcttcgtttagtgaaccgtcagatcgcctggagacgccatccacgctgttttgacctccatagaagacaccgggaccgatccagcctccgcggattcgaatcccggccgggaacggtgcattggaacgcggattccccgtgccaagagtgacgtaagtaccgcctatagagtctataggcccacaaaaaatgctttcttcttttaatatacttttttgtttatcttatttctaatactttccctaatctctttctttcagggcaataatgatacaatgtatcatgcctctttgcaccattctaaagaataacagtgataatttctgggttaaggcaatagcaatatttctgcatataaatatttctgcatataaattgtaactgatgtaagaggtttcatattgctaatagcagctacaatccagctaccattctgcttttattttatggttgggataaggctggattattctgagtccaagctaggcccttttgctaatcatgttcatacctcttatcttcctcccacagctcctgggcaacgtgctggtctgtgtgctggcccatcactttggcaaagaattgggattcgaaccggtgccgccaccatgaagttgcctgttaggctgttggtgctgatgttctggattcctgcttccagcagtgacgtgcagatgatccagagccccagcagcctgagcgcctcgctgggggacatcgtgaccatgacctgccaggcctcccagggcaccagcatcaacctcaactggttccagcagaagcccggcaaggcccccaagctcctcatctacggggccagcaacctggaggacggcgtgccctcccgcttcagcggctcccgctacggcacggacttcacgctgaccatctcctccctggaggacgaggacatggccacctacttctgcctgcagcacacctacctgcccttcaccttcggcagcgggaccaagctggagatcaagggtggtggtggatccggtggtggtggatccggtggtggtggatccggtggtggtggatccggtggtggtggatcccaggtgcagctgcagcagagcgacgccgagctggtgaaacctggggccagcgtcaagatcagctgcaaggcctccggctacaccttcaccgaccgcaccatccactgggtgaagcagcggcccgagcaggggctggagtggatcgggtacatctaccccggggacggctccaccaagtacaacgagaacttcaagggcaaagccaccctgacggccgacaagtccagcagcaccgcctacatgcagctgaacagcctgaccagcgaggacagcgccgtgtacttctgcgcccggcggggggctatggactactggggccagggcacctccgtgaccgtgtcctcctacccatacgatgttccagattacgcttagtaactcgaggacggggtgaactacgcctgaggatccgatctttttccctctgccaaaaattatggggacatcatgaagccccttgagcatctgacttctggctaataaaggaaatttattttcattgcaatagtgtgttggaattttttgtgtctctcactcggcctaggtagataagtagcatggcgggttaatcattaactacaaggaacccctagtgatggagttggccactccctctctgcgcgctcgctcgctcactgaggccgggcgaccaaaggtcgcccgacgcccgggctttgcccgggcggcctcagtgagcgagcgagcgcgcag

SEQ ID NO: 2312 - DNA, 2591 bp, Artificial Sequence
  Description of Artificial Sequence: Synthetic polynucleotide
ctgcgcgctcgctcgctcactgaggccgcccgggcaaagcccgggcgtcgggcgacctttggtcgcccggcctcagtgagcgagcgagcgcgcagagagggagtggccaactccatcactaggggttccttgtagttaatgattaacccgccatgctacttatctaccagggtaatggggatcctctagaactatagctagtcgacataacgcgttagtatctgcagagggccctgcgtatgagtgcaagtgggttttaggaccaggatgaggcggggtgggggtgcctacctgacgaccgaccccgacccactggacaagcacccaacccccattccccaaattgcgcatcccctatcagagagggggaggggaaacaggatgcggcgaggcgcgtgcgcactgccagcttcagcaccgcggacagtgccttcgcccccgcctggcggcgcgcgccaccgccgcctcagcactgaaggcgcgctgacgtcactcgccggtcccccgcaaactccccttcccggccaccttggtcgcgtccgcgccgccgccggcccagccggaccgcaccacgcgaggcgcgagataggggggcacgggcgcgaccatctgcgctgcggcgccggcgactcagcgctgcctcagtctgcggtgggcagcggaggagtcgtgtcgtgcctgagagcgcagctgtgctcctgggcaccgcgcagtccgcccccgcggctcctggccagaccacccctaggaccccctgccccaagtcgcagccaagcttcgtttagtgaaccgtcagatcgcctggagacgccatccacgctgttttgacctccatagaagacaccgggaccgatccagcctccgcggattcgaatcccggccgggaacggtgcattggaacgcggattccccgtgccaagagtgacgtaagtaccgcctatagagtctataggcccacaaaaaatgctttcttcttttaatatacttttttgtttatcttatttctaatactttccctaatctctttctttcagggcaataatgatacaatgtatcatgcctctttgcaccattctaaagaataacagtgataatttctgggttaaggcaatagcaatatttctgcatataaatatttctgcatataaattgtaactgatgtaagaggtttcatattgctaatagcagctacaatccagctaccattctgcttttattttatggttgggataaggctggattattctgagtccaagctaggcccttttgctaatcatgttcatacctcttatcttcctcccacagctcctgggcaacgtgctggtctgtgtgctggcccatcactttggcaaagaattgggattcgaaccggtgccgccaccatgaagttgcctgttaggctgttggtgctgatgttctggattcctgcttccagcagtgacgtgcagatgatccagagccccagcagcctgagcgcctcgctgggggacatcgtgaccatgacctgccaggcctcccagggcaccagcatcaacctcaactggttccagcagaagcccggcaaggcccccaagctcctcatctacggggccagcaacctggaggacggcgtgccctcccgcttcagcggctcccgctacggcacggacttcacgctgaccatctcctccctggaggacgaggacatggccacctacttctgcctgcagcacacctacctgcccttcaccttcggcagcgggaccaagctggagatcaagggtggtggtggatccggtggtggtggatccggtggtggtggatccggtggtggtggatccggtggtggtggatccggtggtggtggatccggtggtggtggatccggtggtggtggatcccaggtgcagctgcagcagagcgacgccgagctggtgaaacctggggccagcgtcaagatcagctgcaaggcctccggctacaccttcaccgaccgcaccatccactgggtgaagcagcggcccgagcaggggctggagtggatcgggtacatctaccccggggacggctccaccaagtacaacgagaacttcaagggcaaagccaccctgacggccgacaagtccagcagcaccgcctacatgcagctgaacagcctgaccagcgaggacagcgccgtgtacttctgcgcccggcggggggctatggactactggggccagggcacctccgtgaccgtgtcctcctacccatacgatgttccagattacgcttagtaactcgaggacggggtgaactacgcctgaggatccgatctttttccctctgccaaaaattatggggacatcatgaagccccttgagcatctgacttctggctaataaaggaaatttattttcattgcaatagtgtgttggaattttttgtgtctctcactcggcctaggtagataagtagcatggcgggttaatcattaactacaaggaacccctagtgatggagttggccactccctctctgcgcgctcgctcgctcactgaggccgggcgaccaaaggtcgcccgacgcccgggctttgcccgggcggcctcagtgagcgagcgagcgcgcag

SEQ ID NO: 2313 - DNA, 3900 bp, Artificial Sequence
  Description of Artificial Sequence: Synthetic polynucleotide
ctgcgcgctcgctcgctcactgaggccgcccgggcaaagcccgggcgtcgggcgacctttggtcgcccggcctcagtgagcgagcgagcgcgcagagagggagtggccaactccatcactaggggttccttgtagttaatgattaacccgccatgctacttatctaccagggtaatggggatcctctagaactatagctagtcgacataacgcgttagtatctgcagagggccctgcgtatgagtgcaagtgggttttaggaccaggatgaggcggggtgggggtgcctacctgacgaccgaccccgacccactggacaagcacccaacccccattccccaaattgcgcatcccctatcagagagggggaggggaaacaggatgcggcgaggcgcgtgcgcactgccagcttcagcaccgcggacagtgccttcgcccccgcctggcggcgcgcgccaccgccgcctcagcactgaaggcgcgctgacgtcactcgccggtcccccgcaaactccccttcccggccaccttggtcgcgtccgcgccgccgccggcccagccggaccgcaccacgcgaggcgcgagataggggggcacgggcgcgaccatctgcgctgcggcgccggcgactcagcgctgcctcagtctgcggtgggcagcggaggagtcgtgtcgtgcctgagagcgcagctgtgctcctgggcaccgcgcagtccgcccccgcggctcctggccagaccacccctaggaccccctgccccaagtcgcagccaagcttcgtttagtgaaccgtcagatcgcctggagacgccatccacgctgttttgacctccatagaagacaccgggaccgatccagcctccgcggattcgaatcccggccgggaacggtgcattggaacgcggattccccgtgccaagagtgacgtaagtaccgcctatagagtctataggcccacaaaaaatgctttcttcttttaatatacttttttgtttatcttatttctaatactttccctaatctctttctttcagggcaataatgatacaatgtatcatgcctctttgcaccattctaaagaataacagtgataatttctgggttaaggcaatagcaatatttctgcatataaatatttctgcatataaattgtaactgatgtaagaggtttcatattgctaatagcagctacaatccagctaccattctgcttttattttatggttgggataaggctggattattctgagtccaagctaggcccttttgctaatcatgttcatacctcttatcttcctcccacagctcctgggcaacgtgctggtctgtgtgctggcccatcactttggcaaagaattgagctccttcctactcaaagccacatgaataggaggagccaccatgggatggagctggatctttctctttctcctgtcaggaactacaggtgtcctctctgaggtccagctgcaacagtctggacctgagctggtgaagcctggggcttcagtgaagatatcctgcaagacttctggatacacattcactgaatacaccatacactgggtgaagcagagccatggagagagccttgagtggattggaggtattaatccaaacgatggtggtactatttacaaccagaagttcaagggcaaggccacattgactgtagacaagtcctccaaaacagcctacatggagctccgcagcctgacatctgaggattctgcagtcttttactgtgcaagagggccctccgccaggtttccttactggggccaagggactctggtcactgtctctgcagccaaaacgacacccccatctgtctatccactggcccctggatctgctgcccaaactaactccatggtgaccctgggatgcctggtcaagggctatttccctgagccagtgacagtgacctggaactctggatccctgtccagcggtgtgcacaccttcccagctgtcctgcagtctgacctctacactctgagcagctcagtgactgtcccctccagcacctggcccagcgagaccgtcacctgcaacgttgcccacccggccagcagcaccaaggtggacaagaaaattgtgcccagggattgtggttgtaagccttgcatatgtacagtcccagaagtatcatctgtcttcatcttccccccaaagcccaaggatgtgctcaccattactctgactcctaaggtcacgtgtgttgtggtagacatcagcaaggatgatcccgaggtccagttcagctggtttgtagatgatgtggaggtgcacacagctcagacgcaaccccgggaggagcagttcaacagcactttccgctcagtcagtgaacttcccatcatgcaccaggactggctcaatggcaaggagttcaaatgcagggtcaacagtgcagctttccctgcccccatcgagaaaaccatctccaaaaccaaaggcagaccgaaggctccacaggtgtacaccattccacctcccaaggagcagatggccaaggataaagtcagtctgacctgcatgataacagacttcttccctgaagacattactgtggagtggcagtggaatgggcagccagcggagaactacaagaacactcagcccatcatggacacagatggctcttacttcgtctacagcaagctcaatgtgcagaagagcaactgggaggcaggaaatactttcacctgctctgtgttacatgagggcctgcacaaccaccatactgagaagagcctctcccactctcctggtagaaagaggcgagagggcagaggaagtcttctaacatgcggtgacgtggaggagaatcccggccctatgatgagtcctgcccagttcctgtttctgttagtgctctggattcgggaaaccaacggtgatgttgtgatgacccagactccactcactttgtcggttaccattggacaaccagcctccatctcttgcaagtcaagtcagagcctcttagatagtgatggaaagacatatttgaattggttgttacagaggccaggccagtctccaaagcgcctaatctatctggtgtctaaactggactctggagtccctgacagattcactggcagtggatcagggacagatttcacactgaaaattagcagagtggaggctgaggatttgggagtttattattgctggcaaggtacacattttcctcggacgttcggtggaggcaccaagctggaaatcaaacgggctgatgctgcaccaactgtatccatcttcccaccatccagtgagcagttaacatctggaggtgcctcagtcgtgtgcttcttgaacaacttctaccccaaagacatcaatgtcaagtggaagattgatggcagtgaacgacaaaatggcgtcctgaacagttggactgatcaggacagcaaagacagcacctacagcatgagcagcaccctcacgttgaccaaggacgagtatgaacgacataacagctatacctgtgaggccactcacaagacatcaacttcacccattgtcaagagcttcaacaggaatgagtgttagtaactcgaggacggggtgaactacgcctgaggatccgatctttttccctctgccaaaaattatggggacatcatgaagccccttgagcatctgacttctggctaataaaggaaatttattttcattgcaatagtgtgttggaattttttgtgtctctcactcggcctaggtagataagtagcatggcgggttaatcattaactacaaggaacccctagtgatggagttggccactccctctctgcgcgctcgctcgctcactgaggccgggcgaccaaaggtcgcccgacgcccgggctttgcccgggcggcctcagtgagcgagcgagcgcgcag

SEQ ID NO: 2314 - DNA, 4042 bp, Artificial Sequence
  Description of Artificial Sequence: Synthetic polynucleotide
ctgcgcgctcgctcgctcactgaggccgcccgggcaaagcccgggcgtcgggcgacctttggtcgcccggcctcagtgagcgagcgagcgcgcagagagggagtggccaactccatcactaggggttccttgtagttaatgattaacccgccatgctacttatctaccagggtaatggggatcctctagaactatagctagtcgacataacgcgtgatctaacatatcctggtgtggagtagcggacgctgctatgacagaggctcgggggcctgagctggctctgtgagctggggaggaggcagacagccaggccttgtctgcaagcagacctggcagcattgggctggccgccccccagggcctcctcttcatgcccagtgaatgactcaccttggcacagacacaatgttcggggtgggcacagtgcctgcttcccgccgcaccccagcccccctcaaatgccttccgagaagcccattgagcagggggcttgcattgcaccccagcctgacagcctggcatcttgggataaaagcagcacagccccctaggggctgcccttgctgtgtggcgccaccggcggtggagaacaaggctctattcagcctgtgcccaggaaaggggatcaggggatgcccaggcatggacagtgggtggcagggggggagaggagggctgtctgcttcccagaagtccaaggacacaaatgggtgaggggagagctctccccatagctgggctgcggcccaaccccaccccctcaggctatgccagggggtgttgccaggggcacccgggcatcgccagtctagcccactccttcataaagccctcgcatcccaggagcgagcagagccagagcaggttggagaggagacgcatcacctccgctgctcgcggggatcctctagaagcttcgtttagtgaaccgtcagatcgcctggagacgccatccacgctgttttgacctccatagaagacaccgggaccgatccagcctccgcggattcgaatcccggccgggaacggtgcattggaacgcggattccccgtgccaagagtgacgtaagtaccgcctatagagtctataggcccacaaaaaatgctttcttcttttaatatacttttttgtttatcttatttctaatactttccctaatctctttctttcagggcaataatgatacaatgtatcatgcctctttgcaccattctaaagaataacagtgataatttctgggttaaggcaatagcaatatttctgcatataaatatttctgcatataaattgtaactgatgtaagaggtttcatattgctaatagcagctacaatccagctaccattctgcttttattttatggttgggataaggctggattattctgagtccaagctaggcccttttgctaatcatgttcatacctcttatcttcctcccacagctcctgggcaacgtgctggtctgtgtgctggcccatcactttggcaaagaattgagctccttcctactcaaagccacatgaataggaggagccaccatgggatggagctggatctttctctttctcctgtcaggaactacaggtgtcctctctgaggtccagctgcaacagtctggacctgagctggtgaagcctggggcttcagtgaagatatcctgcaagacttctggatacacattcactgaatacaccatacactgggtgaagcagagccatggagagagccttgagtggattggaggtattaatccaaacgatggtggtactatttacaaccagaagttcaagggcaaggccacattgactgtagacaagtcctccaaaacagcctacatggagctccgcagcctgacatctgaggattctgcagtcttttactgtgcaagagggccctccgccaggtttccttactggggccaagggactctggtcactgtctctgcagccaaaacgacacccccatctgtctatccactggcccctggatctgctgcccaaactaactccatggtgaccctgggatgcctggtcaagggctatttccctgagccagtgacagtgacctggaactctggatccctgtccagcggtgtgcacaccttcccagctgtcctgcagtctgacctctacactctgagcagctcagtgactgtcccctccagcacctggcccagcgagaccgtcacctgcaacgttgcccacccggccagcagcaccaaggtggacaagaaaattgtgcccagggattgtggttgtaagccttgcatatgtacagtcccagaagtatcatctgtcttcatcttccccccaaagcccaaggatgtgctcaccattactctgactcctaaggtcacgtgtgttgtggtagacatcagcaaggatgatcccgaggtccagttcagctggtttgtagatgatgtggaggtgcacacagctcagacgcaaccccgggaggagcagttcaacagcactttccgctcagtcagtgaacttcccatcatgcaccaggactggctcaatggcaaggagttcaaatgcagggtcaacagtgcagctttccctgcccccatcgagaaaaccatctccaaaaccaaaggcagaccgaaggctccacaggtgtacaccattccacctcccaaggagcagatggccaaggataaagtcagtctgacctgcatgataacagacttcttccctgaagacattactgtggagtggcagtggaatgggcagccagcggagaactacaagaacactcagcccatcatggacacagatggctcttacttcgtctacagcaagctcaatgtgcagaagagcaactgggaggcaggaaatactttcacctgctctgtgttacatgagggcctgcacaaccaccatactgagaagagcctctcccactctcctggtagaaagaggcgagagggcagaggaagtcttctaacatgcggtgacgtggaggagaatcccggccctatgatgagtcctgcccagttcctgtttctgttagtgctctggattcgggaaaccaacggtgatgttgtgatgacccagactccactcactttgtcggttaccattggacaaccagcctccatctcttgcaagtcaagtcagagcctcttagatagtgatggaaagacatatttgaattggttgttacagaggccaggccagtctccaaagcgcctaatctatctggtgtctaaactggactctggagtccctgacagattcactggcagtggatcagggacagatttcacactgaaaattagcagagtggaggctgaggatttgggagtttattattgctggcaaggtacacattttcctcggacgttcggtggaggcaccaagctggaaatcaaacgggctgatgctgcaccaactgtatccatcttcccaccatccagtgagcagttaacatctggaggtgcctcagtcgtgtgcttcttgaacaacttctaccccaaagacatcaatgtcaagtggaagattgatggcagtgaacgacaaaatggcgtcctgaacagttggactgatcaggacagcaaagacagcacctacagcatgagcagcaccctcacgttgaccaaggacgagtatgaacgacataacagctatacctgtgaggccactcacaagacatcaacttcacccattgtcaagagcttcaacaggaatgagtgttagtaactcgaggacggggtgaactacgcctgaggatccgatctttttccctctgccaaaaattatggggacatcatgaagccccttgagcatctgacttctggctaataaaggaaatttattttcattgcaatagtgtgttggaattttttgtgtctctcactcggcctaggtagataagtagcatggcgggttaatcattaactacaaggaacccctagtgatggagttggccactccctctctgcgcgctcgctcgctcactgaggccgggcgaccaaaggtcgcccgacgcccgggctttgcccgggcggcctcagtgagcgagcgagcgcgcag

SEQ ID NO: 2315 - DNA, 3984 bp, Artificial Sequence
  Description of Artificial Sequence: Synthetic polynucleotide
ctgcgcgctcgctcgctcactgaggccgcccgggcaaagcccgggcgtcgggcgacctttggtcgcccggcctcagtgagcgagcgagcgcgcagagagggagtggccaactccatcactaggggttccttgtagttaatgattaacccgccatgctacttatctaccagggtaatggggatcctctagaactatagctagtcgacattgattattgactagttattaatagtaatcaattacggggtcattagttcatagcccatatatggagttccgcgttacataacttacggtaaatggcccgcctggctgaccgcccaacgacccccgcccattgacgtcaataatgacgtatgttcccatagtaacgccaatagggactttccattgacgtcaatgggtggagtatttacggtaaactgcccacttggcagtacatcaagtgtatcatatgccaagtacgccccctattgacgtcaatgacggtaaatggcccgcctggcattatgcccagtacatgaccttatgggactttcctacttggcagtacatctacgtattagtcatcgctattaccatgtcgaggccacgttctgcttcactctccccatctcccccccctccccacccccaattttgtatttatttattttttaattattttgtgcagcgatgggggcggggggggggggcgcgcgccaggcggggcggggcggggcgaggggcggggcggggcgaggcggagaggtgcggcggcagccaatcagagcggcgcgctccgaaagtttccttttatggcgaggcggcggcggcggcggccctataaaaagcgaagcgcgcggcgggcgggagcaagcttcgtttagtgaaccgtcagatcgcctggagacgccatccacgctgttttgacctccatagaagacaccgggaccgatccagcctccgcggattcgaatcccggccgggaacggtgcattggaacgcggattccccgtgccaagagtgacgtaagtaccgcctatagagtctataggcccacaaaaaatgctttcttcttttaatatacttttttgtttatcttatttctaatactttccctaatctctttctttcagggcaataatgatacaatgtatcatgcctctttgcaccattctaaagaataacagtgataatttctgggttaaggcaatagcaatatttctgcatataaatatttctgcatataaattgtaactgatgtaagaggtttcatattgctaatagcagctacaatccagctaccattctgcttttattttatggttgggataaggctggattattctgagtccaagctaggcccttttgctaatcatgttcatacctcttatcttcctcccacagctcctgggcaacgtgctggtctgtgtgctggcccatcactttggcaaagaattgagctccttcctactcaaagccacatgaataggaggagccaccatgggatggagctggatctttctctttctcctgtcaggaactacaggtgtcctctctgaggtccagctgcaacagtctggacctgagctggtgaagcctggggcttcagtgaagatatcctgcaagacttctggatacacattcactgaatacaccatacactgggtgaagcagagccatggagagagccttgagtggattggaggtattaatccaaacgatggtggtactatttacaaccagaagttcaagggcaaggccacattgactgtagacaagtcctccaaaacagcctacatggagctccgcagcctgacatctgaggattctgcagtcttttactgtgcaagagggccctccgccaggtttccttactggggccaagggactctggtcactgtctctgcagccaaaacgacacccccatctgtctatccactggcccctggatctgctgcccaaactaactccatggtgaccctgggatgcctggtcaagggctatttccctgagccagtgacagtgacctggaactctggatccctgtccagcggtgtgcacaccttcccagctgtcctgcagtctgacctctacactctgagcagctcagtgactgtcccctccagcacctggcccagcgagaccgtcacctgcaacgttgcccacccggccagcagcaccaaggtggacaagaaaattgtgcccagggattgtggttgtaagccttgcatatgtacagtcccagaagtatcatctgtcttcatcttccccccaaagcccaaggatgtgctcaccattactctgactcctaaggtcacgtgtgttgtggtagacatcagcaaggatgatcccgaggtccagttcagctggtttgtagatgatgtggaggtgcacacagctcagacgcaaccccgggaggagcagttcaacagcactttccgctcagtcagtgaacttcccatcatgcaccaggactggctcaatggcaaggagttcaaatgcagggtcaacagtgcagctttccctgcccccatcgagaaaaccatctccaaaaccaaaggcagaccgaaggctccacaggtgtacaccattccacctcccaaggagcagatggccaaggataaagtcagtctgacctgcatgataacagacttcttccctgaagacattactgtggagtggcagtggaatgggcagccagcggagaactacaagaacactcagcccatcatggacacagatggctcttacttcgtctacagcaagctcaatgtgcagaagagcaactgggaggcaggaaatactttcacctgctctgtgttacatgagggcctgcacaaccaccatactgagaagagcctctcccactctcctggtagaaagaggcgagagggcagaggaagtcttctaacatgcggtgacgtggaggagaatcccggccctatgatgagtcctgcccagttcctgtttctgttagtgctctggattcgggaaaccaacggtgatgttgtgatgacccagactccactcactttgtcggttaccattggacaaccagcctccatctcttgcaagtcaagtcagagcctcttagatagtgatggaaagacatatttgaattggttgttacagaggccaggccagtctccaaagcgcctaatctatctggtgtctaaactggactctggagtccctgacagattcactggcagtggatcagggacagatttcacactgaaaattagcagagtggaggctgaggatttgggagtttattattgctggcaaggtacacattttcctcggacgttcggtggaggcaccaagctggaaatcaaacgggctgatgctgcaccaactgtatccatcttcccaccatccagtgagcagttaacatctggaggtgcctcagtcgtgtgcttcttgaacaacttctaccccaaagacatcaatgtcaagtggaagattgatggcagtgaacgacaaaatggcgtcctgaacagttggactgatcaggacagcaaagacagcacctacagcatgagcagcaccctcacgttgaccaaggacgagtatgaacgacataacagctatacctgtgaggccactcacaagacatcaacttcacccattgtcaagagcttcaacaggaatgagtgttagtaactcgaggacggggtgaactacgcctgaggatccgatctttttccctctgccaaaaattatggggacatcatgaagccccttgagcatctgacttctggctaataaaggaaatttattttcattgcaatagtgtgttggaattttttgtgtctctcactcggcctaggtagataagtagcatggcgggttaatcattaactacaaggaacccctagtgatggagttggccactccctctctgcgcgctcgctcgctcactgaggccgggcgaccaaaggtcgcccgacgcccgggctttgcccgggcggcctcagtgagcgagcgagcgcgcag

SEQ ID NO: 2316 - DNA, 4472 bp, Artificial Sequence
  Description of Artificial Sequence: Synthetic polynucleotide
ctgcgcgctcgctcgctcactgaggccgcccgggcaaagcccgggcgtcgggcgacctttggtcgcccggcctcagtgagcgagcgagcgcgcagagagggagtggccaactccatcactaggggttccttgtagttaatgattaacccgccatgctacttatctaccagggtaatggggatcctctagaactatagctagtcgacataacgcgtctagttattaatagtaatcaattacggggtcattagttcatagcccatatatggagttccgcgttacataacttacggtaaatggcccgcctggctgaccgcccaacgacccccgcccattgacgtcaataatgacgtatgttcccatagtaacgccaatagggactttccattgacgtcaatgggtggagtatttacggtaaactgcccacttggcagtacatcaagtgtatcatatgccaagtacgccccctattgacgtcaatgacggtaaatggcccgcctggcattatgcccagtacatgaccttatgggactttcctacttggcagtacatctacgtattagtcatcgctattaccatggtcgaggtgagccccacgttctgcttcactctccccatctcccccccctccccacccccaattttgtatttatttattttttaattattttgtgcagcgatgggggcggggggggggggggggcgcgcgccaggcggggcggggcggggcgaggggcggggcggggcgaggcggagaggtgcggcggcagccaatcagagcggcgcgctccgaaagtttccttttatggcgaggcggcggcggcggcggccctataaaaagcgaagcgcgcggcgggcgggagtcgctgcgcgctgccttcgccccgtgccccgctccgccgccgcctcgcgccgcccgccccggctctgactgaccgcgttactcccacaggtgagcgggcgggacggcccttctcctccgggctgtaattagcgcttggtttaatgacggcttgtttcttttctgtggctgcgtgaaagccttgaggggctccgggagggccctttgtgcggggggagcggctcggggggtgcgtgcgtgtgtgtgtgcgtggggagcgccgcgtgcggctccgcgctgcccggcggctgtgagcgctgcgggcgcggcgcggggctttgtgcgctccgcagtgtgcgcgaggggagcgcggccgggggcggtgccccgcggtgcggggggggctgcgaggggaacaaaggctgcgtgcggggtgtgtgcgtgggggggtgagcagggggtgtgggcgcgtcggtcgggctgcaaccccccctgcacccccctccccgagttgctgagcacggcccggcttcgggtgcggggctccgtacggggcgtggcgcggggctcgccgtgccgggcggggggtggcggcaggtgggggtgccgggcggggcggggccgcctcgggccggggagggctcgggggaggggcgcggcggcccccggagcgccggcggctgtcgaggcgcggcgagccgcagccattgccttttatggtaatcgtgcgagagggcgcagggacttcctttgtcccaaatctgtgcggagccgaaatctgggaggcgccgccgcaccccctctagcgggcgcggggcgaagcggtgcggcgccggcaggaaggaaatgggcggggagggccttcgtgcgtcgccgcgccgccgtccccttctccctctccagcctcggggctgtccgcggggggacggctgccttcgggggggacggggcagggcggggttcggcttctggcgtgtgaccggcggctctagagcctctgctaaccatgttcatgccttcttctttttcctacagctcctgggcaacgtgctggttattgtgctgtctcatcattttggcaaagaattcgagctccttcctactcaaagccacatgaataggaggagccaccatgggatggagctggatctttctctttctcctgtcaggaactacaggtgtcctctctgaggtccagctgcaacagtctggacctgagctggtgaagcctggggcttcagtgaagatatcctgcaagacttctggatacacattcactgaatacaccatacactgggtgaagcagagccatggagagagccttgagtggattggaggtattaatccaaacgatggtggtactatttacaaccagaagttcaagggcaaggccacattgactgtagacaagtcctccaaaacagcctacatggagctccgcagcctgacatctgaggattctgcagtcttttactgtgcaagagggccctccgccaggtttccttactggggccaagggactctggtcactgtctctgcagccaaaacgacacccccatctgtctatccactggcccctggatctgctgcccaaactaactccatggtgaccctgggatgcctggtcaagggctatttccctgagccagtgacagtgacctggaactctggatccctgtccagcggtgtgcacaccttcccagctgtcctgcagtctgacctctacactctgagcagctcagtgactgtcccctccagcacctggcccagcgagaccgtcacctgcaacgttgcccacccggccagcagcaccaaggtggacaagaaaattgtgcccagggattgtggttgtaagccttgcatatgtacagtcccagaagtatcatctgtcttcatcttccccccaaagcccaaggatgtgctcaccattactctgactcctaaggtcacgtgtgttgtggtagacatcagcaaggatgatcccgaggtccagttcagctggtttgtagatgatgtggaggtgcacacagctcagacgcaaccccgggaggagcagttcaacagcactttccgctcagtcagtgaacttcccatcatgcaccaggactggctcaatggcaaggagttcaaatgcagggtcaacagtgcagctttccctgcccccatcgagaaaaccatctccaaaaccaaaggcagaccgaaggctccacaggtgtacaccattccacctcccaaggagcagatggccaaggataaagtcagtctgacctgcatgataacagacttcttccctgaagacattactgtggagtggcagtggaatgggcagccagcggagaactacaagaacactcagcccatcatggacacagatggctcttacttcgtctacagcaagctcaatgtgcagaagagcaactgggaggcaggaaatactttcacctgctctgtgttacatgagggcctgcacaaccaccatactgagaagagcctctcccactctcctggtagaaagaggcgagagggcagaggaagtcttctaacatgcggtgacgtggaggagaatcccggccctatgatgagtcctgcccagttcctgtttctgttagtgctctggattcgggaaaccaacggtgatgttgtgatgacccagactccactcactttgtcggttaccattggacaaccagcctccatctcttgcaagtcaagtcagagcctcttagatagtgatggaaagacatatttgaattggttgttacagaggccaggccagtctccaaagcgcctaatctatctggtgtctaaactggactctggagtccctgacagattcactggcagtggatcagggacagatttcacactgaaaattagcagagtggaggctgaggatttgggagtttattattgctggcaaggtacacattttcctcggacgttcggtggaggcaccaagctggaaatcaaacgggctgatgctgcaccaactgtatccatcttcccaccatccagtgagcagttaacatctggaggtgcctcagtcgtgtgcttcttgaacaacttctaccccaaagacatcaatgtcaagtggaagattgatggcagtgaacgacaaaatggcgtcctgaacagttggactgatcaggacagcaaagacagcacctacagcatgagcagcaccctcacgttgaccaaggacgagtatgaacgacataacagctatacctgtgaggccactcacaagacatcaacttcacccattgtcaagagcttcaacaggaatgagtgttagtaactcgaggacggggtgaactacgcctgaggatccgatctttttccctctgccaaaaattatggggacatcatgaagccccttgagcatctgacttctggctaataaaggaaatttattttcattgcaatagtgtgttggaattttttgtgtctctcactcggcctaggtagataagtagcatggcgggttaatcattaactacaaggaacccctagtgatggagttggccactccctctctgcgcgctcgctcgctcactgaggccgggcgaccaaaggtcgcccgacgcccgggctttgcccgggcggcctcagtgagcgagcgagcgcgcag

SEQ ID NO: 2317 - DNA, 2549 bp, Artificial Sequence
  Description of Artificial Sequence: Synthetic polynucleotide
cctgcaggcagctgcgcgctcgctcgctcactgaggccgcccgggcaaagcccgggcgtcgggcgacctttggtcgcccggcctcagtgagcgagcgagcgcgcagagagggagtggccaactccatcactaggggttccttgtagttaatgattaacccgccatgctacttatctacgtagccatgcgtcgacataacgcgtcgacattgattattgactagttattaatagtaatcaattacggggtcattagttcatagcccatatatggagttccgcgttacataacttacggtaaatggcccgcctggctgaccgcccaacgacccccgcccattgacgtcaataatgacgtatgttcccatagtaacgccaatagggactttccattgacgtcaatgggtggagtatttacggtaaactgcccacttggcagtacatcaagtgtatcatatgccaagtacgccccctattgacgtcaatgacggtaaatggcccgcctggcattatgcccagtacatgaccttatgggactttcctacttggcagtacatctacgtattagtcatcgctattaccatgtcgaggccacgttctgcttcactctccccatctcccccccctccccacccccaattttgtatttatttattttttaattattttgtgcagcgatgggggcggggggggggggcgcgcgccaggcggggcggggcggggcgaggggcggggcggggcgaggcggagaggtgcggcggcagccaatcagagcggcgcgctccgaaagtttccttttatggcgaggcggcggcggcggcggccctataaaaagcgaagcgcgcggcgggcgggagcaagcttcgtttagtgaaccgattcgaatcccggccgggaacggtgcattggaacgcggattccccgtgccaagagtgacgtaagtaccgcctatagagtctataggcccacaaaaaatgctttcttcttttaatatacttttttgtttatcttatttctaatactttccctaatctctttctttcagggcaataatgatacaatgtatcatgcctctttgcaccattctaaagaataacagtgataatttctgggttaaggcaatagcaatatttctgcatataaatatttctgcatataaattgtaactgatgtaagaggtttcatattgctaatagcagctacaatccagctaccattctgcttttattttatggttgggataaggctggattattctgagtccaagctaggcccttttgctaatcatgttcatacctcttatcttcctcccacagctcctgggcaacgtgctggtctgtgtgctggcccatcactttggcaaagaattgggattcgaaccggtgccgccaccatgggatggagctggatctttctctttctcctgtcaggaactacaggtgtcctctctgaggtccagctgcaacagtctggacctgagctggtgaagcctggggcttcagtgaagatatcctgcaagacttctggatacacattcactgaatacaccatacactgggtgaagcagagccatggagagagccttgagtggattggaggtattaatccaaacgatggtggtactatttacaaccagaagttcaagggcaaggccacattgactgtagacaagtcctccaaaacagcctacatggagctccgcagcctgacatctgaggattctgcagtcttttactgtgcaagagggccctccgccaggtttccttactggggccaagggactctggtcactgtctctgcaggtggtggtggtagcggcggcggcggctctggtggtggtggatccgatgttgtgatgacccagactccactcactttgtcggttaccattggacaaccagcctccatctcttgcaagtcaagtcagagcctcttagatagtgatggaaagacatatttgaattggttgttacagaggccaggccagtctccaaagcgcctaatctatctggtgtctaaactggactctggagtccctgacagattcactggcagtggatcagggacagatttcacactgaaaattagcagagtggaggctgaggatttgggagtttattattgctggcaaggtacacattttcctcggacgttcggtggaggcaccaagctggaaatcaaacggtacccatacgatgttccagattacgcttagtgacctgaggatgatctttttccctctgccaaaaattatggggacatcatgaagccccttgagcatctgacttctggctaataaaggaaatttattttcattgcaatagtgtgttggaattttttgtgtctctcactcgcctaggatcgatgctacgtagataagtagcatggcgggttaatcattaactacagaggaacccctagtgatggagttggccactccctctctgcgcgctcgctcgctcactgaggccgggcgaccaaaggtcgcccgacgcccgggctttgcccgggcggcctcagtgagcgagcgagcgcgcagctgcctgcagg

SEQ ID NO: 2318 - DNA, 2445 bp, Artificial Sequence
  Description of Artificial Sequence: Synthetic polynucleotide
cctgcaggcagctgcgcgctcgctcgctcactgaggccgcccgggcaaagcccgggcgtcgggcgacctttggtcgcccggcctcagtgagcgagcgagcgcgcagagagggagtggccaactccatcactaggggttccttgtagttaatgattaacccgccatgctacttatctacgtagccatgcgtcgacataacgcgtcgacattgattattgactagttattaatagtaatcaattacggggtcattagttcatagcccatatatggagttccgcgttacataacttacggtaaatggcccgcctggctgaccgcccaacgacccccgcccattgacgtcaataatgacgtatgttcccatagtaacgccaatagggactttccattgacgtcaatgggtggagtatttacggtaaactgcccacttggcagtacatcaagtgtatcatatgccaagtacgccccctattgacgtcaatgacggtaaatggcccgcctggcattatgcccagtacatgaccttatgggactttcctacttggcagtacatctacgtattagtcatcgctattaccatgtcgaggccacgttctgcttcactctccccatctcccccccctccccacccccaattttgtatttatttattttttaattattttgtgcagcgatgggggcggggggggggggcgcgcgccaggcggggcggggcggggcgaggggcggggcggggcgaggcggagaggtgcggcggcagccaatcagagcggcgcgctccgaaagtttccttttatggcgaggcggcggcggcggcggccctataaaaagcgaagcgcgcggcgggcgggagcaagcttcgtttagtgaaccgtcagatcgcctggagacgccatccacgctgttttgacctccatagaagacaccgggaccgatccagcctccgcggattcgaatcccggccgggaacggtgcattggaacgcggattccccgtgccaagagtgacgtaagtaccgcctatagagtctataggcccactctgcatataaattgtaactgatgtaagaggtttcatattgctaatagcagctacaatccagctaccattctgcttttattttatggttgggataaggctggattattctgagtccaagctaggcccttttgctaatcatgttcatacctcttatcttcctcccacagctcctgggcaacgtgctggtctgtgtgctggcccatcactttggcaaagaattgggattcgaaccggtgccgccaccatgggatggagctggatctttctctttctcctgtcaggaactacaggtgtcctctctgaggtccagctgcaacagtctggacctgagctggtgaagcctggggcttcagtgaagatatcctgcaagacttctggatacacattcactgaatacaccatacactgggtgaagcagagccatggagagagccttgagtggattggaggtattaatccaaacgatggtggtactatttacaaccagaagttcaagggcaaggccacattgactgtagacaagtcctccaaaacagcctacatggagctccgcagcctgacatctgaggattctgcagtcttttactgtgcaagagggccctccgccaggtttccttactggggccaagggactctggtcactgtctctgcaggtggtggtggtagcggcggcggcggctctggtggtggtggatccgatgttgtgatgacccagactccactcactttgtcggttaccattggacaaccagcctccatctcttgcaagtcaagtcagagcctcttagatagtgatggaaagacatatttgaattggttgttacagaggccaggccagtctccaaagcgcctaatctatctggtgtctaaactggactctggagtccctgacagattcactggcagtggatcagggacagatttcacactgaaaattagcagagtggaggctgaggatttgggagtttattattgctggcaaggtacacattttcctcggacgttcggtggaggcaccaagctggaaatcaaacggtacccatacgatgttccagattacgcttagtgacctgaggatgatctttttccctctgccaaaaattatggggacatcatgaagccccttgagcatctgacttctggctaataaaggaaatttattttcattgcaatagtgtgttggaattttttgtgtctctcactcgcctaggatcgatgctacgtagataagtagcatggcgggttaatcattaactacagaggaacccctagtgatggagttggccactccctctctgcgcgctcgctcgctcactgaggccgggcgaccaaaggtcgcccgacgcccgggctttgcccgggcggcctcagtgagcgagcgagcgcgcagctgcctgcagg

SEQ ID NO: 2319 - DNA, 2350 bp, Artificial Sequence
  Description of Artificial Sequence: Synthetic polynucleotide
cctgcaggcagctgcgcgctcgctcgctcactgaggccgcccgggcaaagcccgggcgtcgggcgacctttggtcgcccggcctcagtgagcgagcgagcgcgcagagagggagtggccaactccatcactaggggttccttgtagttaatgattaacccgccatgctacttatctacgtagccatgcgtcgacataacgcgtcgacattgattattgactagttattaatagtaatcaattacggggtcattagttcatagcccatatatggagttccgcgttacataacttacggtaaatggcccgcctggctgaccgcccaacgacccccgcccattgacgtcaataatgacgtatgttcccatagtaacgccaatagggactttccattgacgtcaatgggtggagtatttacggtaaactgcccacttggcagtacatcaagtgtatcatatgccaagtacgccccctattgacgtcaatgacggtaaatggcccgcctggcattatgcccagtacatgaccttatgggactttcctacttggcagtacatctacgtattagtcatcgctattaccatgtcgaggccacgttctgcttcactctccccatctcccccccctccccacccccaattttgtatttatttattttttaattattttgtgcagcgatgggggcggggggggggggcgcgcgccaggcggggcggggcggggcgaggggcggggcggggcgaggcggagaggtgcggcggcagccaatcagagcggcgcgctccgaaagtttccttttatggcgaggcggcggcggcggcggccctataaaaagcgaagcgcgcggcgggcgggagcaagcttcgtttagtgaaccgtcagatcgcctggagacgccatccacgctgttttgacctccatagaagacaccgggaccgatccaggtaagtaccgcctatagagtctataggcccacaaaaaatgctttcttcttttaatatacttttttgtttatcttatttctaatactttccctaatctctttcgctggattattctgagtccaagctaggcccttttgctaatcatgttcatacctcttatcttcctcccacagctcctgggcaacgtgctggtctgtgtgctggcccatcactttggcaaagaattgggattcgaaccggtgccgccaccatgggatggagctggatctttctctttctcctgtcaggaactacaggtgtcctctctgaggtccagctgcaacagtctggacctgagctggtgaagcctggggcttcagtgaagatatcctgcaagacttctggatacacattcactgaatacaccatacactgggtgaagcagagccatggagagagccttgagtggattggaggtattaatccaaacgatggtggtactatttacaaccagaagttcaagggcaaggccacattgactgtagacaagtcctccaaaacagcctacatggagctccgcagcctgacatctgaggattctgcagtcttttactgtgcaagagggccctccgccaggtttccttactggggccaagggactctggtcactgtctctgcaggtggtggtggtagcggcggcggcggctctggtggtggtggatccgatgttgtgatgacccagactccactcactttgtcggttaccattggacaaccagcctccatctcttgcaagtcaagtcagagcctcttagatagtgatggaaagacatatttgaattggttgttacagaggccaggccagtctccaaagcgcctaatctatctggtgtctaaactggactctggagtccctgacagattcactggcagtggatcagggacagatttcacactgaaaattagcagagtggaggctgaggatttgggagtttattattgctggcaaggtacacattttcctcggacgttcggtggaggcaccaagctggaaatcaaacggtacccatacgatgttccagattacgcttagtgacctgaggatgatctttttccctctgccaaaaattatggggacatcatgaagccccttgagcatctgacttctggctaataaaggaaatttattttcattgcaatagtgtgttggaattttttgtgtctctcactcgcctaggatcgatgctacgtagataagtagcatggcgggttaatcattaactacagaggaacccctagtgatggagttggccactccctctctgcgcgctcgctcgctcactgaggccgggcgaccaaaggtcgcccgacgcccgggctttgcccgggcggcctcagtgagcgagcgagcgcgcagctgcctgcagg

SEQ ID NO: 2320 - DNA, 4698 bp, Artificial Sequence
  Description of Artificial Sequence: Synthetic polynucleotide
cctgcaggcagctgcgcgctcgctcgctcactgaggccgcccgggcaaagcccgggcgtcgggcgacctttggtcgcccggcctcagtgagcgagcgagcgcgcagagagggagtggccaactccatcactaggggttccttgtagttaatgattaacccgccatgctacttatctacgtagccatgcgtcgacataacgcgtctagttattaatagtaatcaattacggggtcattagttcatagcccatatatggagttccgcgttacataacttacggtaaatggcccgcctggctgaccgcccaacgacccccgcccattgacgtcaataatgacgtatgttcccatagtaacgccaatagggactttccattgacgtcaatgggtggagtatttacggtaaactgcccacttggcagtacatcaagtgtatcatatgccaagtacgccccctattgacgtcaatgacggtaaatggcccgcctggcattatgcccagtacatgaccttatgggactttcctacttggcagtacatctacgtattagtcatcgctattaccatggtcgaggtgagccccacgttctgcttcactctccccatctcccccccctccccacccccaattttgtatttatttattttttaattattttgtgcagcgatgggggcggggggggggggggggcgcgcgccaggcggggcggggcggggcgaggggcggggcggggcgaggcggagaggtgcggcggcagccaatcagagcggcgcgctccgaaagtttccttttatggcgaggcggcggcggcggcggccctataaaaagcgaagcgcgcggcgggcgggagtcgctgcgcgctgccttcgccccgtgccccgctccgccgccgcctcgcgccgcccgccccggctctgactgaccgcgttactcccacaggtgagcgggcgggacggcccttctcctccgggctgtaattagcgcttggtttaatgacggcttgtttcttttctgtggctgcgtgaaagccttgaggggctccgggagggccctttgtgcggggggagcggctcggggggtgcgtgcgtgtgtgtgtgcgtggggagcgccgcgtgcggctccgcgctgcccggcggctgtgagcgctgcgggcgcggcgcggggctttgtgcgctccgcagtgtgcgcgaggggagcgcggccgggggcggtgccccgcggtgcggggggggctgcgaggggaacaaaggctgcgtgcggggtgtgtgcgtgggggggtgagcagggggtgtgggcgcgtcggtcgggctgcaaccccccctgcacccccctccccgagttgctgagcacggcccggcttcgggtgcggggctccgtacggggcgtggcgcggggctcgccgtgccgggcggggggtggcggcaggtgggggtgccgggcggggcggggccgcctcgggccggggagggctcgggggaggggcgcggcggcccccggagcgccggcggctgtcgaggcgcggcgagccgcagccattgccttttatggtaatcgtgcgagagggcgcagggacttcctttgtcccaaatctgtgcggagccgaaatctgggaggcgccgccgcaccccctctagcgggcgcggggcgaagcggtgcggcgccggcaggaaggaaatgggcggggagggccttcgtgcgtcgccgcgccgccgtccccttctccctctccagcctcggggctgtccgcggggggacggctgccttcgggggggacggggcagggcggggttcggcttctggcgtgtgaccggcggctctagagcctctgctaaccatgttcatgccttcttctttttcctacagctcctgggcaacgtgctggttattgtgctgtctcatcattttggcaaagaattcgggattcgaaccggtgccgccaccatggcgacgggttcaagaacttccctacttcttgcatttggcctgctttgtttgccgtggttacaggagggctcggcagctgccgaggtccagctgcaacagtctggacctgagctggtgaagcctggggcttcagtgaagatatcctgcaagacttctggatacacattcactgaatacaccatacactgggtgaagcagagccatggagagagccttgagtggattggaggtattaatccaaacgatggtggtactatttacaaccagaagttcaagggcaaggccacattgactgtagacaagtcctccaaaacagcctacatggagctccgcagcctgacatctgaggattctgcagtcttttactgtgcaagagggccctccgccaggtttccttactggggccaagggactctggtcactgtctctgcaggtggtggtggtagcggcggcggcggctctggtggtggtggatccgatgttgtgatgacccagactccactcactttgtcggttaccattggacaaccagcctccatctcttgcaagtcaagtcagagcctcttagatagtgatggaaagacatatttgaattggttgttacagaggccaggccagtctccaaagcgcctaatctatctggtgtctaaactggactctggagtccctgacagattcactggcagtggatcagggacagatttcacactgaaaattagcagagtggaggctgaggatttgggagtttattattgctggcaaggtacacattttcctcggacgttcggtggaggcaccaagctggaaatcaaacggtagtgacctgaggatgggtggcatccctgtgacccctccccagtgcctctcctggccctggaagttgccactccagtgcccaccagccttgtcctaataaaattaagttgcatcattttgtctgactaggtgtccttctataatattatggggtggaggggggtggtatggagcaaggggcaagttgggaagacaacctgtagggcctgcggggtctattgggaaccaagctggagtgcagtggcacaatcttggctcactgcaatctccgcctcctgggttcaagcgattctcctgcctcagcctcccgagttgttgggattccaggcatgcatgaccaggctcagctaatttttgtttttttggtagagacggggtttcaccatattggccaggctggtctccaactcctaatctcaggtgatctacccaccttggcctcccaaattgctgggattacaggcgtgaaccactgctcccttccctgtccttggcctagaattatatttttttaaagactcacatagtcttctgcacagggcattctttttgcttcaggatgtttacaacatttgctgcccacttttcctaggtttcttgagacctctacaagagttggagttgacacttggggtactttcttggtgtaacgaactaatagcctgaaaaaaagaagtcatgtgttttcagcaaggcaagaaactgtctaacatagtagataaaacagagaacacttggccggaatcaactaagatgttgctatgttccattcatcatattatctccatctgcagagtagtgggttagtggagggtagaaaacattctcctgaacaactagttaaacttggctttgagttccacctgtaccacttgcataatcttgggaaagtgagttgcctaattcagtgacattaataaatttattaatttcttctttcaataaaacctggagagagcttcatatgtatcagcatatgctaaacttgaaagatacaagtagaaaatggaaggaaatatatctgactcaatagggatagttcaagggttaaattaaaagtagtaaagtattataattaatctgacatggtacctaatatataataatcatgtattaagaatgccagtcaccattaaaagtcaatgtatgactttaatctactcgaggaaagaaactatgtcttgttcactgttattatctctaaaatccataatcagaagagcaccatgtgtatgagccacacaataaatatctactgtataatatgtctcttcttgtttttaaccttcatagataagactctattgaattgggacattagtccagcaagccattctgtctctgtctcttctatggagggaaaggtttaaccatcaaagactaggtgcatctcccaaacaacctgaatttaatattcaaatatgtatctaaattcatttgttacatttttgtgttcagcttacatattactttttgagcgacatctattcaaggcctactacttgctgctctacaaaatattgccatgctctatttgcccattaactatttcttaaccttcaagggacatgctcagttctgatataccaagatttggtatttaccctcccagcctacatacttccaatcttaagagaacaatttttagactacattcaaatatagacctctccaccccatcaactattttatctctcctctcctatctttcttgacaaagagtgattagaaatatgcaattctaggtatcgatgctacgtagataagtagcatggcgggttaatcattaactacagaggaacccctagtgatggagttggccactccctctctgcgcgctcgctcgctcactgaggccgggcgaccaaaggtcgcccgacgcccgggctttgcccgggcggcctcagtgagcgagcgagcgcgcagctgcctgcagg

SEQ ID NO: 2321 - DNA, 4223 bp, Artificial Sequence
  Description of Artificial Sequence: Synthetic polynucleotide
cctgcaggcagctgcgcgctcgctcgctcactgaggccgcccgggcaaagcccgggcgtcgggcgacctttggtcgcccggcctcagtgagcgagcgagcgcgcagagagggagtggccaactccatcactaggggttccttgtagttaatgattaacccgccatgctacttatctacgtagccatgcgtcgacataacgcgtcgacattgattattgactagttattaatagtaatcaattacggggtcattagttcatagcccatatatggagttccgcgttacataacttacggtaaatggcccgcctggctgaccgcccaacgacccccgcccattgacgtcaataatgacgtatgttcccatagtaacgccaatagggactttccattgacgtcaatgggtggagtatttacggtaaactgcccacttggcagtacatcaagtgtatcatatgccaagtacgccccctattgacgtcaatgacggtaaatggcccgcctggcattatgcccagtacatgaccttatgggactttcctacttggcagtacatctacgtattagtcatcgctattaccatgtcgaggccacgttctgcttcactctccccatctcccccccctccccacccccaattttgtatttatttattttttaattattttgtgcagcgatgggggcggggggggggggcgcgcgccaggcggggcggggcggggcgaggggcggggcggggcgaggcggagaggtgcggcggcagccaatcagagcggcgcgctccgaaagtttccttttatggcgaggcggcggcggcggcggccctataaaaagcgaagcgcgcggcgggcgggagcaagcttcgtttagtgaaccgtcagatcgcctggagacgccatccacgctgttttgacctccatagaagacaccgggaccgatccagcctccgcggattcgaatcccggccgggaacggtgcattggaacgcggattccccgtgccaagagtgacgtaagtaccgcctatagagtctataggcccacaaaaaatgctttcttcttttaatatacttttttgtttatcttatttctaatactttccctaatctctttctttcagggcaataatgatacaatgtatcatgcctctttgcaccattctaaagaataacagtgataatttctgggttaaggcaatagcaatatttctgcatataaatatttctgcatataaattgtaactgatgtaagaggtttcatattgctaatagcagctacaatccagctaccattctgcttttattttatggttgggataaggctggattattctgagtccaagctaggcccttttgctaatcatgttcatacctcttatcttcctcccacagctcctgggcaacgtgctggtctgtgtgctggcccatcactttggcaaagaattgggattcgaaccggtgccgccaccatggcgacgggttcaagaacttccctacttcttgcatttggcctgctttgtttgccgtggttacaggagggctcggcagctgccgaggtccagctgcaacagtctggacctgagctggtgaagcctggggcttcagtgaagatatcctgcaagacttctggatacacattcactgaatacaccatacactgggtgaagcagagccatggagagagccttgagtggattggaggtattaatccaaacgatggtggtactatttacaaccagaagttcaagggcaaggccacattgactgtagacaagtcctccaaaacagcctacatggagctccgcagcctgacatctgaggattctgcagtcttttactgtgcaagagggccctccgccaggtttccttactggggccaagggactctggtcactgtctctgcaggtggtggtggtagcggcggcggcggctctggtggtggtggatccgatgttgtgatgacccagactccactcactttgtcggttaccattggacaaccagcctccatctcttgcaagtcaagtcagagcctcttagatagtgatggaaagacatatttgaattggttgttacagaggccaggccagtctccaaagcgcctaatctatctggtgtctaaactggactctggagtccctgacagattcactggcagtggatcagggacagatttcacactgaaaattagcagagtggaggctgaggatttgggagtttattattgctggcaaggtacacattttcctcggacgttcggtggaggcaccaagctggaaatcaaacggtagtgacctgaggatgggtggcatccctgtgacccctccccagtgcctctcctggccctggaagttgccactccagtgcccaccagccttgtcctaataaaattaagttgcatcattttgtctgactaggtgtccttctataatattatggggtggaggggggtggtatggagcaaggggcaagttgggaagacaacctgtagggcctgcggggtctattgggaaccaagctggagtgcagtggcacaatcttggctcactgcaatctccgcctcctgggttcaagcgattctcctgcctcagcctcccgagttgttgggattccaggcatgcatgaccaggctcagctaatttttgtttttttggtagagacggggtttcaccatattggccaggctggtctccaactcctaatctcaggtgatctacccaccttggcctcccaaattgctgggattacaggcgtgaaccactgctcccttccctgtccttggcctagaattatatttttttaaagactcacatagtcttctgcacagggcattctttttgcttcaggatgtttacaacatttgctgcccacttttcctaggtttcttgagacctctacaagagttggagttgacacttggggtactttcttggtgtaacgaactaatagcctgaaaaaaagaagtcatgtgttttcagcaaggcaagaaactgtctaacatagtagataaaacagagaacacttggccggaatcaactaagatgttgctatgttccattcatcatattatctccatctgcagagtagtgggttagtggagggtagaaaacattctcctgaacaactagttaaacttggctttgagttccacctgtaccacttgcataatcttgggaaagtgagttgcctaattcagtgacattaataaatttattaatttcttctttcaataaaacctggagagagcttcatatgtatcagcatatgctaaacttgaaagatacaagtagaaaatggaaggaaatatatctgactcaatagggatagttcaagggttaaattaaaagtagtaaagtattataattaatctgacatggtacctaatatataataatcatgtattaagaatgccagtcaccattaaaagtcaatgtatgactttaatctactcgaggaaagaaactatgtcttgttcactgttattatctctaaaatccataatcagaagagcaccatgtgtatgagccacacaataaatatctactgtataatatgtctcttcttgtttttaaccttcatagataagactctattgaattgggacattagtccagcaagccattctgtctctgtctcttctatggagggaaaggtttaaccatcaaagactaggtgcatctcccaaacaacctgaatttaatattcaaatatgtatctaaattcatttgttacatttttgtgttcagcttacatattactttttgagcgacatctattcaaggcctactacttgctgctctacaaaatattgccatgctctatttgcccattaactatttcttaaccttcaagggacatgctcagttctgatataccaagatttggtatttaccctcccagcctacatacttccaatcttaagagaacaatttttagactacattcaaatatagacctctccaccccatcaactattttatctctcctctcctatctttcttgacaaagagtgattagaaatatgcaattctaggtatcgatgctacgtagataagtagcatggcgggttaatcattaactacagaggaacccctagtgatggagttggccactccctctctgcgcgctcgctcgctcactgaggccgggcgaccaaaggtcgcccgacgcccgggctttgcccgggcggcctcagtgagcgagcgagcgcgcagctgcctgcagg

SEQ ID NO: 2322 - protein, 735 aa, Artificial Sequence
  Description of Artificial Sequence: Synthetic polypeptide
MAADGYLPDWLEDTLSEGIRQWWKLKPGPPPPKPAERHKDDSRGLVLPGYKYLGPFNGLDKGEPVNEADAAALEHDKAYDRQLDSGDNPYLKYNHADAEFQERLKEDTSFGGNLARAVFQAKKRVLEPLGLVEEPVKTAPGKKRPVEHSPAEPDSSSGTGKSGQQPARKRLNFGQTGDADSVPDPQPLGQPPAAPSGLGTNTMASGSGAPMADNNEGADGVGNSSGNWHCDSTWMGDRVITTSTRTWALPTYNNHLYKQISSQSGASNDNHYFGYSTPWGYFDFNRFHCHFSPRDWQRLINNNWGFRPKRLNFKLFNIQVKEVTQNDGTTTIANNLTSTVQVFTDSEYQLPYVLGSAHQGCLPPFPADVFMVPQYGYLTLNNGSQAVGRSSFYCLEYFPSQMLRTGNNFTFSYTFEDVPFHSSYAHSQSLDRLMNPLIDQYLYYLSRTNTPSGTTTQSRLQFSQAGASDIRDQSRNWLPRPCYRQQRVSKTAADNNNSDYSWTGATKYHLNGRDSLVNPGTAMASHKDDEEKYFPQSGVLIFGKQDSGKTNVDIEKVMITDEEEIRTTNPVATEQYGSVSTNLQSGNTQAATSDVNTQGVLPGMVRQDRDVYLQGPIWAKIPHTDGHFHPSPLMGGFGLKHPPPQILIKNTPVPANPSTTFSAAKFASFITQYSTGQVSVEIEWEPQKENSKRWNPEIQYTSNYNKSVNVDFTVDTNGVYSEPRPIGTRYLTRNL

SEQ ID NO: 2323 - protein, 735 aa, Artificial Sequence
  Description of Artificial Sequence: Synthetic polypeptide
MAADGYLPDWLEDTLSEGIRQWWKLKPGPPPPKPAERHKDDSRGLVLPGYKYLGPFNGLDKGEPVNEADAAALEHDKAYDRQLDSGDNPYLKYNHADAEFQERLKEDTSFGGNLARAVFQAKKRVLEPLGLVEEPVKTAPGKKRPVEHSPAEPDSSSGTGKSGQQPARKRLNFGQTGDADSVPDPQPLGQPPAAPSGLGTNTMASGSGAPMADNNEGADGVGNSSGNWHCDSTWMGDRVITTSTRTWALPTYNNHLYKQISSQSGASNDNHYFGYSTPWGYFDFNGFHCHFSPRDWQRLINNNWGFRPKRLNFKLFNIQVKEVTQNDGTTTIANNLTSTVQVFTDSEYQLPYVLGSAHQGCLPPFPADVFMVPQYGYLTLNNGSQAVGRSSFYCLEYFPSQMLRTGNNFTFSYTFEDVPFHSSYAHSQSLDRLMNPLIDQYLYYLSRTNTPSGTTTQSRLQFSQAGASDIRDQSRNWLPGPCYRQQRVSKTAADNNNSDYSWTGATKYHLNGRDSLVNPGTAMASHKDDEEKYFPQSGVLIFGKQDSGKTNVDIEKVMITDEEEIRTTNPVATEQYGSVSTNLQSGDTQAATSDVNTQGVLPGMARQDRDVYLQGPIWAKIPHTDGHFHPSPLMGGFGLKHPPPQILIKNTPVPANPSTTFSAAKFASFITQYSTGQVSVEIEWEPQKENSKRWNPEIQYTSNYNKSVNVDFTVDTNGVYSEPRPIGTRYLTRNL

SEQ ID NO: 2324 - protein, 735 aa, Artificial Sequence
  Description of Artificial Sequence: Synthetic polypeptide
MAADGYLPDWLEDTLSEGIRQWWKLKPGPPPPKPAERHKDDSRGLVLPGYKYLGPFNGLDKGEPVNEADAAALEHDKAYDRQLDSGDNPYLKYNRADAEFQERLKEDTSFGGNLARAVFQAKKRVLEPLGLVEEPVKTAPGKKRPVEHSPAEPDSSSGTGKSGQQPARKRLNFGQTGDADSVPDPQPLGQPPAAPSGLGTNTMASGSGAPMADNNEGADGVGNSSGNWHCDSTWMGDRVITTSTRTWALPTYNNHLYKQISSQSGASNDNHYFGYSTPWGYFDFNRFHCHFSPRDWQRLINNNWGFRPKRLNFKLFNIQVKEVTQNDGTTTIANNLTSTVQVFTDSEYQLPYVLGSAHQGCLPPFPADVFMVPQYGYLTLNNGSQAVGRSSFYCLEYFPSQMLRTGNNFTFSYTFEDVPFHSSYAHSQSLDRLMNPLIDQYLYYLSRTNTPSGTTTQSRLQFSQAGASDIRDQSRNWLPGPCYRQQRVSKTAADNNNSDYSWTGATKYHLNGRDSLVNPGTAMASHKDDEEKYFPQSGVLIFGKQDSGKTNVDIEKVMITDEEEIRTTNPVATEQYGSVSTNLQSGNTQAATSDVNTQGVLPGMVRQDRDVYLQGPIWAKIPHTDGHFHPSPLMGGFGLKHPPPQILIKNTPVPANPSTTFSAAKFASFITQYSTGQVSVEIEWEPQKENSKRWNPEIQYTSNYNKSVNVDFTVDTNGVYSEPRPIGTRYLTRNL

SEQ ID NO: 2325 - protein, 735 aa, Artificial Sequence
  Description of Artificial Sequence: Synthetic polypeptide
MAADGYLPDWLEDTLSEGIRQWWKLKPGPPPPKPAERHKDDSRGLVLPGYKYLGPFNGLDKGEPVNEADAAALEHDKAYDRQLDSGDNPYLKYNHADAEFQERLKEDTSFGGNLARAVFQAKKRVLEPLGLVEEPVKTAPGKKRPVEHSPAEPDSSSGTGKSGQQPARKRLNFGQTGDADSVPDPQPLGQPPAAPSGLGTNTMASGSGAPMADNNEGADGVGNSSGNWHCDSTWMGDRVITTSTRTWALPTYNNHLYKQISSQSGASNDNHYFGYSTPWGYFDFNRFHCHFSPRDWQRLINNNWGFRPKRLNFKLFNIQVKEVTQNDGTTTIANNLTSTVQVFTDSEYQLPYVLGSAHQGCLPPFPADVFMVPQYGYLTLNNGSQAVGRSSFYCLEYFPSQMLRTGNNFTFSYTFEDVPFHSSYAHSQSLDRLMNPLIDQYLYYLSRTNTPSGTTTQSRLQFSQAGASDIRDQSRNWLPGPCYRQQRVSKTAADNNNSDYSWTGATKYHLNGRDSLVNPGTAMASHKDDEEKYFPQSGVLIFGKQDSGKTNVDIEKVMITDEEEVRTTNPVATEQYGSVSTNLQSGNTQAATSDVNTQGVLPGMVRQDRDVYLQGPIWAKIPHTDGHFHPSPLMGGFGLKHPPPQILIKNTPVPANPSTTFSAAKFASFITQYSTGQVSVEIEWEPQKENSKRWNPEIQYTSNYNKSVNVDFTVDTNGVYSEPRPIGTRYLTRNL

SEQ ID NO: 2326 - protein, 735 aa, Artificial Sequence
  Description of Artificial Sequence: Synthetic polypeptide
MAADGYLPDWLEDTLSEGIRQWWKLKPGPPPPKPAERHKDDSRGLVLPGYKYLGPFNGLDKGEPVNEADAAALEHDKAYDRQLDSGDNPYLKYNHADAEFQERLKEDTSFGGNLARAVFQAKKRVLEPLGLVEEPVKTAPGKKRPVEHSPAGPDSSSGTGKSGQQPARKRLNFGQTGDADSVPDPQPLGQPPAAPSGLGTNTMASGSGAPMADNNEGADGVGNSSGNWHCDSTWMGDRVITTSTRTWALPTYNNHLYKQISSQSGASNDNHYFGYSTPWGYFDFNRFHCHFSPRDWQRLINNNWGFRPKRLNFELFNIQVKEVTQNDGTTTIANNLTSTVQVFTDSEYQLPYVLGSAHQGCLPPFPADVFMVPQYGYLTLNNGSQAVGRSSFYCLEYFPSQMLRTGNNFTFSYTFEDVPFHSSYAHSQSLDRLMNPLIDQYLYYLSRTNTPSGTTTQSRLQFSQAGASDIRDQSRNWLPGPCYRQQRVSKTAADNNNSDYSWTGATKYHLNGRDSLVNPGTAMASHKDDEEKYFPQSGVLIFGKQDSGKTNVDIEKVMITDEEEIRTTNPVATEQYGSVSTNLQSGNTQAATSDVNTQGVLPGMVWQDRDVYLQGPIWAKIPHTDGHFHPSPLMGGFGLKHPPPQILIKSTPVPANPSTTFSAAKFASFITQYSTGQVSVEIEWELQKENSKRWNPEIQYTSNYNKSVNVDFTVDTNGVYSEPRPIGTRYLTRNL

SEQ ID NO: 2327 - protein, 735 aa, Artificial Sequence
  Description of Artificial Sequence: Synthetic polypeptide
MAADGYLPDWLEDTLSEGIRQWWKLKPGPPPPKPAERHKDDSRGLVLPGYKYLGPFNGLDKGEPVNEADAAALEHDKAYDRQLDSGDNPYLKYNHADAEFQERLKEDTSFGGNLARAVFQAKKRVLEPLGLVEEPVKTAPGKKRPVEHSPAGPDSSSGTGKSGQQPARKRLNFGQTGDADSVPDPQPLGQPPAAPSGLGTNTMASGSGAPMADNNEGADGVGNSSGNWHCDSTWMGDRVITTSTRTWALPTYNNHLYKQISSQSGASNDNHYFGYSTPWGYFDFNRFHCYFSPRDWQRLINNNWGFRPKRLNFELFNIQVKEVTQNDGTTTIANNLTSTVQVFTDSEYQLPYVLGSAHQGCLPPFPADVFMVPQYGYLTLNNGSQAVGRSSFYCLEYFPSQMLRTGNNFTFSYTFEDVPFHSSYAHSQSLDRLMNPLIDQYLYYLSRTNTPSGTTTQSRLQFSQAGASDIRDQSRNWLPGPCYRQQRVSKTAADNNNSDYSWTGATKYHLNGRDSLVNPGTAMASHKDDEEKYFPQSGVLIFGKQDSGKTNVDIEKVMITDEEEIRTTNPVATEQYGSVSTNLQSGNTQAATSDVNTQGVLPGMVWQDRDVYLQGPIWAKIPHTDGHFHPSPLMGGFGLKHPPPQILIKSTPVPANPSTTFSAAKFASFITQYSTGQVSVEIEWELQKENSKRWNPEIQYTSNYNKSVNVDFTVDTNGVYSEPRPIGTRYLTRNL

SEQ ID NO: 2328 - protein, 734 aa, Artificial Sequence
  Description of Artificial Sequence: Synthetic polypeptide
MAADGYLPDWLEDTLSEGIRQWWKLKPGPPPPKPAERHKDDSRGLVLPGYKYLGPFNGLDKGEPVNEADAAALEHDKAYDRQLDSGDNPYLKYNHADAEFQERLKEDTSFGGNLARAVFQAKKRVLEPLGLVEEPVKTAPGKKRPVEHSPAEPDSSSGTGKSGQQPARKRLNFGQTGDADSVPDPQPLGQPPAAPSGLGTNTMASGSGAPMADNNEGADGVGNSSGNWHCDSTWMGDRVITTSTRTWALPTYNNHLYKQISSQSGASNDNHYFGYSTPWGYFDFNRFHCHFSPRDWQRLINNNWGFRPKRLNFKLFNIQVKEVTQNDGTTTIANNLTSTVQVFTDSEYQLPYVLGSAHQGCLPPFPADVFMVPQYGYLTLNNGSQAVGRSSFYCLEYFPSQMLRTGNNFTFSYTFEDVPFHSSYAHSQSLDRLMNPLIDQYLYYLSRTNTPSGTTTQSRLQFSQAGASDIRDQSRNWLPGPCYRQQRVSKTAADNNSDYSWTGATKYHLNGRDSLVNPGTAMASHKDDEEKYFPQSGVLIFGKQDSGKTNVDIEKVMITDEEEIRTTNPVATEQYGSVSTNLQSGNTQAATSDVNTQGVLPGMVRQDRDVYLQGPIWAKIPHTDGHFHPSPLMGGFGLKHPPPQILIKNTPVPANPSTTFSAAKFASFITQYSTGQVSVEIEWEPQKENSKRWNPEIQYTSNYNKSVNVDFTVDTNGVYSEPRPIGTRYLTRNL

SEQ ID NO: 2329 - protein, 735 aa, Artificial Sequence
  Description of Artificial Sequence: Synthetic polypeptide
MAADGYLPDWLEDTLSEGIRQWWKLKPGPPPPKPAERHKDDSRGLVLPGYKCLGPFNGLDKGEPVNEADAAALEHDKAYDRQLDSGDNPYLKYNHADAEFQERLKEDTSFGGNLARAVFQAKKRVLEPLGLVEEPVKTAPGKKRPVEHSPAESDSSSGTGKSGQQPARKRLNFGQTGDADSVPDPQPLGQPPAAPSGLGTNTMASGSGAPMADNNEGADGVGNSSGNWHCDSTWMGDRVITTSTRTWALPTYNNHLYKQISSQSGASNDNHYFGYSTPWGYFDFNRFHCHFSPRDWQRLINNNWGFRPKRLNFKLFNIQVKEVTQNDGTTTIANNLTSTVQVFTDSEYQLPYVLGSAHQGCLPPFPADVFMVPQYGYLTLNNGSQAVGRSSFYCLEYFPSQMLRTGNNFTFSYTFEDVPFHSSYAHSQSLDRLMNPLIDQYLYYLSRTNTPSGTTTQSRLQFSQAGASDIRDQSRNWLPGPCYRQQRVSKTAADNNNSDYSWTGATKYHLNGRDSLVNPGTAMASHKDDEEKYFPQSGVLIFGKQDSGKTNVDIEKVMITDEEEIRTTNPVATEQYGSVSTNLQSGNTQAATSDVNTQGVLPGMVWQDRDVYLQGPIWAKIPHTDGHFHPSPLMGGFGLKHPPPQILIKNTPVPANPSTTFSAAKFASFITQYSTGQVSVEIEWELQKENSKRWNPEIQYTSNYNKSVNVDFTVDTNGVYSEPRPIGTRYLTRNL

SEQ ID NO: 2330 - protein, 735 aa, Artificial Sequence
  Description of Artificial Sequence: Synthetic polypeptide
MAADGYLPDWLEDILSEGIRQWWKLKPGPPPPKPAERHKDDSRGLVLPGYKYLGPFNGLDKGEPVNEADAAALEHDKAYDRQLDSGDNPYLKYNHADAEFQERLKEDTSFGGNLGRAVFQAKKRVLEPLGLVEEPVKTAPGKKRPVEQSPAEPDSSSGTGKAGNQPARKRLNFGQTGDADSVPDPQPLGQPPAAPSGLGTNTMASGSGAPMADNNEGADGVGNSSGNWHCDSTWMGDRVITTSTRTWALPTYNNHLYKQISSQSGASNDNHYFGYSTPWGYFDFNRFHCHFSPRDWQRLINNNWGFRPKRLNFKLFNIQVKEVTQNDGTTTIANNLTSTVQVFTDSEYQLPYVLGSAHQGCLPPFPADVFMVPQYGYLTLNNGSQAVGRSSFYCLEYFPSQMLRTGNNFTFSYTFEDVPFHSSYAHSQSLDRLMNPLIDQYLYYLSRTNTPSGTTTQSRLQFSQAGASDIRDQSRNWLPGPCYRQQRVSKTAADNNNSDYSWTGATKYHLNGRDSLVNPGTAMASHKDDEEKYFPQSGVLIFGKQDSGKTNVDIEKVMITDEEEIRTTNPVATEQYGSVSTNLQSGNTQAATSDVNTQGVLPGMVRQDRDVYLQGPIWAKIPHTDGHFHPSPLMGGFGLKHPPPQILIKNTPVPANPSTTFSAAKFASFITQYSTGQVSVEIEWEPQKENSKRWNPEIQYTSNYNKSVNVDFTVDTNGVYSEPRPIGTRYLTRNL

SEQ ID NO: 2331 - protein, 735 aa, Artificial Sequence
  Description of Artificial Sequence: Synthetic polypeptide
MAADGYLPDWLEDTLSEGIRQWWKLKPGPPPPKPAERHKDDSRGLVLPGYKYLGPFNGLDKGEPVNEADAAALEHDKAYDRQLDSGDNPYLKYNHADAEFQERLKEDTSFGGNLARAVFQAKKRVLEPLGLVEEPVKTAPGKKRPVEHSPAEPDSSSGTGKSGQQPARKRLNFGQTGDADSVPDPQPLGQPPAAPSGLGTNTMASGSGAPMADNNEGADGVGNSSGNWHCDSTWMGDRVITTSTRTWALPTYNNHLYKQISSQSGASNDNHYFGYSTPWGYFDFNRFHCHFSPRDWQRLINNNWGFRPKRLNFKLFNIQVKEVTQNDGTTTIANNLTSTVQVFTDSEYQLPYVLGSAHQGCLPPFPADVFMVPQYGYLTLNNGSQAVGRSSFYCLEYFPSQMLRTGNNFTFSYTFEDVPFHSSYAHSQSLDRLMNPLIDQYLYYLSRTNTPSGTTTQSRLQFSQAGASDIRDQSRNWLPGPCYRQQRVSKTAADNNNSDYSWTGATKYHLNGRDSLVNPGTAMASHKDDEEKYFPQSGVLIFGKQDSGKTNVDIEKVMITDEEEIRTTNPVATEQYGSVSTNLQSGNTQAATSDVNTQGVLPGMVRQDRDVYLQGPIWAKIPHTDGHFHPSPLMGGFGLKHPPPQILIKNTPVPANPSTTFSAAKFASFITQYSTGQVSVEIEWEPQKENSKRWNPEIQYTSNYNKSVNVDFTVDTNGVYSEPRPIGTRCLTRNL

SEQ ID NO: 2332 - protein, 735 aa, Artificial Sequence
  Description of Artificial Sequence: Synthetic polypeptide
MAADGYLPDWLEDTLSEGIRQWWKLKPGPPPPKPAERHKDDSRGLVLPGYKYLGPFNGLDKGEPVNEADAAALEHDKAYDRQLDSGDNPYLKYNHADAEFQERLKEDTSFGGNLARAVFQAKKRVLEPLGLVEEPVKTAPGKKRPVEHSPAEPDSSSGTGKSGQQPARKRLNFGQTGDADSVPDPQPLGQPPAAPSGLGTNTMASGSGAPMADNNEGADGVGNSSGNWHCDSTWMGDRVITTSTRTWALPTYNNHLYKQISSQSGASNDNHYFGYSTPWGYFDFNRFHCHFSPRDWQRLINNNWGFRPKRLNFKLFNIQVKEVTQNDGTTTIANNLTSTVQVFTDSEYQLPYVLGSAHQGCLPPFPADVFMVPQYGYLTLNNGSQAVGRSSFYCLEYFPSQMLRTGNNFTFSYTFEDVPFHSSYAHSQSLDRLMNPLIDQYLYYLSRTNTPSGTTTQSRLQFSQAGASDIRDQSRNWLPGPCYRQQRVSKTAADNNNSDYSWTGATKYHLNGRDSLVNPGTAMASHKDDEEKYFPQSGVLIFGKQDSGKTNVDIEKVMITDEEEIRTTNPVATEQYGSVSTNLQSGNTQAATSDVNTQGVLPGMVRQGRDVYLQGPIWAKIPHTDGHFHPSPLMGGFGLKHPPPQILIKNTPVPANPSTTFSAAKFASFITQYSTGQVSVEIEWEPQKENSKRWNPEIQYTSNYNKSVNVDFTVDTNGVYSEPRPIGTRYLTRNL

SEQ ID NO: 2333 - protein, 735 aa, Artificial Sequence
  Description of Artificial Sequence: Synthetic polypeptide
MAADGYLPDWLEDTLSEGIRQWWKLKPGPPPPKPAERHKDDSRGLVLPGYKYLGPFNGLDKGEPVNEADAAALEHDKAYDRQLDSGDNPYLKYNHADAEFQERLKEDTSFGGNLARAVFQAKKRVLEPLGLVEEPVKTAPGKKRPVEHSPAEPDSSSGTGKSGQQPARKRLNFGQTGDADSVPDPQPLGQPPAAPSGLGTNTMASGSGAPMADNNEGADGVGNSSGNWHCDSTWMGDRVITTSTRTWALPTYNNHLYKQISSQSGASNDNHYFGYSTPWGYFDFNRFHCHFSPRDWQRLINNNWGFRPKRLNFKLFNIQVKEVTQNDGTTTIANNLTSTVQVFTDSEYQLPYVLGSAHQGCLPPFPADVFMVPQYGYLTLNNGSQAVGRSSFYCLEYFPSQMLRTGNNFTFSYTFEDVPFHSSYAHSQSLDRLMNPLIDQYLYYLSRTNTPSGTTTQSRLQFSQAGASDIRDQSRNWLPGPCYRQQRVSKTAADNNNSDYSWTGATKYHLNGRDSLVNPGTAMASHKDDEEKYFPQSGVLIFGKQDSGKTNVDIEKVMITDEGEIRTTNPVATEQYGSVSTNLQSGNTQAATSDVNTQGVLPGMVRQDRDVYLQGPIWAKIPHTDGHFHPSPLMGGFGLKHPPPQILIKNTPVPANPSTTFSAAKFASFITQYSTGQVSVEIEWEPQKENSKRWNPEIQYTSNYNKSVNVDFTVDTNGVYSEPRPIGTRYLTRNL

SEQ ID NO: 2334 - protein, 735 aa, Artificial Sequence
  Description of Artificial Sequence: Synthetic polypeptide
MAADGYLPDWLEDTLSEGIRQWWKLKPGPPPPKPAERHKDDSRGLVLPGYKYLGPFNGLDKGEPVNEADAAALEHDKAYDRQLDSGDNPYLKYNHADAEFQERLKEDTSFGGNLARAVFQAKKRVLEPLGLVEEPVKTAPGKKRPVEHSPAEPDSSSGTGKSGQQPARKRLNFGQTGDADSVPDPQPLGQPPAAPSGLGTNTMASGSGAPMADNNEGADGVGNSSGNWHCDSTWMGDRVITTSTRTWALPTYNNHLYKQISSQSGASNDNHYFGYSTPWGYFDFNRFHCHFSPRDWQRLINNNWGFRPKRLNFELFNIQVKEVTQNDGTTTIANNLTSTVQVFTDSEYQLPYVLGSAHQGCLPPFPADVFMVPQYGYLTLNNGSQAVGRSSFYCLEYFPSQMLRTGNNFTFSYTFEDVPFHSSYAHSQSLDRLMNPLIDQYLYYLSRTNTPSGTTTQSRLQFSQAGASDIRDQSRNWLPGPCYRQQRVSKTAADNNNSDYSWTGATKYHLNGRDSLVNPGTAMASHKDDEEKYFPQSGVLIFGKQDSGKTNVDIEKVMITDEEEIRTTNPVATEQYGSVSTNLQSGNTQAATSDVNTQGVLPGMVWQDRDVYLQGPIWAKIPHTDGHFHPSPLMGGFGLKHPPPQILIKSTPVPANPSTTFSAAKFASFITQYSTGQVSVEIEWELQKENSKRWNPEIQYTSNYNKSVNVDFTVDTNGVYSEPRPIGTRYLTRNL

SEQ ID NO: 2335 - protein, 735 aa, Artificial Sequence
  Description of Artificial Sequence: Synthetic polypeptide
MAADGYLPDWLEDILSEGIRQWWKLKPGPPPPKPAERHKDDSRGLVLPGYKYLGPFNGLDKGEPVNEADAAALEHDKAYDRQLDSGDNPYLKYNHADAEFQERLKEDTSFGGNLGRAVFQAKKRVLEPLGLVEEPVKTAPGKKRPVEQSPAEPDSSSGTGKAGNQPARKRLNFGQTGDADSVPDPQPLGQPPAAPSGLGSTTMATGSGAPMADNNEGADGVGNSSGNWHCDSTWMGDRVITTSTRTWALPTYNNHLYKQISSQSGASNDNHYFGYSTPWGYFDFNRFHCHFSPRDWQRLINNNWGFRPKRLNFKLFNIQVKEVTQNDGTTTIANNLTSTVQVFTDSEYQLPYVLGSAHQGCLPPFPADVFMVPQYGYLTLNNGSQAVGRSSFYCLEYFPSQMLRTGNNFTFSYTFEDVPFHSSYAHSQSLDRLMNPLIDQYLYYLSRTNTPSGTTTQSRLQFSQAGASDIRDQSRNWLPGPCYRQQRVSKTAADNNNSDYSWTGATKYHLNGRDSLVNPGTAMASHKDDEEKYFPQSGVLIFGKQDSGKTNVDIEKVMITDEEEIRTTNPVATEQYGSVSTNLQSGNTQAATSDVNTQGVLPGMVRQDRDVYLQGPIWAKIPHTDGHFHPSPLMGGFGLKHPPPQILIKNTPVPANPSTTFSAAKFASFITQYSTGQVSVEIEWEPQKENSKRWNPEIQYTSNYNKSVNVDFTVDTNGVYSEPRPIGTRYLTRNL

SEQ ID NO: 2336 - protein, 735 aa, Artificial Sequence
  Description of Artificial Sequence: Synthetic polypeptide
MAADGYLPDWLEDTLSEGIRQWWKLKPGPPPPKPAERHKDDSRGLVLPGYKYLGPFNGLDKGEPVNEADAAALEHDKAYDRQLDSGDNPYLKYNHADAEFQERLKEDTSFGGNLARAVFQAKKRVLEPLGLVEEPVKTAPGKKRPVEHSPAEPDSSSGTGKSGQQPARKRLNFGQTGDADSVPDPQPLGQPPAAPSGLGTNTMASGSGAPMADNNEGADGVGNSSGNWHCDSTWMGDRVITTSTRTWALPTYNNHLYKQISSQSGASNDNHYFGYSTPWGYFDFNRFHCHFSPRDWQRLINNNWGFRPKRLNFKLFNIQVKEVTQNDGTTTIANNLTSTVQVFTDSEYQLPYVLGSAHQGCLPPFPADVFMVPQYGYLTLNNGSQAVGRSSFYCLEYFPSQMLRTGNNFTFSYTFEDVPFHSSYAHSQSLDRLMNPLIDQYLYYLSRTNTPSGTTTQSRLQFSQAGASDIRDQSRNWLPGPCYRQQRVSKTAADNNNSDYSWTGATKYHLNGRDSLVNPGTAMASHKDDEEKYFPQSGVLIFGKQDSGKTNVDIEKVMITDEEEIRTTNPVATEQYGSVSTNLQSGNTQAATSDVNTQGVLPGMVRQDRDVYLQGPIWAKIPHTDGHFHPSPLMGGFGLKHPPPQILIKNTPVPANPSTTFSAAKFASFITQYSTGQVSVEIEWEPQKENSKRWNPEIQYTSNYNKSVNVDFTVDTNGVYSEPRPIGTRYLTRNL

SEQ ID NO: 2337 - protein, 735 aa, Artificial Sequence
  Description of Artificial Sequence: Synthetic polypeptide
MAADGYLPDWLEDTLSEGIRQWWKLKPGPPPPKPAERHKDDSRGLVLPGYKYLGPFNGLDKGEPVNEADAAALEHDKAYDRQLDSGDNPYLKYNHADAEFQERLKEDTSFGGNLARAVFQAKKRVLEPLGLVEEPVKTAPGKKRPVEHSPAEPDSSSGTGKSGQQPARKRLNFGQTGDADSVPDPQPLGQPPAAPSGLGTNTMASGSGAPMADNNEGADGVGNSSGNWHCDSTWMGDRVITTSTRTWALPTYNNHLYKQISSQSGASNDNHYFGYSTPWGYFDFNRFHCHFSPRDWQRLINNNWGFRPKRLNFKLFNIQVKEVTQNDGTTTIANNLTSTVQVFTDSEYQLPYVLGSAHQGCLPPFPADVFMVPQYGYLTQNNGSQAVGRSSFYCLEYFPSQMLRTGNNFTFSYTFEDVPFHSSYAHSQSLDRLMNPLIDQYLYYLSRTNTPSGTTTQSRLQFSQAGASDIRDQSRNWLPGPCYRQQRVSKTAADNNNSDYSWTGATKYHLNGRDSLVNPGTAMASHKDDEEKYFPQSGVLIFGKQDSGKTNVDIEKVMITDEEEIRTTNPVATEQYGSVSTNLQSGNTQAATSDVNTQGVLPGMVRQDRDVYLQGPIWAKIPHTDGHFHPSPLMGGFGLKHPPPQILIKNTPVPANPSTTFSAAKFASFITQYSTGQVSVEIEWEPQKENSKRWNPEIQYTSNYNKSVNVDFTVDTNGVYSEPRPIGTRYLTRNL

SEQ ID NO: 2338 - protein, 735 aa, Artificial Sequence
  Description of Artificial Sequence: Synthetic polypeptide
MAADGYLPDWLEDTLSEGIRQWWKLKPGPPPPKPAERHKDDSRGLVLPGYKYLGPFNGLDKGEPVNEADAAALEHDKAYDRQLDSGDNPYLKYNRADAEFQERLKEDTSFGGNLARAVFQAKKRVLEPLGLVEEPVKTAPGKKRPVEHSPAGPDSSSGTGKSGQQPARKRLNFGQTGDADSVPDPQPLGQPPAAPSGLGTNTMASGSGAPMADNNEGADGVGNSSGNWHCDSTWMGDRVITTSTRTWALPTYNNHLYKQISSQSGASNDNHYFGYSTPWGYFDFNRFHCHFSPRDWQRLINNNWGFRPKRLNFELFNIQVKEVTQNDGTTTIANNLTSTVQVFTDSEYQLPYVLGSAHQGCLPPFPADVFMVPQYGYPTLNNGSQAVGRSSFYCLEYFPSQMLRTGNNFTFSYTFEDVPFHSSYAHSQSLDRLMNPLIDQYLYYLSRTNTPSGTTTQSRLQFSQAGASDIRDQSRNWLPGPCYRQQRVSKTAADNNNSDYSWTGATKYHLNGRDSLVNPGTAMASHKDDEEKYFPQSGVLIFGKQDSGKTNVDIEKVMITDEEEIRTTNPVATEQYGSVSTNLQSGNTQAATSDVNTQGVLPGMVWQDRDVYLQGPIWAKIPHTDGHFHPSPLMGGFGLKHPPPQILIKSTPVPANPSTTFSAAKFASFITQYSTGQVSVEIEWELQKENSKRWNPEIQYTSNYNKSVNVDFTVDTNGVYSEPRPIGTRYLTRNL

SEQ ID NO: 2339 - protein, 735 aa, Artificial Sequence
  Description of Artificial Sequence: Synthetic polypeptide
MAADGYLPDWLEDTLSEGIRQWWKLKPGPPPPKPAERHKDDSRGLVLPGYKYLGPFNGLDKGEPVNEADAAALEHDKAYDRQLDSGDNPYLKYNHADAEFQERLKEDTSFGGNLARAVFQAKKRVLEPLGLVEEPVKTAPGKKRPVEHSPAEPDSSSGTGKSGQQPARKRLNFGQTGDADSVPDPQPLGQPPAAPSGLGTNTMASGSGAPMADNNEGADGVGNSSGNWHCDSTWMGDRVITTSTRTWALPTYNNHLYKQISSQSGASNDNHYFGYSTPWGYFDFNGFHCHFSPRDWQRLINNNWGFRPKRLNFKLFNIQVKEVTQNDGTTTIANNLTSTVQVFTDSEYQLPYVLGSAHQGCLPPFPADVFMVPQYGYLTLNNGSQAVGRSSFYCLEYFPSQMLRTGNNFTFSYTFEDVPFHSSYAHSQSLDRLMNPLIDQYLYYLSRTNTPSGTTTQSRLQFSQAGASDIRDQSRNWLPGPCYRQQRVSKTAADNNNSDYSWTGATKYHLNGRDSLVNPGTAMASHKDDEEKYFPQSGVLIFGKQDSGKTNVDIEKVMITDEEEIRTTNPVATEQYGSVSTNLQSGNTQAATSDVNTQGVLPGMVRQDRDVYLQGPIWAKIPHTDGHFHPSPLMGGFGLKHPPPQILIKNTPVPANPSTTFSAAKFASFITQYSTGQVSVEIEWEPQKENSKRWNPEIQYTSNYNKSVNVDFTVDTNGVYSEPRPIGTRYLTRNL

SEQ ID NO: 2340 - protein, 735 aa, Artificial Sequence
  Description of Artificial Sequence: Synthetic polypeptide
MAADGYLPDWLEDTLSEGIRQWWKLKPGPPPPKPAERHKDDSRGLVLPGYKYLGPFNGLDKGEPVNEADAAALEHDKAYDRQLDSGDNPYLKYNHADAEFQERLKEDTSFGGNLARAVFQAKKRVLEPPGLVEEPVKTAPGKKRPVEHSPAEPDSSSGTGKSGQQPARKRLNFGQTGDADSVPDPQPLGQPPAAPSGLGTNTMASGSGAPMADNNEGADGVGNSSGNWHCDSTWMGDRVITTSTRTWALPTYNNHLYKQISSQSGASNDNHYFGYSTPWGYFDFNRFHCHFSPRDWQRLINNNWGFRPKRLNFKLFNIQVKEVTQNDGTTTIANNLTSTVQVFTDSEYQLPYVLGSAHQGCLPPFPADVFMVPQYGYLTLNNGSQAVGRSSFYCLEYFPSQMLRTGNNFTFSYTFEDVPFHSSYAHSQSLDRLMNPLIDQYLYYLSRTNTPSGTTTQSRLQFSQAGASDIRDQSRNWLPGPCYRQQRVSKTAADNNNSDYSWTGATKYHLNGRDSLVNPGTAMASHKDDEEKYFPQSGVLIFGKQDSGKTNVDIEKVMITDEGEIRTTNPVATEQYGSVSTNLQSGNTQAATSDVNTQGVLPGMVRQDRDVYLQGPIWAKIPHTDGHFHPSPLMGGFGLKHPPPQILIKNTPVPANPSTTFSAAKFASFITQYSTGQVSVEIEWEPQKENSKRWNPEIQYTSNYSKSVNVDFTVDTNGVYSEPRPIGTRYLTRNL

SEQ ID NO: 2341 - protein, 735 aa, Artificial Sequence
  Description of Artificial Sequence: Synthetic polypeptide
MAADGYLPDWLEDILSEGIRQWWKLKPGPPPPKPAERHKDDSRGLVLPGYKYLGPFNGLDKGEPVNEADAAALEHDKAYDRQLDSGDNPYLKYNHADAEFQERLKEDTSFGGNLGRAVFQAKKRVLEPLGLVEEPVKTAPGKKRPVEQSPAEPDSSSGTGKAGNQPARKRLNFGQTGDADSVPDPQPLGQPPAAPSGLGSTTMATGSGAPMADNNEGADGVGNSSGNWHCDSQWLGDRVITTSTRTWALPTYNNHLYKQISSQSGASNDNHYFGYSTPWGYFDFNRFHCHFSPRDWQRLINNNWGFRPKRLNFKLFNIQVKEVTQNDGTTTIANNLTSTVQVFTDSEYQLPYVLGSAHQGCLPPFPADVFMVPQYGYLTLNNGSQAVGRSSFYCLEYFPSQMLRTGNNFTFSYTFEDVPFHSSYAHSQSLDRLMNPLIDQYLYYLSRTNTPSGTTTQSRLQFSQAGASDIRDQSRNWLPGPCYRQQRVSKTAADNNNSDYSWTGATKYHLNGRDSLVNPGTAMASHKDDEEKYFPQSGVLIFGKQDSGKTNVDIEKVMITDEEEIRTTNPVATEQYGSVSTNLQSGNTQAATSDVNTQGVLPGMVRQDRDVYLQGPIWAKIPHTDGHFHPSPLMGGFGLKHPPPQILIKNTPVPANPSTTFSAAKFASFITQYSTGQVSVEIEWEPQKENSKRWNPEIQYTSNYNKSVNVDFTVDTNGVYSEPRPIGTRYLTRNL

SEQ ID NO: 2342 - protein, 735 aa, Artificial Sequence
  Description of Artificial Sequence: Synthetic polypeptide
MAADGYLPDWLEDTLSEGIRQWWKLKPGPPPPKPAERHKDDSRGLVLPGYKYLGPFNGLDKGEPVNEADAAALEHDKAYDRQLDSGDNPYLKYNHADAEFQERLKEDTSFGGNLARAVFQAKKRVLEPLGLVEEPVKTAPGKKRPVEHSPAEPDSSSGTGKSGQQPARKRLNFGQTGDADSVPDPQPLGQPPAAPSGLGTNTMASGSGAPMADNNEGADGVGNSSGNWHCDSTWMGDRVITTSTRTWALPTYNNHLYKQISSQSGASNDNHYFGYSTPWGYFDFNRFHCHFSPRDWQRLINNNWGFRPKRLNFKLFNIQVKEVTQNDGTTTIANNLTSTVQVFTDSEYQLPYVLGSAHQGCLPPFPADVFMVPQYGYLTLNNGSQAVGRSSFYCLEYFPSQMLRTGNNFTFSYTFEDVPFHSSYAHSQSLDRLMNPLIDQYLYYLSRTNTPSGTTTQSRLQFSQAGASDIRDQSRNWLPGPCYRQQRVSKTAADNNNSDYSWTGATKYHLNGRDSLVNPGTAMASHKDDEEKYFPQSGVLIFGKQDSGKTNVDIEKVMITDEEEIRTTNPVATEQYGSVSTNLQSGNTQAATSDVNTQGVLPGTVRQDRDVYLQGPIWAKIPHTDGHFHPSPLMGGFGLKHPPPQILIKNTPVPANPSTTFSAAKFASFITQYSTGQVSVEIEWEPQKENSKRWNPEIQYTSNYNKSVNVDFTVDTNGVYSEPRPIGTRYLTRNL

SEQ ID NO: 2343 - protein, 735 aa, Artificial Sequence
  Description of Artificial Sequence: Synthetic polypeptide
MAADGYLPDWLEDILSEGIRQWWKLKPGPPPPKPAERHKDDSRGLVLPGYKYLGPFNGLDKGEPVNEADAAALEHDKAYDRQLDSGDNPYLKYNHADAEFQERLKEDTSFGGNLGRAVFQAKKRVLEPLGLVEEPVKTAPGKKRPVEHSPAEPDSSSGTGKSGQQPARKRLNFGQTGDADSVPDPQPLGQPPAAPSGLGTNTMASGSGAPMADNNEGADGVGNSSGNWHCDSTWMGDRVITTSTRTWALPTYNNHLYKQISSQSGASNDNHYFGYSTPWGYFDFNRFHCHFSPRDWQRLINNNWGFRPKRLNFKLFNIQVKEVTQNDGTTTIANNLTSTVQVFTDSEYQLPYVLGSAHQGCLPPFPADVFMVPQYGYLTLNNGSQAVGRSSFYCLEYFPSQMLRTGNNFTFSYTFEDVPFHSSYAHSQSLDRLMNPLIDQYLYYLSRTNTPSGTTTQSRLQFSQAGASDIRDQSRNWLPGPCYRQQRVSKTAADNNNSDYSWTGATKYHLNGRDSLVNPGTAMASHKDDEEKYFPQSGVLIFGKQDSGKTNVDIEKVMITDEEEIRTTNPVATEQYGSVSTNLQSGNTQAATSDVNTQGVLPGMVRQDRDVYLQGPIWAKIPHTDGHFHPSPLMGGFGLKHPPPQILIKNTPVPANPSTTFSAAKFASFITQYSTGQVSVEIEWEPQKENSKRWNPEIQYTSNYNKSVNVDFTVDTNGVYSEPRPIGTRYLTRNL

SEQ ID NO: 2344 - protein, 735 aa, Artificial Sequence
  Description of Artificial Sequence: Synthetic polypeptide
MAADGYLPDWLEDTLSEGIRQWWKLKPGPPPPKPAERHKDDSRGLVLPGYKYLGPFNGLDKGEPVNEADAAALEHDKAYDRQLDSGDNPYLKYNHADAEFQERLKEDTSFGGNLARAVFQAKKRVLEPLGLVEEPVKTAPGKKRPVEHSPAESDSSSGTGKSGQQPARKRLNFGQTGDADSVPDPQPLGQPPAAPSGLGTNTMASGSGAPMADNNEGADGVGNSSGNWHCDSTWMGDRVITTSTRTWALPTYNNHLYKQISSQSGASNDNHYFGYSTPWGYFDFNRFHCHFSPRDWQRLINNNWGFRPKRLNFKLFNIQVKEVTQNDGTTTIANNLTSTVQVFTDSEYQLPYVLGSAHQGCLPPFPADVFMVPQYGYLTLNNGSQAVGRSSFYCLEYFPSQMLRTGNNFTFSYTFEDVPFHSSYAHSQSLDRLMNPLIDQYLYYLSRTNTPSGTTTQSRLQFSQAGASDIRDQSRNWLPGPCYRQQRVSKTAADNNNSDYSWTGATKYHLNGRDSLVNPGTAMASHKDDEEKYFPQSGVLIFGKQDSGKTNVDIEKVMITDEEEIRTTNPVATEQYGSVSTNLQSGNTQAATSDVNTQGVLPGMVWQDRDVYLQGPIWAKIPHTDGHFHPSPLMGGFGLKHPPPQILIKNTPVPANPSTTFSAAKFASFITQYSTGQVSVEIEWELQKENSKRWNPEIQYTSNYNKSVNVDFTVDTNGVYSEPRPIGTRYLTRNL

SEQ ID NO: 2345 - protein, 735 aa, Artificial Sequence
  Description of Artificial Sequence: Synthetic polypeptide
MAADGYLPDWLEDTLSEGIRQWWKLKPGPPPPKPAERHKDDSRGLVLPGYKYLGPFNGLDKGEPVNEADAAALEHDKAYDRQLDSGDNPYLKYNHADAEFQERLKEDTSFGGNLARAVFQAKKRVLEPLGLVEEPVKTAPGKKRPVEHSPAEPDSSSGTGKSGQQPARKRLNFGQTGDADSVPDPQPLGQPPAAPSGLGTNTMASGSGAPMADNNEGADGVGNSSGNWHCDSTWMGDRVITTSTRTWALPTYNNHLYKQISSQSGASNDNHYFGYSTPWGYFDFNRFHCHFSPRDWQRLINNNWGFRPKRLNFKLFNIQVKEVTQNDGTTTIANNLTSTVQVFTDSEYQLPYVLGSAHQGCLPPFPADVFMVPQYGYLTLNNGSQAVGRSSFYCLEYFPSQMLRTGNNFTFSYTFEDVPFHSSYAHSQSLDRLMNPLIDQYLYYLSRTNTPSGTTTQSRLQFSQAGASDIRDQSRNWLPGPCYRQQRVSKTAADNNNSDYSWTGATKYHLNGRDSLVNPGTAMASHKDDEEKYFPQSGVLIFRKQDSGKTNVDIEKVMITDEEEIRTTNPVATEQYGSVSTNLQSGNTQAATSDVNTQGVLPGMVRQDRDVYLQGPIWAKIPHTDGHFHPSPLMGGFGLKHPPPQILIKNTPVPANPSTTFSAAKFASFITQYSTGQVSVEIEWEPQKENSKRWNPEIQYTSNYNKSVNVDFTVDTNGVYSEPRPIGTRYLTRNL

SEQ ID NO: 2346 - protein, 735 aa, Artificial Sequence
  Description of Artificial Sequence: Synthetic polypeptide
MAADGYLPDWLEDTLSEGIRQWWKLKPGPPPPKPAERHQDDSRGLVLPGYKYLGPFNGLDKGEPVNEADAAALEHDKAYDRQLDSGDNPYLKYNHADAEFQERLKEDTSFGGNLGRAVFQAKKRVLEPLGLVEEPVKTAPGKKRPVEHSPAEPDSSSGTGKAGQQPARKRLNFGQTGDADSVPDPQPLGQPPAAPSGLGTNTTATGSGAPMADNNEGADGVGNSSGNWHCDSTWMGDRVITTSTRTWALPTYNNHLYKQISSQSGASNDNHYFGYSTPWGYFDFNRFHCHFSPRDWQRLINNNWGFRPKRLNFKLFNIQVKEVTQNDGTTTIANNLTSTVQVFADSEYQLPYVLGSAHQGCLPPFPADVFMVPQYGYLTLNNGSQAVGRSSFYCLEYFPSQMLRTGNNFTFSYTFEDVPFHSSYAHSQSLDRLMNPLIDQYLYYLSKTNAPSGTTTMSRLQFSQAGASDIRDQSRNWLPGPCYRQQRVSKTAADNNNSDYSWTGATKYHLNGRDSLVNPGPAMASHKDDEEKYFPQSGVLIFGKQDSGKTNVDIEKVMITDEEEIRTTNPVATEQYGSVSTNLQSGNTQAATTDVNTQGVLPGMVWQDRDVYLQGPIWAKIPHTDGHFHPSPLMGGFGLKHPPPQILIKNTPVPANPSTTFSAAKFASFITQYSTGQVSVEIEWELQKENSKRWNPEIQYTSNYNKSVNVDFTVDTNGVYSEPRPIGTRYLTRNL

SEQ ID NO: 2347 - protein, 735 aa, Artificial Sequence
  Description of Artificial Sequence: Synthetic polypeptide
MAADGYLPDWLEDTLSEGIRQWWKLKPGPPPPKPAERHQDDSRGLVLPGYKYLGPFNGLDKGEPVNEADAAALEHDKAYDRQLDSGDNPYLKYNHADAEFQERLKEDTSFGGNLGRAVFQAKKRVLEPLGLVEEPVKTAPGKKRPVEHSPAEPDSSSGTGKAGQQPARKRLNFGQTGDADSVPDPQPLGQPPAAPSGLGTNTMATGSGAPMADNNEGADGVGNSSGNWHCDSTWMGDRVITTSTRTWALPTYNNHLYKQISSQSGASNDNHYFGYSTPWGYFDFNRFHCHFSPRDWQRLINNNWGFRPKRLNFKLFNIQVKEVTQNDGTTTIANNLTSTVQVFTDSEYQLPYVLGSAHQGCLPPFPADVFMVPQYGYLTLNNGSQAVGRSSFYCLEYFPSQMLRTGNNFTFSYTFEDVPFHSSYAHSQSLDRLMNPLIDQYLYYLSKTNAPSGTTTMSRLQFSQAGASDIRDQSRNWLPGPCYRQQRVSKTAADNNNSDYSWTGATKYHPNGRDSLVNPGPAMASHKDDEEKYFPQSGVLIFGKQDSGKTNVDIEKVMITDEEEIRTTNPVATEQYGSVSTNLQSGNTQAATTDVNTQGVLPGMVWQDRDVYLHGPIWAKIPHTDGHFHPSPLMGGFGLKHPPPQILIKNTPVPANPSTTFSAAKFASFITQYSTGQVSVEIEWELQKENSKRWNPEIQYTSNYNKSVNVDFTVDTNGVYSEPRPIGTRYLTRNL

SEQ ID NO: 2348 - protein, 735 aa, Artificial Sequence
  Description of Artificial Sequence: Synthetic polypeptide
MAADGYLPDWLEDTLSEGIRQWWKLKPGPPPPKPAERHQDDSRGLVLPGYKYLGPFNGLDKGEPVNEADAAALEHDKAYDRQLDSGDNPYLKYNHADAEFQERLKEDTSFGGNLGRAVFQAKKRVLEPLGLVEEPVKTAPGKKRPVEHSPAEPDSSSGTGKAGQQPARKRLNFGQTGDADSVPDPQPLGQPPAAPSGLGTNTMATGSGAPMADNNEGADGVGNSSGNWHCDSTWMGDRAITTSTRTWALPTYNNHLYKQISSQSGASNDNHYFGYSTPWGYFDFNRFHCHFSPRDWQRLINNNWGFRPKRLNFKLFNIQVKEVTQNDGTTTIANNLTSTVQVFTDSEYQLPYVLGSAHQGCLPPFPADVFMVPQYGYLTLNNGSQAVGRSSFYCLEYFPSQMLRTGNNFTFSYTFEDVPFHSSYAHSQSLDRLMNPLIDQYLYYLSKTNAPSGTTTMSRLQFSQAGASDIRDQSRNWLPGPCYRQQRVSKTAADNNNSDYSWTGATKYHLNGRDSLVNPGPAMASHKDDEEKYFPQSGVLIFGKQDSGKTNVDIEKVMITDEEEIRTTNPVATEQYGSVSTNLQSGNTQAATTDVNTQGVLPGMVWQDRDVYLQGPIWAKIPHTDGHFHPSPLMGGFGLKHPPPQILIKNTPVPANPSTTFSAAKLASFITQYSTGQVSVEIEWELQKENSKRWNPEIQYTSNYNKSVNVDFTVDTNGVYSEPRPIGTRYLTRNL

SEQ ID NO: 2349 - protein, 735 aa, Artificial Sequence
  Description of Artificial Sequence: Synthetic polypeptide
MAADGYLPDWLEDTLSEGIRQWWKLKPGPPPPKPAERHQDDSRGLVLPGYKYLGPFNGLDKGEPVNEADAAALEHDKAYDRQLDSGDNPYLKYNHADAEFQERLKEDTSFGGNLGRAVFQAKKRVLEPLGLVEEPVKTAPGKKRPVEHSPAEPDSSSGTGKAGQQPARKRLNFGQTGDADSVPDPQPPGQPPAAPSGLGTNTMATGSGAPMADNNEGADGVGNSSGNWHCDSTWMGDRVITTSTRTWALPTYNNHLYKQISSQSGASNDNHYFGYSTPWGYFDFNRFHCHFSPRDWQRLINNNWGFRPKRLNFKLFNIQVKEVTQNDGTTTIANNLTSTVQVFTDSEYQLPYVLGSAHQGCLPPFPADVFMVPQYGYLTLNNGSQAVGRSSFYCLEYFPSQMLRTGNNFTFSYTFEDVPFHSSYAHSQSLDRLMNPLIDQYLYYLSKTNAPSGTTTMSRLQFSQAGASDIRDQSRNWLPGPCYRQQRVSKTAADNNNSDYSWTGATKYHLNGRDSLVNPGPAMASHKDDEEKYFPQSGVLIFGKQDSGKTNVDIEKVMITDEEEVRTTNPVATEQYGSVSTNLQSGNTQAATTDVNTQGVLPGMVWQDRDVYLQGPIWAKIPHTDGHFHPSPLMGGFGLKHPPPQILIKNTPVPANPSTTFSAAKFASFITQYSTGQVSVEIEWELQKENSKRWNPEIQYTSNYNKSVNVDFTVDTNGVYSEPRPIGTGYLTRNL

SEQ ID NO: 2350 - protein, 735 aa, Artificial Sequence
  Description of Artificial Sequence: Synthetic polypeptide
MAADGYLPDWLEDTLSEGIRQWWKLKPGPPPPKPAERHQDDSRGLVLPGYKYLGPFNGLDKGEPVNEADAAALEHDKAYDRQLDSGDNPYLKYNHADAEFQERLKEDTSFGGNLGRAVFQAKKRVLEPLGLVEEPVKTAPGKKRPVEHSPAEPDSSSGTGKAGQQPARKRLNFGQTGDADSVPDPQPLGQPPAAPSGLGTNTVATGSGAPMADNNEGADGVGNSSGNWHCDSTWMGDRVITTSTRTWALPTYNNHLYKQISSQSGASNDNHYFGYSTPWGYFDFNRFHCHFSPRDWQRLINNNWRFRPKRLNFKLFNIQVKEVTQNDGTTTIADNLTSTVQVFTDSEYQLPYVLGSAHQGCLPPFPADVFMVPQYGYLTLNNGSQAVGRSSFYCLEYFPSQMLRTGNNFTFSYTFEDVPLHSSYAHSQSLDRLMNPLIDQYLYYLSKTNAPSGTTTMSRLQFSQAGASDIRDQSRNWLPGPCYRQQRVSKTAADNNNSDYSWTGATKYHLNGRDSLVNPGPAMASHKDDEEKYFPQSGVLIFGKQDSGKTNVDIEKVMITDEEEIRTTNPVATEQYGSVSTNLQSGNTQAATTDVNTQGVLPGMVWQDRDVYLQGPIWAKIPHTDGHFHPSPLMGGFGLKHPPPQILIKNTPVPANPSTTFSAAKLASFITQYSTGQVSVEIEWELQKENSKRWNPEIQYTSNYNKSVNVDFTADTNGVYSEPRPIGTRYLTRNL

SEQ ID NO: 2351 - protein, 735 aa, Artificial Sequence
  Description of Artificial Sequence: Synthetic polypeptide
MAADGYLPDWLEDTLSEGIRQWWKLKPGPPPPKPAERHQDDSRGLVLPGYKYLGPFNGLDKGEPVNEADAAALEHDKAYDRQLDSGDNPYLKYNHADAEFQERLKEDTSFGGNLGRAVFQAKKRVLEPLGLVEEPVKTAPGKKRPVEHSPAEPDSSSGTGKAGQQPARKRSNFGQTGDADSVPDPQPLGQPPAAPSGLGTNTMATGSGAPMADNNEGADGVGNSSGNWHCDSTWMGDRVITTSTRTWALPTYNNHLYKQISSQSGASNDNHYFGYSTPWGYFDFNRFHCHFSPRDWQRLINNNWGFRPKRLNFKLFNIQVKEVAQNDGTTTIANNLTSTVQVFTDSEYQLPYVLGSAHQGCLPPFPADVFMVPQYGYLTLNNGSQAVGRSSFYCLEYFPSQMLRTGNNFTFSYTFEDVPFHSSYAHSQSLDRLMNPLIDQYLYYLSKTNAPSGTTTMSRLQFSQAGASDIRDQSRNWLPGPCYRQQRVSKTAADNNNSDYSWTGATKYHLNGRDSLVNPGPAMASHKDDEEKYFPQSGVLIFGKQDSGKTNVDIKKVMITDEEEIRTTNPVATEQYGSVSTNLQSGNTQAATTDVNTQGVLPGMVWQDRDVYLQGPIWAKIPHTDGHFHPSPLMGGFGLKHPPPQILIKNTPVPANPSTTFSAAKFASFITQYSTGQVSVEIEWELQKENSKRWNPEIQYTSNYNKSVNVDFTVDTNGVYSEPRPIGTRYLTRNL

SEQ ID NO: 2352 - protein, 734 aa, Artificial Sequence
  Description of Artificial Sequence: Synthetic polypeptide
MAADGYLPDWLEDTLSEGIRQWWKLKPGPPPPKPAERHQDDSRGLVLPGYKYLGPFNGLDKGEPVNEADAAALEHDKAYDRQLDSGDNPYLKYNHADAEFQERLKEDTSFGGNLGRAVFQAKKRVLEPLGLVEEPVKTAPGKKRPVEHSPAEPDSSSGTGKAGQQPARKRLNFGQTGDADSVPDPQPLGQPPAAPSGLGTNTMATGSGAPMADNNEGADGVGNSSGNWHCDSTWMGDRVITTSTRTWALPTYNNHLYKQISSQSGASNDNHYFGYSTPWGYFDFNRFHCHFSPRDWQRLINNWGFRPKRLNFKLFNIQVKEVTQNDGTTTIANNLTSTVQVFTDSEYQLPYVLGSAHQGCLPPFPADVFMVPQYGYLTLNNGSQAVGRSSFYCLEYFPSQMLRTGNNFTFSYTFEDVPFHSSYAHSQSLDRLMNPLIDQYLYYLSKTNAPSGTTTMSRLQFSQAGASDIRDQSRNWLPGPCYRQQRVSKTAADNNNSDYSWTGATKYHLNGRDSLVNPGPAMASHKDDEEKYFPQSGVLIFGKQDSGKTNVDIEKVMITDEEEIRTTNPVATEQYGSVSTNLQSGNTQAATTDVNTQGVLPGMVWQDRDVYLQGPIWAKIPHTDGHFHPSPLMGGFGLKHPPPQILIKNTPVPANPSTTFSAAKFASFITQYSTGQVSVEIEWELQKENSKRWNPEIQYTSNYNKSVNVDFTVDTNGVYSEPRPIGTRYLTRNL

SEQ ID NO: 2353 - protein, 735 aa, Artificial Sequence
  Description of Artificial Sequence: Synthetic polypeptide
MAADGYLPDWLEDTLSEGIRQWWKLKPGPPPPKPAERHQDDSRGLVLPGYKYLGPFNGLDKGEPVNEADAAALEHDKAYDRQLDSGDNPYLKYNHADAEFQERLKEDTSFGGNLGRAVFQAKKRVLEPLGLVEEPVKTAPGKKRPVEHSPAEPDSSSGTGKAGQQPARKRLNFGQTGDADSVPDPQPLGQPPAAPSGLGTNTMATGSGAPMADNNEGADGVGNSSGNWHCDSTWMGDRVITTSTRTWALPTYNNHLYKQISSQSGASNDNHYFGYSTPWGYFDFNRFHCHFSPRDWQRLINNNWGFRPKRLNFKLFNIQVKEVTQNDGTTTIANNLTSTVQVFTDSEYQLPYVLGSAHQGCLPPFPADVFMVPQYGYLTLNNGSQAVGRSSFYCLEYFPSQMLRTGNNFTFSYTFEDVPFHSSYAHSQSLDRLMNPLIDQYLYYLSKTNAPSGTTTMSRLQFSQAGASDIRDQSRNWLPGPCYRQQRVSKTAADNNNSDYSWTGATKYHLNGRDSLVNPGPAMASHKDDEEKYFPQSGVLIFGKQDSGKTNVDIEKVMITDEEEIRTTNPVATEQYGSVSTNLQSGNTQAATTDVNTQGVLPGMVWQDRDVYLQGPIWAKIPHTDGHFHPSPLMGGFGLKHPPPQILIKNTPVPANPSTTFSAAKFASFITQYSTGQVSVEIEWELQKENSKRWNPEIQYTSNYNKSVNVDFTVDTNGVYSEPRPIDTRYLTRNL

SEQ ID NO: 2354 - protein, 735 aa, Artificial Sequence
  Description of Artificial Sequence: Synthetic polypeptide
MAADGYLPDWLEDTLSEGIRQWWKLKPGPPPPKPAERHQDDSRGLVLPGYKYLGPFNGLDKGEPVNEADAAALEHDKAYDRQLDSGDNPYLKYNHADAEFQERLKEDTSFGGNLGRAVFQAKKRVLEPLGLVEEPVKTAPGKKRPVEHSPAEPDSSSGTGKAGQQPARKRLNFGQTGDADSVPDPQPLGQPPAAPSGLGTNTMATGSGAPMADNNEGADGVGNSSGNWHCDSTWMGDRVITTSTRTWALPTYNNHLYKQISSQSGASNDNHYFGYSTPWGYFDFNRFHCHFSPRDWQRLINNNWGFRPKRLNFKLFNIQVKEVTQNDGTTTIANNLTSTVQVFTDSEYQLPYVLGSAHQGCLPPFPADVFMVPQYGYLTLNNGSQAVGRSSFYCLEYFPSQMLRTGNNFTFSYTFEDVPFHSSYAHSQSLDRLMNPLINQYLYYLSKTNAPSGTTTMSRLQFSQAGASDIRDQSRNWLPGPCYRQQRVSKTAADNNNSDYSWTGATKYHLNGRDSLVNPGPAMASHKDDEEKYFPQSGVLIFGKQDSGKTNVDIEKVMITDEEEIRTTNPVATEQYGSVSTNLQSGNTQAATTDVNTQGVLPGMVWQDRDVYLQGPIWAKIPHTDGHFHPSPLMGGFGLKHPPPQILIKNTPVPANPSTTFSAAKFASFITQYSTGQVSVEIEWELQKENSKRWNPEIQYTSNYNKSVNVDFTVDTNGVYSEPRPIGTRYLTRNL

SEQ ID NO: 2355 - protein, 735 aa, Artificial Sequence
  Description of Artificial Sequence: Synthetic polypeptide
MAADGYLPDWLEDTLSEGIRQWWKLKPGPPPPKPAERHQDDSRGLVLPGYKYLGPFNGLDKGEPVNEADAAALEHDKAYDRQLDSGDNPYLKYNHADAEFQERLKEDTSFGGNLGRAVFQAKKRVLEPLGLVEEPVKMAPGKKRPVEHSPAEPDSSSGTGKAGQQPARKRLNFGQTGDADSVPDPQPLGQPPAAPSGLGTNTTATGSGAPMADNNEGADGVGNSSGNWHCDSTWMGDRVITTSTRTWALPTYNNHLYKQISSQSGASNDNHYFGYSTPWGYFDFNRFHCHFSPRDWQRLINNNWGFRPKRLNFKLFNIQVKEVTQNDGTTTIANNLTSTVQVFTDSEYQLPYVLGSAHQGCLPPFPADVFMVPQYGYLTLNNGSQAVGRSSFYCLEYFPSQMLRTGNNFTFSYTFEDVPFHSSYAHSQSLDRLMNPLIDQYLYYLSKTNAPSGTTTMSRLQFSQAGASDIRDQSRNWLPGPCYRQQRVSKTAADNNNSDYSWTGATKYHLNGRDSLVNPGPAMASHKDDEEKYFPQSGVLIFGKQDSGKTNVDIEKVMITDEEEIRTTNPVATEQYGSVSTNLQSGNTQAATTDVNTQGVLPGMVWQDRDVYLQGPIWAKIPHTDGHFHPSPLMGGFGLKHPPPQILIKNTPVPANPSTTFSAAKFASFITQYSTGQVSVEIEWELQKENSKRWNPEIQYTSNYNKSVNVDFTVDTNGVYSEPRPIGTRYLTRNL

SEQ ID NO: 2356 - protein, 735 aa, Artificial Sequence
  Description of Artificial Sequence: Synthetic polypeptide
MAADGYLPDWLEDTLSEGIRQWWKLKPGPPPPKPAERHQDDSRGLVLPGYKYLGPFNGLDKGEPVNEADAAALEHDKAYDRQLDSGDNPYLKYNHADAEFQERLKEDTSFGGNLGRAVFQAKKRVLEPLGLVEEPVKTAPGKKRPVEHSPAEPDSSSGTGKAGQQPARKRLNFGQTGDADSVPDPQPLGQPPAAPSGLGTNTMATGSGAPMADNNEGADGVGNSSGNWHCDSTWMGDRVITTSTRTWALPTYNNHLYKQISSQSGASNDNHYFGYSTPWGYFDFNRFHCHFSPRDWQRLINNNWGFRPKRLNFKLFNIQVKEVTQNDGTTTIANNLTSTVQVFTDSEYQLPYVLGSAHQGCLPPFPADVFMVPQYGYLTLNNGSQAVGRSSFYCLEYFPSQMLRTGNNFTFSYTFEDVPFHSSYAHSQSLDRLMNPLIDQYLYYLSKTNAPSGTTTMSRLQFSQAGASDIRDQSRNWLPGPCYRQQRVSKTAADNNNSDYSWTGATKYHLNGRDSLVNPGPAMASHKDDEEKYFPQSGVLIFGKQDSGKTNVDIEKVMITDEEEIRTTNPMATEQYGSVSTNLQSGNTQAATTDVNTQGVLPGMVWQDRDVYLQGPIWAKIPHTDGHFHPSPLMGGFGLKHPPPQILIKNTPVPANPSTTFSAAKFASFITQYSTGQVSVEIEWELQKENSKRWNPEIQYTSNYNKSVNVDFTVDTNGVYSEPRPIGTRYLTRNL

SEQ ID NO: 2357 - protein, 735 aa, Artificial Sequence
  Description of Artificial Sequence: Synthetic polypeptide
MAADGYLPDWLEDTLSEGIRQWWKLKPGPPPPKPAERHQDDSRGLVLPGYKYLGPFNGLDKGEPVNEADAAALEHDKAYDRQLDSGDNPYLKYNHADAEFQERLKEDTSFGGNLGRAVFQAKKRVLEPLGLVEEPVKTAPGKKRPVEHSPAEPDSSSGTGKAGQQPARKRLNFGQTGDADSVPDPQPLGQPPAAPSGLGTNTMATGSGAPMADNNEGADGVGNSSGNWHCDSTWMGDRVITTSTRTWALPTYNNHLYKQISSQSGASNDNHYFGYSTPWGYFDFNRFHCHFSPRDWQRLINNNWGFRPKRLNFKLFNIQVKEVTQNDGTTTIANNLTSTVQVFTDSEYQLPYVLGSAHQGCLPPFPADVSMVPQYGYLTLNNGSQAVGRSSFYCLEYFPSQMLRTGNNFTFSYTFEDVPFHSSYAHSQSLDRLMNPLIDQYLYYLSKTNAPSGTTTMSRLQFSQAGASDIRDQSRNWLPGPCYRQQRVSKTAADNNNSDYSWTGATKYHLNGRDSLVNPGPAMASHKDDEEKYFPQSGVLIFGKQDSGKTNVDIEKVMITDEEEIRTTNPVATEQYGSVSTNLQSGNTQAATTDVNTQGVLPGMVWQDRDVYLQGPIWAKIPHTDGHFHPSPLMGGFGLKHPPPQILIKNTPVPANPSTTFSAAKLASFITQYSTGQVSVEIEWELQKENSKRWNPEIQYTSNYNKSVNVDFTVDTNGVYSEPRPIGTRYLTRNL

SEQ ID NO: 2358 - protein, 735 aa, Artificial Sequence
  Description of Artificial Sequence: Synthetic polypeptide
MAADGYLPDWPEDTLSEGIRQWWKLKPGPPPPKPAERHQDDSRGLVLPGYKYLGPFNGLDKGEPVNEADAAALEHDKAYDRQLDSGDNPYLKYNHADAEFQERLKEDTSFGGNLGRAVFQAKKRVLEPLGLVEEPVKTAPGKKRPVEHSPAEPDSSSGTGKAGQQPARKRLNFGQTGDADSVPDPQPLGQPPAAPSGLGTNTMATGSGAPMADNNEGADGVGNSSGNWHCDSTWMGDRVITTSTRTWALPTYNNHLYKQISSQSGASNDNHYFGYSTPWGYFDFNRFHCHFSPRDWQRLINNNWGFRPKRLNFKLFNIQVKEVTQNDGTTTIANNLTSTVQVFTDSEYQLPYVLGSAHQGCLPPFPADVFMVPQYGYLTLNNGSQAVGRSSFYCLEYFPSQMLRTGNNFTFSYTFEDVPFHSSYAHSQSLDRLMNPLIDQYLYYLSKTNAPSGTTTMSRLQFSQAGASDIRDQSRNWLPGPCYRQQRVSKTAADNNNSDYSWTGATKYHLNGRDSLVNPGPAMASHKDDEEKYFPQSGVLIFGKQDSGKTNVDIEKVMITDEEEIRTTNPVATEQYGSVSTNLQSGNTQAATTDVNTQGVLPGMVWQDRDVYLQGPIWAKIPHTDGHFHPSPLMGGFGLKHPPPQILIKNTPVPANPSTTFSAAKFASFITQYSTGQVSVEIEWELQKENSKRWNPEIQYTSNYNKSVNVDFTVDTNGVYSEPRPIGTRYLTRNL

SEQ ID NO: 2359 - protein, 735 aa, Artificial Sequence
  Description of Artificial Sequence: Synthetic polypeptide
MAADGYLPDWLEDTLSEGIRQWWKLKPGPPPPKPAERHQDDSRGLVLPGYKYLGPFNGLDKGEPVNEADAAALEHDKAYDRQLDSGDNPYLKYNHADAEFQERLKEDTSFGGNLGRAVFQAKKRVLEPLGLVEEPVKTAPGKKRPVEHSPAEPDSSSGTGKAGQQPARKRLNFGQTGDADSVPDPQPLGQPPAAPSGLGTNTMATGSGAPMADNNEGADGVGNSSGNWHCDSTWMGDRVITTSTRTWALPTYNNHLYKQISSQSGASNDNHYFGYSTPWGYFDFNRFHCHFSPRDWQRLINNNWGFRPKRLNFKLFNIQVKEVTQNDGTTTIANNLTSTVQVFTDSEYQLPYVLGSAHQGCLPPFPADVFMVPQYGYLTLNNGSQAVGRSSFYCLEYFPSQMLRTGNNFTFSYTFEDVPFHSSYAHSQSLDRLMNPLIDQYLYYLSKTNAPSGTTTMSRLQFSQAGASDIRDQSRNWLPGPCYRQQRVSKTAADNNNSDYSWTGATKYHLNGRDSLVNPGPAMASHKDDEEKFFPQSGVLIFGKQDSGKTNVDIEKVMITDEEEIRTTNPVATEQYGSVSTNLQSGNTQAATTDVNTQGVLPGMVWQDRDVYLQGPIWAKIPHTDGHFHPSPLMGGFGLKHPPPQILIKNTPVPANPSTTFSAAKFASFITQYSTGQVSVEIEWELQKENSKRWNPEIQYTSNYNKSVNVDFTVDTNGVYSEPRPIGTRYLTRNL

SEQ ID NO: 2360 - protein, 735 aa, Artificial Sequence
  Description of Artificial Sequence: Synthetic polypeptide
MAADGYLPDWLEDTLSEGIRQWWKLKPGPPPPKPAERHQDDSRGLVLPGYKYLGPFNGLDKGEPVNEADAAALEHDKAYDRQLDSGDNPYLKYNHADAEFQERLKEDTSFGGNLGRAVFQAKKRVLEPLGLVEEPVKTAPGKKRPVEHSPAEPDSSSGIGKAGQQPARKRLNFGQTGDADSVPDPQPLGQPPAAPSGLGTNTMATGSGAPMADNNEGADGVGNSSGNWHCDSTWMGDRVITTSTRTWALPTYNNHLYKQISSQSGASNDNHYFGYSTPWGYFDFNRFHCHFSPRDWQRLINNNWGFRPKRLNFKLFNIQVKEVTQNDGTTTIANNLTSTVQVFTDSEYQLPYVLGSAHQGCLPPFPADVFMVPQYGYLTLNNGSQAVGRSSFYCLEYFPSQMLRTGNNFTFSYTFEDVPFHSSYAHSQSLDRLMNPLIDQYLYYLSKTNAPSGTTTMSRLQFSQAGASDIRDQSRNWLPGPCYRQQRVSKTAADNNNSDYSWTGATKYHLNGRDSLVNPGPAMASHKDDEEKYFPQSGVLIFGKQDSGKTNVDIEKVMITDEEEIRTTNPVATEQYGSVSTNLQSGNTQAATTDVNTQGVLPGMVWQDRDVYLQGPIWAKIPHTDGHFHPSPLMGGFGLKHPPPQILIKNTPVPANPSTTFSAAKFASFITQYSTGQVSVEIEWELQKENSKRWNPEIQYTSNYNKSVNVDFTVDTNGVYSEPRPIGTRYLTRNL

SEQ ID NO: 2361 - protein, 735 aa, Artificial Sequence
  Description of Artificial Sequence: Synthetic polypeptide
MAADGYLPDWLEDTLSEGIRQWWKLKPGPPPPKPAERHQDDSRGLVLPGYKYLGPFNGLDKGEPVNEADAAALEHDKAYDRQLDSGDNPYLKYNHADAEFQERLKEDTSFGGNLGRAVFQAKKRVLEPLGLVEEPVKTAPGKKRPVEHSPAEPDSSSGTGKAGQQPARKRLNFGQTGDADSVPDPQPLGQPPAAPSGLGTNTMATGSGAPMADNNEGADGVGNSSGNWHCDSTWMGDRVITTSTRTWALPTYNNHLYKQISSQSGASNDNHYFGYSTPWGYFDFNRFHCHFSPRDWQRLINNNWRFRPKRLNFKLFNIQVKEVTQNDGTTTIANNLTSTVQVFTDSEYQLPYVLGSAHQGCLPPFPADVFMVPQYGYLTLNNGSQAVGRSSFYCLEYFPSQMLRTGNNFTFSYTFEDVPFHSSYAHSQSLDRLMNPLIDQYLYYLSKTNAPSGTTTMSRLQFSQAGASDIRDQSRNWLPGPCYRQQRVSKTAADNNNSDYSWTGATKYHLNGRDSLVNPGPAMASHKDDEEKYFPQSGVLIFGKQDSGKTNVDIEKVMITDEEEIRTTNPVATEQYGSVSTNLQSGNTQAATTDVNTQGVLPGMVWQDRDVYLQGPIWAKIPHTDGHFHPSPLMGGFGLKHPPPQILIKNTPVPANPSTTFSAAKLASFITQYSTGQVSVEIEWELQKENSKRWNPEIQYTSNYNKSVNVDFTVDTNGVYSEPRPIGTRYLTRNL

SEQ ID NO: 2362 - protein, 735 aa, Artificial Sequence
  Description of Artificial Sequence: Synthetic polypeptide
MAADGYLPDWLEDTLSEGIRQWWKLKPGPPPPKPAERHQDDSRGLVLPGYKYLGPFNGLDKGEPVNEADAAALEHDKAYDRQLDSGDNPYLKYNHADAEFQERLKEDTSFGGNLGRAVFQAKKRVLEPLGLVEEPVKTAPGKKRPVEHSPAEPDSSSGTGKAGQQPARKRLNFGQTGDADSVPDPQPLGQPPAAPSGLGTNTMATGSGAPMADNNEGADGVGNSSGNWHCDSTWMGDRVITTSTRTWALPTYNNHLYKQISSQSGASNDNHYFGYSTPWGYFDFNRFHCHFSPRDWQRLINNNWGFRPKRLNFKLFNIQVKEVTQNDGTTTIANNLTSTVQVFTDSEYQLPYVLGSAHQGCLPPFPADVFMVPQYGYLTLNNGSQAVGRSSFYCLEYFPSQMLRTGNNFTFSYTFEDVPFHSSYAHSQSLDRLMNPLIDQYLYYLSKTNAPSGTTTMSRLQFSQAGASDIRDQSRNWLPGPCYRQQRVSKTAADNNNSDYSWTGATKYHLNGRDSLVNPGPAMASHKDDEEKYFPQSGVLIFGKQDSGKTNVDIEKVMITDEEEIRTTNPVATEQYGSVSTNLQSGNTQAATTDVNTQGVLPGMVWQDRDVYLQGPIWAKIPHTDGHFHPSPLMGGFGLKHPPPQILIKNTPVPANPSTTFSAAKFASFITQYSTGQVSVEIEWELQKENSKRWNPEIQYTSNYNKSVNVDFTVDTNGVYSEPRPIGTRYLARNL

SEQ ID NO: 2363 - protein, 735 aa, Artificial Sequence
  Description of Artificial Sequence: Synthetic polypeptide
MAADGYLPDWLEDTLSEGIRQWWKLKPGPPPPKPAERHQDDSRGLVLPGYKYLGPFNGLDKGEPVNEADAAALEHDKAYDRQLDSGDNPYLKYNHADAEFQERLKEDTSFGGNLGRAVFQAKKRVLEPLGLVEEPVKTAPGKKRPVEHSPAEPDSSSGTGKAGQQPARKRLNFGQTGDADSVPDPQPLGQPPAAPSGLGTNTMATGSGAPMADNNEGADGVGNSSGNWHCDSTWMGDRVITTSTRTWALPTYNNHLYKQISSQSGASNDDHYFGYSTPWGYFDFNRFHCHFSPRDWQRLINNNWGFRPKRLNFKLFNIQVKEVTQNDGTTTIANNLTSTVQVFTDSEYQLPYVLGSAHQGCLPPFPADVFMVPQYGYLTLNNGSQAVGRSSFYCLEYFPSQMLRTGNNFTFSYTFEDVPFHSSYAHSQSLDRLMNPLIDQYLYYLSKTNAPSGTTTMSRLQFSQAGASDIRDQSRNWLPGPCYRQQRVSKTAADNNNSDYSWTGATKYHLNGRDSLVNPGPAMASHKDDEEKYFPQSGVLIFGKQDSGKTNVDIEKVMITDEEEIRTTNPVATEQYGSVSTNLQSGNTQAATTDVNTQGVLPGMVWQDRDVYLQGPIWAKIPHTDGHFHPSPLMGGFGLKHPPPQILIKNTPVPANPSTTFSAAKFASFITQYSTGQVSVEIEWELQKENSKRWNPEIQYTSNYNKSVNVDFTVDTNGVYSEPRPIGTRYLTRNL

SEQ ID NO: 2364 - protein, 735 aa, Artificial Sequence
  Description of Artificial Sequence: Synthetic polypeptide
MAADGYLPDWLEDTLSEGIRQWWKLKPGPPPPKPAERHQDDSRGLVLPGYKYLGPFNGLDKGEPVNEADAAALEHDKAYDRQLDSGDNPYLKYNHADAEFQERLKEDTSFGGNLGRAVFQAKKGVLEPLGLVEEPVKTAPGKKRPVEHSPAEPDSSSGTGKAGQQPARKRLNFGQTGDADSVPDPQPLGQPPAAPSGLGTNTMATGSGAPMADNNEGADGVGNSSGNWHCDSTWMGDRVITTSTRTWALPTYNNHLYKQISSQSGASNDNHYFGYSTPWGYFDFNRFHCHFSPRDWQRLINNNWGFRPKRLNFKLFNIQVKEVTQNDGTTTIANNLTSTVQVFTDSEYQLPYVLGSAHQGCLPPFPADVFMVPQYGYLTLNNGSQAVGRSSFYCLEYFPSQMLRTGNNFTFSYTFEDVPFHSSYAHSQSLDRLMNPLIDQYLYYLSKTNAPSGTTTMSRLQFSQAGASDIRDQSRNWLPGPCYRQQRVSKTAADNNNSDYSWTGATKYHLNGRDSLVNPGPAMASHKDDEEKYFPQSGVLIFGKQDSGKTNVDIEKVMITDEEEIRTTNPVATEQYGSVSTNLQSGNTQAATTDVNTQGVLPGMVWQDRDVYLQGPIWAKIPHTDGHFHPSPLMGGFGLKHPPPQILIKNTPVPANPSTTFSAAKLASFITQYSTGQVSVEIEWELQKENSKRWNPEIQYTSNYNKSVNVDFTVDTNGVYSEPRPIGTRYLTRNL

SEQ ID NO: 2365 - protein, 735 aa, Artificial Sequence
  Description of Artificial Sequence: Synthetic polypeptide
MAADGYLPDWLEDTLSEGIRQWWKLKPGPPPPKPAERHQDDSRGLVLPGYKYLGPFNGLDKGEPVNEADAAALEHDKAYDRQLDSGDNPYLKYNHADAEFQERLKEDTSFGGNLGRAVFQAKKRVLEPLGLVEEPVKTAPGKKRPVEHSPAEPDSPSGTGKAGQQPARKRLNFGQTGDADSVPDPQPLGQPPAAPSGLGTNTMATGSGAPMADNNEGADGVGNSSGNWHCDSTWMGDRVITTSTRTWALPTYNNHLYKQISSQSGASNDNHYFGYSTPWGYFDFNRFHCHFSPRDWQRLINNNWGFRPKRLNFKLFNIQVKEVTQNDGTTTIANNLTSTVQVFTDSEYQLPYVLGSAHQGCLPPFPADVFMVPQYGYLTLNNGSQAVGRSSFYCLEYFPSQMLRTGNNFTFSYTFEDVPFHSSYAHSQSLDRLMNPLIDQYLYYLSKTNAPSGTTTMSRLQFSQAGASDIRDQSRNWLPGPCYRQQRVSKTAADNNNSDYSWTGATKYHLNGRDSLVNPGPAMASHKDDEEKYFPQSGVLIFGKQDSGKTNVDIEKVMITDEEEIRTTNPVATEQYGSVSTNLQSGNTQAATTDVNTQGVLPGMVWQDRDVYLQGPIWAKIPHTDGHFHPSPLMGGFGLKHPPPQILIKNTPVPANPSTTFSAAKFASFITQYSTGQVSVEIEWELQKENSKRWNPEIQYTSNYNKSVNVDFTVDTNGVYSEPRPIGTRYLTRNL

SEQ ID NO: 2366 - protein, 735 aa, Artificial Sequence
  Description of Artificial Sequence: Synthetic polypeptide
MAADGYLPDWLEDTLSEGIRQWWKLKPGPPPPKPAERHQDDSRGLVLPGYKYLGPFNGLDKGEPVNEADAAALEHDKAYDRQLDSGDNPYLKYNHADAEFQERLKEDTSFGGNLGRAVFQAKKRVLEPLGLVEEPVKTAPGKKRPVEHSPAEPDSSSGTGKAGQQPARKRLNFGQTGDADSVPDPQPLGQPPAAPSGLGTNTMATGSGAPMADNNEGADGVGNSSGNWHCDSTWMGDRVITTSTRTWALPTYNNHPYKQISSQSGASNDNHYFGYSTPWGYFDFNRFHCHFSPRDWQRLINNNWGFRPKRLNFKLFNIQVKEVTQNDGTTTIANNLTSTVQVFTDSEYQLPYVLGSAHQGCLPPFPADVFMVPQYGYLTLNNGSQAVGRSSFYCLEYFPSQMLRTGNNFTFSYTFEDVPFHSSYAHSQSLDRLMNPLIDQYLYYLSKTNAPSGTTTMSRLQFSQAGASDIRDQSRNWLPGPCYRQQRVSKTAADNNNSDYSWTGATKYHLNGRDSLVNPGPAMASHKDDEEKYFPQSGVLIFGKQDSGKTNVDIEKVMITDEEEIRTTNPVATEQYGSVSTNLQSGNTQAATTDVNTQGVLPGMVWQDRDVYLQGPIWAKIPHTDGHFHPSPLMGGFGLKHPPPQILIKNTPVPANPSTTFSAAKFASFITQYSTGQVSVEIEWELQKENSKRWNPEIQYTSNYNKSVNVDFTVDTNGVYSEPRPIGTRYLTRNL

SEQ ID NO: 2367 - protein, 735 aa, Artificial Sequence
  Description of Artificial Sequence: Synthetic polypeptide
MAADGYLPDWLEDTLSEGIRQWWKLKPGPPPPKPAERHQDDSRGLVLPGYKYLGPFNGLDKGEPVSEADVAALEHDKAYDRQLDSGDNPYLKYNHADAEFQERLKEDTSFGGNLGRAVFQAKKRVLEPLGLVEEPVKTAPGKKRPVEHSPAEPDSSSGTGKAGQQPARKRLNFGQTGDADSVPDPQPLGQPPAAPSGLGTNTMATGSGAPMADNNEGADGVGNSSGNWHCDSTWMGDRVITTSTRTWALPTYNNHLYKQISSQSGASNDNHYFGYSTPWGYFDFNRFHCHFSPRDWQRLINNNWGFRPKRLNFKLFNIQVKEVTQNDGTTTIANNLTSTVQVFTDSEYQLPYVLGSAHQGCLPPFPADVFMVPQYGYLTLNNGSQAVGRSSFYCLEYFPSQMLRTGNNFTFSYTFEDVPFHSSYAHSQSLDRLMNPLIDQYLYYLSKTNAPSGTTTMSRLQFSQAGASDIRDQSRNWLPGPCYRQQRVSKTAADNNNSDYSWTGATKYHLNGRDSLVNPGPAMASHKDDEEKYFPQSGVLIFGKQDSGKTNVDIEKVMITDEEEIRTTNPVATEQYGSVSTNLQSGNTQAATTDVNTQGVLPGMVWQDRDVYLQGPIWAKIPHTDGHFHPSPLMGGFGLKHPPPQILIKNTPVPANPSTTFSAAKFASFITQYSTGQVSVEIEWELQKENSKRWNPEIQYTSNYNKSVNVDFTVDTNGVYSEPRPIGTRYLTRNL

SEQ ID NO: 2368 - protein, 735 aa, Artificial Sequence
  Description of Artificial Sequence: Synthetic polypeptide
MAADGYLPDWLEDTLSEGIRQWWKLKPGPPPPKPAERHQDDSRGLVLPGYKYLGPFNGLDKGEPVNEADAAALEHDKAYDRQLDSGDNPYLKYNHADAEFQERLKEDTSFGGNLGRAVFQAKKRVLEPLGLVEEPVKTAPGKKRPVEHSPAEPDSSSGTGKAGQQPARKRLNFGQTGDADSVPDPQPLGQPPAAPSGLGTNTMATGSGAPMADNNEGADGVGNSSGNWHCDSTWMGDRVITTSTRTWALPTYNNHLYKQISSQSGASNDNHYFGYSTPWGYFDFNRFHCHFSPRDWQRLINNNWGFRPKRLNFKLFNIQVKEVTQNDGTTTIANNLTSTVQVFTDSEYQLPYVLGSAHQGCLPPFPADVFMVPQYGYLTLNNGSQAVGRSSFYCLEYFPSQMLRTGNNFTFSYTFEDVPFHSSYAHSQSLDRLMNPLIDQYLYYLSKTNAPSGTTTMSRLQFSQAGASDIRDQSRNWLPGPCYRQQRVSKTAADNNNSDYSWTGATKYHLNGRDSLVNPGPAMASHKDDEEKYFPQSGVLIFGKQDSGKINVDIEKVMITDEEEIRTTNPVATEQYGSVSTNLQSGNTQAATTDVNTQGVLPGMVWQDRDVYLQGPIWAKIPHTDGHFHPSPLMGGFGLKHPPPQILIKNTPVPANPSTTFSAAKFASFITQYSTGQVSVEIEWELQKENSKRWNPEIQYTSNYNKSVNVDFTVDTNGVYSEPRPIGTRYLTRNL

SEQ ID NO: 2369 - protein, 735 aa, Artificial Sequence
  Description of Artificial Sequence: Synthetic polypeptide
MAADGYLPDWLEDTLSEGIRQWWKLKPGPPPLKPAERHQDDSRGLVLPGYKYLGPFNGLDKGEPVNEADAAALEHDKAYDRQLDSGDNPYLKYNHADAEFQERLKEDTSFGGNLGRAVFQAKKRVLEPLGLVEEPVKTAPGKKRPVEHSPAEPDSSSGTGKAGQQPARKRLNFGQTGDADSVPDPQPLGQPPAAPSGLGTNTMATGSGAPMADNNEGADGVGNSSGNWHCDSTWMGDRVITTSTRTWALPTYNNHLYKQISSQSGASNDNHYFGYSTPWGYFDFNRFHCHFSPRDWQRLINNNWGFRPKRLNFKLFNIQVKEVTQNDGTTTIANNLTSTVQVFTDSEYQLPYVLGSAHQGCLPPFPADVFMVPQYGYLTLNNGSQAVGRSSFYCLEYFPSQMLRTGNNFTFSYTFEDVPFHSSYAHSQSLDRLMNPLIDQYLYYLSKTNAPSGTTTMSRLQFSQAGASDIRDQSRSWLPGPCYRQQRVSKTAADNNNSDYSWTGATKYHLNGRDSLVNPGPAMASHKDDEEKYFPQSGVLIFGKQDSGKTNVDIEKVMITDEEEIRTTNPVATEQYGSVSTNLQSGNTQAATTDVNTQGVLPGMVWQDRDVYLQGPIWAKIPHTDGHFHPSPLMGGFGLKHPPPQILIKNTPVPANPSTTFSAAKFASFITQYSTGQVSVEIEWELQKENSKRWNPEIQYTSNYNKSVNVDFTVDTNGVYSEPRPIGTRYLTRNL

SEQ ID NO: 2370 - protein, 735 aa, Artificial Sequence
  Description of Artificial Sequence: Synthetic polypeptide
MAADGYLPDWLEDTLSEGIRQWWKLKPGPPPPKPAERHQDDSRGLVLPGYKYLGPFNGLDKGEPVNEADAAALEHDKAYDRQLDSGDNPYLKYNHADAEFQERLKEDTSFGGNLGRAVFQAKKRVLEPLGLVEEPVKTAPGKKRPVEHSPAEPDSSSGTGKAGQQPARKRLNFGQTGDADSVPDPQPLGQPPAAPSGLGTNTMATGSGAPMADNNEGADGVGNSSGNWHCDSTWMGDRVITTSTRTWALPTYNNHLYKQISSQSGASNDNHYFGYSTPWGYFDFNRFHCHFSPRDWQRLINNNWGFRPKRLNFKLFNIQVKEVTQNDGTTTIANNLTSTVQVFTDSEYQLPYVLGSAHQGCLPPFPADVFMVPQYGYLTLNNGSQAVGRSSFYCLEYFPSQMLRTGNNFTFSYTFEDVPFHSSYAHSQSLDRLMNPLIDQYLYYLSKTNAPSGTTTMSRLQFSQAGASDIRDQSRNWLPGPCYRQQRVSKTAADNNNSDYSWTGATKYHLNGRDSLVNPGPAMASHKDDEEKYFPQSGVLIFGKQDSGKTNVDIEKVMITDEEEIGTTNPVATEQYGSVSTNLQSGNTQAATTDVNTQGVLPGMVWQDRDVYLQGPIWAKIPHTDGHFHPSPLMGGFGLKHPPPQILIKNTPVPANPSTTFSAAKFASFITQYSTGQVSVEIEWELQKENSKRWNPEIQYTSNYNKSVNVDFTVDTNGVYSEPRPIGTRYLTRNL

SEQ ID NO: 2371 - protein, 735 aa, Artificial Sequence
  Description of Artificial Sequence: Synthetic polypeptide
MAADGYLPDWLEDTLSEGIRQWWKLKPGPPPPKPAERHQDDSRGLVLPGYKYLGPFNGLDKGEPVNEADAAALEHDKAYDRQLDSGDNPYLKYNHADAEFQERLKEDTSFGGNLGRAVFQAKKRVLEPLGLVEEPVKTAPGKKRPVEHSPAEPDSSSGTGKAGQQPARKRLNFGQTGDADSVPDPQPLGQPPAAPSGLGTNTMATGSGAPMADNNEGADGVGNSSGNWHCDSTWMGDRVITTSTRTWALPTYNNHLYKQISSQSGASNDNHYFGYSTPWGYFDFNRFHCHFSPRDWQRLINNNWGFRPKRLNFKLFNIQVKEVTQNDGTTTIANNLTSTVQVFTDSEYRLPYVLGSAHQGCLPPFPADVFMVPQYGYLTLNNGSQAVGRSSFYCLEYFPSQMLRTGNNFTFSYTFEDVPFHSSYAHSQSLDRLMNPLIDQYLYYLSKTNAPSGTTTMSRLQFSQAGASDIRDQSRNWLPGPCYRQQRVSKTAADNNNSDYSWTGATKYHLNGRDSLVNPGPAMASHKDDEEKYFPQSGVLIFGKQDSGKTNVDIEKVMITDEEEIRTTNPVATEQYGSVSTNLQSGNTQAATTDVNTQGVLPGMVWQDRDVYLQGPIWAKIPHTDGHFHPSPLMGGFGLKHPPPQILIKNTPVPANPSTTFSAAKFASFITQYSTGQVSVEIEWELQKENSKRWNPEIQYTSNYNKSVNVDFTVDTNGVYSEPRPIGTRYLTRNL

SEQ ID NO: 2372 - protein, 735 aa, Artificial Sequence
  Description of Artificial Sequence: Synthetic polypeptide
MAADGYLPDWLEDTLSEGIRQWWKLKPGPPPPKPAERHQDDSRGLVLPGYKYLGPFNGLDKGEPVNEADAAALEHDKAYDRQLDSGDNPYLKYNHADAEFQERLKEDTSFGGNLGRAVFQAKKRVLEPLGLVEEPVKTAPGKKRPVEHSPAEPDSSSGTGKAGQQPARKRLNFGQTGDADSVPDPQPLGQPPAAPSGLGTNTMATGSGAPMADNNEGADGVGNSSGNWHCDSTWMGDRVITTSTRTWALPTYNNHLYKQISSQSGASNDNHYFGYSTPWGYFDFNRFHCHFSPRDWQRLINNNWGFRPKRLNFKLFNIQVKEVTQNDGTTTIANNLTSTVQVFTDSEYQLPYVLGSAHQGCLPPFPADVFMVPQYGYLTLNNGSQAVGRSSFYCLEYFPSQMLRTGNNFTFSYTFEDVPFHSSYAHSQSLDRLMNPLIDQYLYYLSKTNAPSGTTTMSRLQFSQAGASDIRDQSRNWLPGPCYRQQRVSKTAADNNNSDYSWTGATKYHLNGRDSLVNPGPAMASHKDDEEKYFPQSGVLIFGKQDSGKTNVDIEKVMITDEEEIRTTNPVATEQYGSVSTNLQSGNTQAATTDVNTQGVLPGMVWQDRDVYLQGPIWAKIPHTDGHFHPSPLMGGFGLKHPPPQILIKNTPVPANPSTTFSAAKFASFITQYSTGQVSVEIEWELQKENSKRWNPKIQYTSNYNKSVNVDFTVDTNGVYSEPRPIGTRYLTRNL

SEQ ID NO: 2373 - protein, 735 aa, Artificial Sequence
  Description of Artificial Sequence: Synthetic polypeptide
MAADGYLPDWLEDTLSEGIRQWWKLKPGPPPPKPAERHQDDSRGLVLPGYKYLGPFNGLDKGEPVNEADAAALEHDKAYDRQLDSGDNPYLKYNHADAESQERLKEDTSFGGNLGRAVFQAKKRVLEPLGLVEEPVKTAPGKKRPVEHSPAEPDSSSGTGKAGQQPARKRLNFGQTGDADSVPDPQPLGQPPAAPSGLGTNTMATGSGAPMADNNEGADGVGNSSGNWHCDSTWMGDRVITTSTRTWALPTYNNHLYKQISSQSGASNDNHYFGYSTPWGYFDFNRFHCHFSPRDWQRLINNNWGFRPKRLNFKLFNIQVKEVTQNDGTTTIANNLTSTVQVFTDSEYQLPYVLGSAHQGCLPPFPADVFMVPQYGYLTLNNGSQAVGRSSFYCLEYFPSQMLRTGNNFTFSYTFEDVPFHSSYAHSQSLDRLMNPLIDQYLYYLSKTNAPSGTTTMSRLQFSQAGASDIRDQSRNWLPGPCYRQQRVSKTAADNNNSDYSWTGATKYHLNGRDSLVNPGPAMASHKDDEEKYFPQSGVLIFGKQDSGKTNVDIEKVMITDEEEIRTTNPVATEQYGSVSTNLQSGNTQAATTDVNTQGVLPGMVWQDRDVYLQGPIWAKIPHTDGHFHPSPLMGGFGLKHPPPQILIKNTPVPANPSTTFSAAKFASFITQYSTGQVSVEIEWELQKENSKRWNPEIQYTSNYNKSVNVDFTVDTNGVYSEPRPIGTRYLTRNL

SEQ ID NO: 2374 - protein, 735 aa, Artificial Sequence
  Description of Artificial Sequence: Synthetic polypeptide
MAADGYLPDWLEDTLSEGIRQWWKLKPGPPPPKPAERHQDDSRGLVLPGYKYLGPFNGLDKGEPVNEADAAALEHDKAYDRQLDSGDNPYLKYNHADAEFQERLKEDTSFGGNLGRAVFQAKKRVLEPLGLVEEPVKTAPGKKRPVEHSPAEPDSSSGTGKAGQQPARKRLNFGQTGDADSVPDPQPLGQPPAAPSGLGTNTMATGSGAPTADNNEGADGVGNSSGNWHCDSTWMGDRVITTSTRTWALPTYNNHLYKQISSQSGASNDNHYFGYSTPWGYFDFNRFHCHFSPRDWQRLINNNWGFRPKRLNFKLFNIQVKEVTQNDGTTTIANNLTSTVQVFTDSEYQLPYVLGSAHQGCLPPFPADVFMVPQYGYLTLNNGSQAVGRSSFYCLEYFPSQMLRTGNNFTFSYTFEDVPFHSSYAHSQSLDRLMNPLIDQYLYYLSKTNAPSGTTTMSRLQFSQAGASDIRDQSRNWLPGPCYRQQRVSKTAADNNNSDYSWTGATKYHLNGRDSLVNPGPAMASHKDDEEKYFPQSGVLIFGKQDSGKTNVDIEKVMITDEEEIRTTNPVATEQYGSVSTNLQSGNTQAATTDVNTQGVLPGMVWQDRDVYLQGPIWAKIPHTDGHFHPSPLMGGFGLKHPPPQILIKNTPVPANPSTTFSAAKFASFITQYSTGQVSVEIEWELQKENSKRWNPEIQYTSNYNKSVNVDFTVDTNGVYSEPRPIGTRYLTRNL

SEQ ID NO: 2375 - protein, 735 aa, Artificial Sequence
  Description of Artificial Sequence: Synthetic polypeptide
MAADGYLPDWLEDTLSEGIRQWWKLKPGPPPPKPAERHQDDSRGLVLPGYKYLGPFNGLDKGEPVNEADAAALEHDKAYDRQLDSGDNPYLKYNHADAEFQERLKEDTSFGGNLGRAVFQAKKRVLEPLGLVEEPVKTAPGKKRPVEHSPAEPDASSGTGKAGQQPARKRLNFGQTGDADSVPDPQPLGQPPAAPSGLGTNTMATGSGAPMADNNEGADGVGNSSGNWHCDSTWMGDRVITTSTRTWALPTYNNHLYKQISSQSGASNDNHYFGYSTPWGYFDFNRFHCHFSPRDWQRLINNNWGFRPKRLNFKLFNIQVKEVTQNDGTTTIANNLTSTVQVFTDSEYQLPYVLGSAHQGCLPPFPADVFMVPQYGYLTLNNGSQAVGRSSFYCPEYFPSQMLRTGNNFTFSYTFEDVPFHSSYAHSQSLDRLMNPLIDQYLYYLSKTNAPSGTTTMSRLQFSQAGASDIRDQSRNWLPGPCYRQQRVSKTAADNNNSDYSWTGATKYHLNGRDSLVNPGPAMASHKDDEEKYFPQSGVLIFGKQDSGKTNVDIEKVMITDEEEIRTTNPVATEQYGSVSTNLQSGNTQAATTDVNTQGVLPGMVWQDRDVYLQGPIWAKIPHTDGHFHPSPLMGGFGLKHPPPQILIKNTPVPANPSTTFSAAKFASFITQYSTGQVSVEIEWELQKENSKRWNPEIQYTSNYNKSVNVDFTVDTNGVYSEPRPIGTRYLTRNL

SEQ ID NO: 2376 - protein, 735 aa, Artificial Sequence
  Description of Artificial Sequence: Synthetic polypeptide
MAADGYLPDWLEDTLSEGIRQWWKLKPGPPPPKPAERHQDDSRGLVLPGYKYLGPFNGLDKGEPVNEADAAALEHDKAYDRQLDSGDNPYLKYNHADAEFQERLKEDTSFGGNLGRAVFQAKKRVLEPLGLVEEPVKTAPGKKRPVEHSPAEPDSSSGTGKAGQQPARKRLNFGQTGDADSVPDPQPLGQPPAAPSGLGTNTMATGSGAPMADNNEGADGVGNSSGNWHCDSTWMGDRVITTSTRTWALPTYNNHLYKQISSQSGASNDNHYFGYSTPWGYFDFNRFHCHFSPRDWQRLINNNWGLRPKRLNFKLFNIQVKEVTQNDGTTTIANNLTSTVQVFTDSEYQLPYVLGSAHQGCLPPFPADVFMVPQYGYLTLNNGSQAVGRSSFYCLEYFPSQMLRTGNNFTFSYTFEDVPFHSSYAHSQSLDRLMNPLIDQYLYYLSKTNAPSGTTTMSRLQFSQAGASDIRDQSRNWLPGPCYRQQRVSKTAADNNNSDYSWTGATKYHLNGRDSLVNPGPAMASHKDDEEKYFPQSGVLIFGKQDSGKTNVDIEKVMITDEEEIRTTNPVATEQYGSVSTNLQSGNTQAATTDVNTQGVLPGMVWQDRDVYLQGPIWAKIPHTDGHFHPSPLMGGFGLKHPPPQILIKNTPVPANPSTTFSAAKFASFITQYSTGQVSVEIEWELQKENSKRWNPEIQYTSNYNKSVNVDFTVDTNGVYSEPRPIGTRYLTRNL

SEQ ID NO: 2377 - protein, 735 aa, Artificial Sequence
  Description of Artificial Sequence: Synthetic polypeptide
MAADGYLPDWLEDTLSEGIRQWWKLKPGPPPPKPAERHQDDSRGLVLPGYKYLGPFNGLDKGEPVNEADAAALEHDKAYDRQLDSGDNPYLKYNHADAEFQERLKEDTSFGGNLGRAVFQAKKRVLEPLGLVEEPVKTAPGKKRPVEHFPAEPDSSSGTGKAGQQPARKRLNFGQTGDADSVPDPQPLGQPPAAPSGLGTNTMATGSGAPMADNNEGADGVGNSSGNWHCDSTWMGDRVITTSTRTWALPTYNNHLYKQISSQSGASNDNHYFGYSTPWGYFDFNRFHCHFSPRDWQRLINNNWGFRPKRLNFKLFNIQVKEVTQNDGTTTIANNLTSTVQVFTDSEYQLPYVLGSAHQGCLPPFPADVFMVPQYGYLTLNNGSQAVGRSSFYCLEYFPSQMLRTGNNFTFSYTFEDVPFHSSYAHSQSLDRLMNPLIDQYLYYLSKTNAPSGTTTMSRLQFSQAGASDIRDQSRNWLPGPCYRQQRVSKTAADNNNSDYSWTGATKYHLNGRDSLVNPGPAMASHKDDEEKYFPQSGVLIFGKQDSGKTNVDIEKVMITDEEEIRTTNPVATEQYGSVSTNLQSGNTQAATTDVNTQGVLPGMVWQDRDVYLQGPIWAKIPHTDGHFHPSPLMGGFGLKHPPPQILIKNTPVPANPSTTFSAAKFASFITQYSTGQVSVEIEWELQKENSKRWNPEIQYTSNYNKSVNVDFTVDTNGVYSEPRPIGTRYLTRNL

SEQ ID NO: 2378 - protein, 735 aa, Artificial Sequence
  Description of Artificial Sequence: Synthetic polypeptide
MAADGYLPDWLKDTLSEGIRQWWKLKPGPPPPKPAERHQDDSRGLVLPGYKYLGPFNGLDKGEPVNEADAAALEHDKAYDRQLDSGDNPYLKYNHADAEFQERLKEDTSFGGNLGRAVFQAKKRVLEPLGLVEEPVKTAPGKKRPVEHSPAEPDSSSGTGKAGQQPARKRLNFGQTGDADSVPDPQPLGQPPAAPSGLGTNTMATGSGAPMADNNEGADGVGNSSGNWHCDSTWMGDRVITTSTRTWALPTYNNHLYKQISSQSGASNDNHYFGYSTPWGYFDFNRFHCHFSPRDWQRLINNNWGFRPKRLNFKLFNIQVKEVTQNDGTTTIANNLTSTVQVFTDSEYQLPYVLGSAHQGCLPPFPADVFMVPQYGYLTLNNGSQAVGRSSFYCLEYFPSQMLRTGNNFTFSYTFEDVPFHSSYAHSQSLDRLMNPLIDQYLYYLSKTNAPSGTTTMSRLQFSQAGASDIRDQSRNWLPGPCYRQQRVSKTAADNNNSDYSWTGATKYHLNGRDSLVNPGPAMASHKDDEEKYFPQSGVLIFGKQDSGKTNVDIEKVMITDEEEIRTTNPVATEQYGSVSTNLQSGNTQAATTDVNTQGVLPGMVWQDRDVYLQGPIWAKIPHTDGHFHPSPLMGGFGLKHPPPQILIKNTPVPANPSTTFSAAKFASFITQYSTGQVSVEIEWELQKENSKRWNPEIQYTSNYNKSVNVDFTVDTNGVYSEPRPIGTRYLTRNL

SEQ ID NO: 2379 - protein, 735 aa, Artificial Sequence
  Description of Artificial Sequence: Synthetic polypeptide
MAADGYLPDWLEDTLSEGIRQWWKLKPGPPPPKPAERHQDDSRGLVLPGYKYLGPFNGLDKGEPVNEADVAALEHDKAYDRQLDSGDNPYLKYNHADAEFQERLKEDTSFGGNLGRAVFQAKRRVLEPLGLVEEPVKTAPGKKRPVEHSPAEPDSSSGTGKAGQQPARKRLNFGQTGDADSVPDPQPLGQPPAAPSGLGTNTMATGSGAPMADNNEGADGVGNSSGNWHCDSTWMGDRVITTSTRTWALPTYNNHLYKQISSQSGASNDNHYFGYSTPWGYFDFNRFHCHFSPRDWQRLINNNWGFRPKRLNFKLFNIQVKEVTQNDGTTTIANNLTSTVQVFTDSEYQLPYVLGSAHQGCLPPFPADVFMVPQYGYLTLNNGSQAVGRSSFYCLEYFPSQMLRTGNNFTFSYTFEDVPFHSSYAHSQSLDRLMNPLIDQYLYYLSKTNAPSGTTTMSRLQFSQAGASDIRDQSRNWLPGPCYRQQRVSKTAADNNNSDYSWTGATKYHLNGRDSLVNPGPAMASHKDDEEKYFPQSGVLIFGKQDSGKTNVDIEKVMITDEEEIRTTNPVATEQYGSVSTNLQSGNTQAATTDVNTQGVLPGMVWQDRDVYLQGPIWAKIPHTDGHFHPSPLMGGFGLKHPPPQILIKNTPVPANPSTTFSAAKFASFITQYSTGQVSVEIEWELQKENSKRWNPEIQYTSNYNKSVNVDFTVDTNGVYSEPRPIGTRYLTRNL

SEQ ID NO: 2380 - protein, 735 aa, Artificial Sequence
  Description of Artificial Sequence: Synthetic polypeptide
MAADGYLPDWLEDTLSEGIRQWWKLKPGPPPPKPAERHQDDSRGLVLPGYKYLGPFNGLDKGEPVNEADAAALEHDKAYDRQLDSGDNPYLKYNHADAEFQERLKEDTSFGGNLGRAVFQAKKRVLEPLGLVEEPVKTAPGKKRPVEHSPAEPDSSSGTGKAGQQPARKRLNFGQTGDADSVPDPQPLGQPPAAPSGLGTNTMATGSGAPMADNNEGADGVGNSSGNWHCDSTWMGDRVITTSTRTWALPTYNNHLYKQISSQSGASNDNHYFGYSTPWGYFDFNRFHCHFSPRDWQRLINNNWGFRPKRLNFKLFNIQVKEVTQNDGTTTIANNLTSTVQVFTDSEYQLPYVLGSAHQGCLPPFPADVFMVPQYGYLTLNNGSQAVGRSSFYCLEYFPSQMLRTGNNFTFSYTFEDVPFHSSYAHSQSLDRLMNPLIDQYLYYLSKTNALSGTTTMSRLQFSQAGASDIRDQSRNWLPGPCYRQQRVSKTAADNNNSDYSWTGATKYHLNGRDSLVNPGPAMASHKDDEEKYFPQSEVLIFGKQDSGKTNVDIEKVMITDEEEIRTTNPVATEQYGSVSTNLQSGNTQAATTDVNTQGVLPGMVWQDRDVYLQGPIWAKIPHTDGHFHPSPLMGGFGLKHPPPQILIKNTPVPANPSTTFSAAKLASFITQYSTGQVSVEIEWELQKENSKRWNPEIQYTSNYNKSVNVDFTVDTNGVYSEPRPIGTRYLTRNL

SEQ ID NO: 2381 - protein, 735 aa, Artificial Sequence
  Description of Artificial Sequence: Synthetic polypeptide
MAADGYLPDWLEDTLSEGIRQWWKLKPGPPPPKPAERHQDDSRGLVLPGYKYLGPFNGLDKGEPVNEADAAALEHDKAYDRQLDSGDNPYLKYNHADAEFQERLKEDTSFGGNLGRAVFQAKKRVLEPLGLVEEPVKTAPGKKRPVEHSPAEPDSSSGTGKAGQQPARKRLNFGQTGDADSVPDPQPLGQPPAAPSGLGTNTMATGSGAPMADNNEGADGVGNSSGNWHCDSTWMGDRVITTSTRTWALPTYNNHLYKQISSQSGASNDNHYFGYSTPWGYFDFNRFHCHFSPRDWQRLINNNWGFRPKRLNFKLFNIQVKEVTQNDGTTTIANNLTSTVQVFTDSEYQLPYALGSAHQGCLPPFPADVFMVPQYGYLTLNNGSQAVGRSSFYCLEYFPSQMLRTGNNFTFSYTFEDVPFHSSYAHSQSLDRLMNPLIDQYLYYLSKTNAPSGTTTMSRLQFSQAGASDIRDQSRNWLPGPCYRQQRVSKTAADNNNSDYSWTGATKYHLNGRDSLVNPGPAMASHKDDEEKYFPQSGVLIFGKQDSGKTNVDIEKVMITDEEEIRTTNPVATEQYGSVSTNLQSGNTQAATTDVNTQGVLPGMVWQDRDVYLQGPIWAKIPHTDGHFHPSPLMGGFGLKHPPPQILIKNTPVPANPSTTFSAAKFASFITQYSTGQVSVEIEWELQKENSKRWNPEIQYTSNYNKSVNVDFTVDTNGVYSEPRPIGTRYLTRNL

SEQ ID NO: 2382 - protein, 735 aa, Artificial Sequence
  Description of Artificial Sequence: Synthetic polypeptide
MAADGYLPDWLEDTLSEGIRQWWKLKPGPPPPKPAERHQDDSRGLVLPGYKYLGPFNGLDKGEPVNEADAAALEHDKAYDRQLDSGDNPYLKYNHADAEFQERLKEDTSFGGNLGRAVFQAKKRVLEPLGLVEEPVKTAPGKKRPVEHSPAEPDSSSGTGKAGQQPARKRLNFGQTGDADSVPDPQPLGQPPAAPSGLGTNTMATGSGAPMADNNEGADGVGNSSGNWHCDSTWMGDRVITTSTRTWALPTYNNHLYKQISSQSGASNDNHYFGYSTPWGYFDFSRFHCHFSPRDWQRLINNNWGFRPKRLNFKLFNIQVKEVTQNDGTTTIANNLTSTVQVFTDSEYQLPYVLGSAHQGCLPPFPADVFMVPQYGYLTLNNGSQAVGRSSFYCLEYFPSQMLRTGNNFTFSYTFEDVPFHSSYAHSQSLDRLMNPLIDQYLYYLSKTNAPSGTTTMSRLQFSQAGASDIRDQSRNWLPGPCYRQQRVSKTAADNNNSDYSWTGATKYHLNGRDSLVNPGPAMASHKDDEEKYFPQSGVLIFGKQDSGKTNVDIEKVMITDEEEIRTTNPVATEQYGSVSTNLQSGNTQAATTDVNTQGVLPGMVWQDRDVYLQGPIWAKIPHTDGHFHPSPLMGGFGLKHPPPQILIKNTPVPANPSTTFSAAKFASFITQYSTGQVSVEIEWELQKENSKRWNPEIQYTSNYNKSVNVDFTVDTNGVYSEPRPIGTRYLTRNL

SEQ ID NO: 2383 - protein, 735 aa, Artificial Sequence
  Description of Artificial Sequence: Synthetic polypeptide
MAADGYLPDWLEDTLSEGIRQWWKLKPGPPPPKPAERHQDDSRGLVLPGYKYLGPFNGLDKGEPVNEADAAALEHDKAYDRQLDSGDNPYLKYNHADAEFQERLKEDTSFGGNLGRAVFQAKKRVLEPLGLVEEPVKTAPGKKRPVEHSPAEPDSSSGTGKAGQQPARKRLNFGQTGDADSVPDPQPLGQPPAAPSGLGTNTMATGSGAPMADNNEGADGVGNSSGNWHCDSTWMGDRVITTSTRTWALPTYNNHLYKQISSQSGASNDNHYVGYSTPWGYFDFNRFHCHFSPRDWQRLINNNWGFRPKRLNFKLFNIQVKEVTQNDGTTTIANNLTSTVQVFTDSEYQLPYVLGSAHQGCLPPFPADVFMVPQYGYLTLNNGSQAVGRSSFYCLEYFPSQMLRTGNNFTFSYTFEDVPFHSSYAHSQSLDRLMNPLIDQYLYYLSKTNAPSGTTTMSRLQFSQAGASDIRDQSRNWLPGPCYRQQRVSKTAADNNNSDYSWTGATKYHLNGRDSLVNPGPAMASHKDDEEKYFPQSGVLIFGKQDSGKTNVDIEKVMITDEEEIRTTNPVATEQYGSVSTNLQSGNTQAATTDVNTQGVLPGMVWQDRDVYLQGPIWAKIPHTDGHFHPSPLMGGFGLKHPPPQILIKNTPVPANPSTTFSAAKFASFITQYSTGQVSVEIEWELQKENSKRWNPEIQYTSNYNKSVNVDFTVDTNGVYSEPRPIGTRYLTRNL

SEQ ID NO: 2384 - protein, 735 aa, Artificial Sequence
  Description of Artificial Sequence: Synthetic polypeptide
MAADGYLPDWLEDTLSEGIRQWWKLKPGPPPPKPAERHQDDSRGLVLPGYKYLGPFNGLDKGEPVNEADAAALEHDKAYDRQLDSGDNPYLKYNHADAEFQERLKEDTSFGGNLGRAVFQAKKRVLEPLGLVEEPVKTAPGKKRPVEHSPAEPDSSSGTGKAGQQPARKRLNFGQTGDADSVPDPQPLGQPPAAPSGLGTNTMATGSGAPMADNNEGADGVGNSSGNWHCDSTWMGDRVITTSTRTWALPTYNNHLYKQISSQSGASNDNHYFGYSTPWGHFDFNRFHCHFSPRDWQRLINNNWGFRPKRLNFKLFNIQVKEVTQNDGTTTIANNLTSTVQVFTDSEYQLPYVLGSAHQGCLPPFPADVFMVPQYGYLTLNNGSQAVGRSSFYCLEYFPSQMLRTGNNFTFSYTFEDVPFHSSYAHSQSLDRLMNPLIDQYLYYLSKTNAPSGTTTMSRLQFSQAGASDIRDQSRNWLPGPCYRQQRVSKTAADNNNSDYSWTGATKYHLNGRDSLVNPGPAMASHKDDEEKYFPQSGVLIFGKQDSGKTNVDIEKVMITDEEEIRTTNPVATEQYGSVSTNLQSGNTQAATTDVNTQGVLPGMVWQDRDVYLQGPIWAKIPHTDGHFHPSPLMGGFGLKHPPPQILIKNTPVPANPSTTFSAAKFASFITQYSTGQVSVEIEWELQKENSKRWNPEIQYTSNYNKSVNVDFTVDTNGVYSEPRPIGTRYLTRNL

SEQ ID NO: 2385 - protein, 735 aa, Artificial Sequence
  Description of Artificial Sequence: Synthetic polypeptide
MAADGYLPDWLEDTLSEGIRQWWKLKPGPPPPKPAERHQDDSRGLVLPGYKYLGPFNGLDKGEPVNEADVAALEHDKAYDRQLDSGDNPYLKYNHADAEFQERLKEDTSFGGNLGRAVFQAKKRVLEPLGLVEEPVKTAPGKKRPVEHSPAEPDSSSGTGKAGQQPARKRLNFGQTGDADSVPDPQPLGQPPAAPSGLGTNTMATGSGAPMADNNEGADGVGNSSGNWHCDSTWMGDRVITTSTRTWALPTYNNHLYKQISSQSGASNDNHYFGYSTPWGYFDFNRFHCHFSPRDWQRLINNDWGFRPKRLNFKLFNIQVKEVTQNDGTTTIANNLTSTVQVFTDSEYQLPYVLGSAHQGCLPPFPADVFMVPQYGYLTLNNGSQAVGRSSFYCLEYFPSQMLRTGNNFTFSYTFEDVPFHSSYAHSQSLDRLMNPLIDQYLYYLSKTNAPSGTTTMSRLQFSQAGASDIRDQSRNWLPGPCYRQQRVSKTAADNNNSDYSWTGATKYHLNGRDSLVNPGPAMASHKDDEEKYFPQSGVLIFGKQDSGKTNVDIEKVMITDEEEIRTTNPVATEQYGSVSTNLQSGNTQAATTDVNTQGVLPGMVWQDRDVYLQGPIWAKIPHTDGHFHPSPLMGGFGLKHPPPQILIKNTPVPANPSTTFSAAKFASFITQYSTGQVSVEIEWELQKENSKRWNPEIQYTSNYNKSVNVDFTVDTNGVYSEPRPIGTRYLTRNL

SEQ ID NO: 2386 - protein, 735 aa, Artificial Sequence
  Description of Artificial Sequence: Synthetic polypeptide
MAADGYLPDWLEDTLSEGIRQWWKLKPGPPPPKPAERHQDDSRGLVLPGYKYLGPFNGLDKGEPVNEADAAALEHDKAYDRQLDSGDNPYLKYNHADAEFQERLKEDTSFGGNLGRAVFQAKKRVLEPLGLVEEPVKTAPGKKRPVEHSPAEPDSSSGTGKAGQQPARKRLNFGQTGDADSVPDPQPLGQPPAAPSGLGTNTMATGSGAPMADNNEGADGVGNSSGNWHCDSTWMGDRVITTSTRTWALPTYNNHLYKQISSQSGASNDNHYFGYSTPWGYFDFNRFHCHFSPRDWQRLINNNWGFRPKRLNFKLFNIQVKEVTQNDGTTTIANNLTSTVQVFTDSEYQLPYVLGSAHQGCLPPFPADVFMVPQYGYLTLNNGSQAVGRSSFYCLEYFPSQMLRTGNNFTFSYTFEDVPFHSSYAHSQSLDRLMNPLIDQYLYYLSKTNAPSGTTTMSRLQFSQAGASDIRDQSRNWLPGPCYRQQRVSKTAADNNNSDYSWTGATKYHLNGRDSLVNPGPAMASHKDDEEKYFPQSGVLIFGKQDSEKTNVDIEKVMITDEEEIRTTNPVATEQYGSVSTNLQSGNTQAATTDVNTQGVLPGMVWQDRDVYLQGPIWAKIPHTDGHFHPSPLMGGFGLKHPPPQILIKNTPVPANPSTTFSAAKFASFITQYSTGQVSVEIEWELQKENSKRWNPEIQYTSNYNKSVNVDFTVDTNGVYSEPRPIGTRYLTRNL

SEQ ID NO: 2387 - protein, 735 aa, Artificial Sequence
  Description of Artificial Sequence: Synthetic polypeptide
MAADGYLPDWLEDTLSEGIRQWWKLKPGPPPPKPAERHQDDSRGLVLPGYKYLGPFNGLDKGEPVNEADAAALEHDKAYDRQLDSGDNPYLKYNHADAEFQERLKEDTSFGGNLGRAVFQAKKRVLEPLGLVEEPVKTAPGKKRPVEHSPAEPDSSSGTGKAGQQPARKRLNFGQTGDADSVPDPQPLGQPPAAPSGLGTNTMATGSGAPMADNNEGADGVGNSSGNWHCDSTWMGDRVITTSTRTWALPTYNNHLYKQISSQSGASNDNHYFGYSTPWGYFDFNRFHCHFSPRDWQRLINNNWGFRPKRLNFKLFNIQVKEVTQNDGTTTIANNLTSTVQVFTDSEYQLPYVLGSAHQGCLPPFPADVFMVPQYGYLTLNNGSQAVGRSSFYCLEYFPSQMLRTGNNFTFSYTFEDVPFHSSYAHSQSLDRLMNPLIDQYLYYLSKTNAPSGTTTMSRLQFSQAGASDIRDQSRNWLPGPCYRQQRVSKTAADNNNSDYSWTGATKYHLNGRDSLVNPGPAMASHKDDEEKYFPQSGVLIFGKQDSGKTNVDIEKVMITDEEEIRTTNPVATEQYGSVSTNLQSGNTQAATTDVNTQGVLPGMVWQDRDVYLQGPIWAKIPHTDGHFHPSPLMGGFGLKHPPPQILIKNTPVPANPSTTFSAAKFASFITQYSTGQVSVEIEWELQKENSKRWNPEIQYTSNYNKSVNVDFTVDTNGVYSEPRPIGTRYLTRNL

SEQ ID NO: 2388 - protein, 735 aa, Artificial Sequence
  Description of Artificial Sequence: Synthetic polypeptide
MAADGYLPDWLEDTLSEGIRQWWKLKPGPPPPKPAERHQDDSRGLVLPGYKYLGPFNGLDKGEPVNEADVAALEHDKAYDRQLDSGDNPYLKYNHADAEFQERLKEDTSFGGNLGRAVFQAKKRVLEPLGLVEEPVKTAPGKKRPVEHSPAEPDSSSGTGKAGQQPARKRLNFGQTGDADSVPDPQPLGQPPAAPSGLGTNTMATGSGAPMADNNEGADGVGNSSGNWHCDSTWMGDRVITTSTRTWALPTYNNHLYKQISSQSGASNDNHYFGYSTPWGYFDFNRFHCHFSPRDWQRLINNNWGFRPKRLNFKLFNIQVKEVTQNDGTTTIANNLTSTVQVFTDSEYQLPYVLGSAHQGCLPPFPADVFMVPQYGYLTLNNGSQAVGRSSFYCLEYFPSQMLRTGNNFTFSYTFEDVPFHSSYAHSQSLDRLMNPLIDQYLYYLSKTNAPSGTTTMSRLQFSQAGASDIRDQSRNWLPGPCYRQQRVSKTAADNNNSDYSWTGATKYHLNGRDSLVNPGPAMASHKDDEEKYFPQSGVLIFGKQDSGKTNVDIEKVMITDEEEIRTTNPVATEQYGSVSTNLQSGNTQAATTDVNTQGVLPGMVWQDRDVYLQGPIWAKIPHTDGHFHPSPLMGGFGLKHPPPQILIKNTPVPANPSTTFSAAKFASFITQYSTGQVSVEIEWELQKENSKRWNPEIQYTSNYNKSVNVDFTVDTNGVYSEPRPIGTRYLTRNL

SEQ ID NO: 2389 - protein, 735 aa, Artificial Sequence
  Description of Artificial Sequence: Synthetic polypeptide
MAADGYLPDWLEDTLSEGIRQWWKLKPGPPPPKPAERHQDDSRGLVLPGYKYLGPFNGLDKGEPVNEADAAALEHDKAYDRQLDSGDNPYLKYNHADAEFQERLKEDTSFGGNLGRAVFQAKKRVLEPLGLVEEPVKTAPGKKRPVEHSPAEPDSSSGTGKAGQQPARKRLNFGQTGDADSVPDPQPLGQPPAAPSGLGTNTMATGSGAPMADNNEGADGVGNSSGNWHCDSTWMGDRVITTSTRTWALPTYNNHLYKQISSQSGASNDNHYFGYSTPWGYFDFNRFHCHFSPRDWQRLINNNWGFRPKRLNFKLFNIQVKEVTQNDGTTTIANNLTSTVQVFTDSEYQLPYVLGSAHQGCLPPFPADVFMVPQYGYLTLNNGSQAVGRSSFYCLEYFPSQMLRTGNNFTFSYTFEDVPFHSSYAHSQSLDRLMNPLIDQYLYYLSKTNAPSGTTTMSRLQFSQAGASDIRDQSRNWLPGPCYRQQRVSKTAADNNNSDYPWTGATKYHLNGRDSLVNPGPAMASHKDDEEKYFPQSGVLIFGKQDSGKTNVDIEKVMITDEEEIRTTNPVATEQYGSVSTNLQSGNTQAATTDVNTQGVLPGMVWQDRDVYLQGPIWAKIPHTDGHFHPSPLMGGFGLKHPPPQILIKNTPVPANPSTTFSAAKFASFITQYSTGQVSVEIEWELQKENSKRWNPEIQYTSNYNKSVNVDFTVDTNGVYSEPRPIGTRYLTRNL

SEQ ID NO: 2390 - protein, 735 aa, Artificial Sequence
  Description of Artificial Sequence: Synthetic polypeptide
MAADGYLPDWLEDTLSEGIRQWWKLKPGPPPPKPAERHQDDSRGLVLPGYKYLGPFNGLDKGEPVNEADAAALEHDKAYDRQLDSGDNPYLKYNHADAEFQERLKEDTSFGGNLGRAVFQAKKRVLEPLGLVEEPVKTAPGKKRPVEHSPAEPDSSSGTGKAGQQPARKRLNFGQTGDADSVPDPQPLGQPPAAPSGLGTNTMATGSGAPMADNNEGADGVGNSSGNWHCDSTWMGDRVITTSTRTWALPTYNNHLYKQISSQSGASNDNHYFGYSTPWGYFDFNRFHCHFSPRDWQRLINNNWGFRPKRLNFKLFNIQVKEVTQNDGTTTIANNLTSTVQVFTDSEYQLPYVLGSAHQGCLPPFPADVFMVPQYGYLTLNNGSQAVGRSSFYCLEYFPSQMLRTGNNFTFSYTFEDVPFHSSYAHSQSLDRLMNPLIDQYLYYLSKTNAPSGTTTMSRLQFSQAGASDIRDQSRNWLPGPCYRQQRVSKTAADNNNSDYSWTGATKYHLNGRDSLVNPGPAMASHKDDEEKYFPQSGVLIFGKQDSGKTNVDIEKVMITDEEEIRTTNPVATEQYGSVSTNLQSGNTQAATTDVNTQGALPGMVWQDRDVYLQGPIWAKIPHTDGHFHPSPLMGGFGLKHPPPQILIKNTPVPANPSTTFSAAKFASFITQYSTGQVSVEIEWELQKENSKRWNPEIQYTSNYNKSVNVDFTVDTNGVYSEPRPIGTRYLTRNL

SEQ ID NO: 2391 - protein, 735 aa, Artificial Sequence
  Description of Artificial Sequence: Synthetic polypeptide
MAADGYLPDWLEDTLSEGIRQWWKLKPGPPPPKPAERHQDDSRGLVLPGYKYLGPFNGLDKGEPVNEADAAALEHDKAYDRQLDSGDNPYLKYNHADAEFQERLKEDTSFGGNLGRAVFQAKKRVLEPLGLVEEPVKTAPGKKRPVEHSPAEPDSSSGTGKAGQQPARKRLNFGQTGDADSVPDPQPLGQPPAAPSGLGTNTMATGSGAPMADNNEGADGVGNSSGNWHCDSTWMGDRVITTSTRTWALPTYNNHLYKQISSQSGASNDNHYFGYSTPWGYFDFNRFHCHFSPRDWQRLINNNWGFRPKRLNFKLFNIQVKEVTQNDGTTTIANNLTSTVQVFTDSEYQLPYVLGSAHQGCLPPFPADVFMVPQYGYLTLNNGSQAVGRSSFYCLEYFPSQMLRTGNNFTFSYTFEDVPFHSSYAHSQSLDRLMNPLIDQYLYYLSKTNAPSGTTTMSRLQFSQAGASDIRDQSRNWLPGPCYRQQRVSKTAADNNNSDYSWTGATKYHLNGRDSLVNPGPAMASHKDDEEKYFPQSGVLIFGKQDSGKTNVDIEKVMITDEEEIRTTNPVATEQYGSVSTNLQSGNTQAATTDVNTQGVLPGMVWQDRDVYLQGPIWAKIPHTDGHFHPSPLMGGFGLKHPPPQILIKNTPVPANPSTTFSAAKLASFITQYSTGQVSVEVEWELQKENSKRWNPEIQYTSNYNKSVNVDFTVDTNGVYSEPRPIGTRYLTRNL

SEQ ID NO: 2392 - protein, 735 aa, Artificial Sequence
  Description of Artificial Sequence: Synthetic polypeptide
MAADGYLPDWLEDTLSEGIRQWWKLKPGPPPPKPAERHQDDSRGLVLPGYKYLGPFNGLDKGEPVNEADVAALEHDKAYDRQLDSGDNPYLKYNHADAEFQERLKEDTSFGGNLGRAVFQAKKRVLEPLGLVEEPVKTAPGKKRPVEHSPAEPDSSSGTGKAGQQPARKRLNFGQTGDADSVPDPQPLGQPPAAPSGLGTNTMATGSGAPMADNNEGADGVGNSSGNWHCDSTWMGDRVITTSTRTWALPTYNNHLYKQISSQSGASNDNHYFGYSTPWGYFDFNRFHCHFSPRDWQRLINNNWGFRPKRLNFKLFNIQVKEVTQNDGTTTIANNLTSTVQVFTDSEYQLPYVLGSAHQGCLPPFPADVFMVPQYGYLTLNSGSQAVGRSSFYCLEYFPSQMLRTGNNFTFSYTFEDVPFHSSYAHSQSLDRLMNPLIDQYLYYLSKTNAPSGTTTMSRLQFSQAGASDIRDQSRNWLPGPCYRQQRVSKTAADNNNSDYSWTGATKYHLNGRDSLVNPGPAMASHKDDEEKYFPQSGVLIFGKQDSGKTNVDIEKVMITDEEEIRTTNPVATEQYGSVSTNLQSGNTQAATTDVNTQGVLPGMVWQDRDVYLQGPIWAKIPHTDGHFHPSPLMGGFGLKHPPPQILIKNTPVPANPSTTFSAAKFASFITQYSTGQVSVEIEWELQKENSKRWNPEIQYTSNYNKSVNVDFTVDTNGVYSEPRPIGTRYLTRNL

SEQ ID NO: 2393 - protein, 735 aa, Artificial Sequence
  Description of Artificial Sequence: Synthetic polypeptide
MAADGYLPDWLEDTLSEGIRQWWKLKPGPPPPKPAERHQDDSRGLVLPGYKYLGPFNGLDKGEPVNEADVAALEHDKAYDRQLDSGDNPYLKYNHADAEFQERLKEDTSFGGNLGRAVFQAKKRVLEPLGLVEEPVKTAPGKKRPVEHSPAEPDSSSGTGKAGQQPARKRLNFGQTGGADSVPDPQPLGQPPAAPSGLGTNTMATGSGAPMADNNEGADGVGNSSGNWHCDSTWMGDRVITTSTRTWALPTYNNHLYKQISSQSGASNDNHYFGYSTPWGYFDFNRFHCHFSPRDWQRLINNNWGFRPKRLNFKLFNIQVKEVTQNDGTTTIANNLTSTVQVFTDSEYQLPYVLGSAHQGCLPPFPADVFMVPQYGYLTLNNGSQAVGRSSFYCLEYFPSQMLRTGNNFTFSYTFEDVPFHSSYAHSQSLDRLMNPLIDQYLYYLSKTNAPSGTTTMSRLQFSQAGASDIRDQSRNWLPGPCYRQQRVSKTAADNNNSDYSWTGATKYHLNGRDSLVNPGPAMASHKDDEEKYFPQSGVLIFGKQDSGKTNVDIEKVMITDEEEIRTTNPVATEQYGSVSTNLQSGNTQAATTDVNTQGVLPGMVWQDRDVYLQGPIWAKIPHTDGHFHPSPLMGGFGLKHPPPQILIKNTPVPANPSTTFSAAKFASFITQYSTGQVSVEIEWELQKENSKRWNPEIQYTSNYNKSVNVDFTVDTNGVYSEPRPIGTRYLTRNL

SEQ ID NO: 2394 - protein, 735 aa, Artificial Sequence
  Description of Artificial Sequence: Synthetic polypeptide
MAADGYLPDWLEDTLSEGIRQWWKLKPGPPPPKPAERHQDDSRGLVLPGYKYLGPFNGLDKGEPVNEADAAALEHDKAYDRQLDSGDNPYLKYNHADAEFQERLKEDTSFGGNLGRAVFQAKKRVLEPLGLVEEPVKTAPGKKRPVEHSPAEPDSSSGTGKAGQQPARKRLNFGQTGDADSVPDPQPLGQPPAAPSGLGTNTMATGSGAPMADNNEGADGVGNSSGNWHCDSTWMGDRVITTSTRTWALPTYNNHLYKQISSQSGASNDNHYFGYSTPWGYFDFNRFHCHFSPRDWQRLINNNWGFRPKRLNFKLFNIQVKEVTQNDGTTTIANNLTSTVQVFTDSEYQLPYALGSAHQGCLPPFPADVFMVPQYGYLTLNNGSQAVGRSSFYCLEYFPSQMLRTGNNFTFSYTFEDVPFHSSYAHSQSLDRLMNPLIDQYLYYLSKTNAPSGTTTMSRLQFSQAGASDIRDQSRNWLPGPCYRQQRVSKTAADNNNSDYSWTGATKYHLNGRDSLVNPGPAMASHKDDEEKYFPQSGVLIFGKQDSGKTNVDIEKVMITDEEEIRTTNPVATEQYGSVSTNLQSGNTQAATTDVNTQGVLPGMVWQDRDVYLQGPIWAKIPHTDGHFHPSPLMGGFGLKHPPPQILIKNTPVPANPSTTFSAAKFASFITQYSTGQVSVEIEWELQKEDSKRWNPEIQYTSNYNKSVNVDFTVDTNGVYSEPRPIGTRYLTRNL

SEQ ID NO: 2395 - protein, 735 aa, Artificial Sequence
  Description of Artificial Sequence: Synthetic polypeptide
MAADGYLPDWLEDTLSEGIRQWWKLKPGPPPPKPAERHQDDSRGLVLPGYKYLGPFNGLDKGEPVNEADAAALEHDKAYDRQLDSGDNPYLKYNHADAEFQERLKEDTSFGGNLGRAVFQAKKRVLEPLGLVEEPVKTAPGKKRPVEHSPAEPDSSSGTGKAGQQPARKRLNFGQTGDADSVPDPQPLGQPPAAPSGLGTNTMATGSGAPMADNNEGADGVGNSSGNWHCDSTWMGDRVITTSTRTWALPTYNNHLYKQISSQSGASNDNHYFGYSTPWGYFDFNRFHCHFSPRDWQRLINNNWGFRPKRLNFKLFNIQVKEVTQNDGTTTIANNLTSTVQVFTDSEYQLPYVLGSAHQGCLPPFPADVFMVPQYGYLTLNNGSQAVGRSSFYCLEYFPSQMLRTGNNFTFSYTFEDVPFHSSYAHSQSLDRLMNPLIDQYLYYLSKTNAPSGTTTMSRLQFSQAGASDIRDQSRNWLPGPCYRQQRVSKTAADNNNSDYSWTGATKYHLNGRDSLVNPGPAMASHKDDEEKYFPQSGVLIFGKQDSGKTNVDIEKVMITDEEEIRTTNPVATEQYGSVSTNLQSGNTQAATTDVNTQGVLPGMVWQDRDVYLQGPIWAKIPHTDGHFHPSPLMGGFGLKHPPPQILIKNTPVPANPSTTSSAAKFASFITQYSTGQVSVEIEWELQKENSKRWNPEIQYTSNYNKSVNVDFTVDTNGVYSEPRPIGTRYLTRNL

SEQ ID NO: 2396 - protein, 735 aa, Artificial Sequence
  Description of Artificial Sequence: Synthetic polypeptide
MAADGYLPDWLEDTLSEGIRQWWKLKPGPPPLKPAERHQDDSRGLVLPGYKYLGPFNGLDKGEPVNEADAAALEHDKAYDRQLDSGDNPYLKYNHADAEFQERLKEDTSFGGNLGRAVFQAKKRVLEPLGLVEEPVKTAPGKKRPVEHSPAEPDSSSGTGKAGQQPARKRLNFGQTGDADSVPDPQPLGQPPAAPSGLGTNTMATGSGAPMADNNEGADGVGNSSGNWHCDSTWMGDRVITTSTRTWALPTYNNHLYKQISSQSGASNDNHYFGYSTPWGYFDFNRFHCHFSPRDWQRLINNNWGFRPKRLNFKLFNIQVKEVTQNDGTTTIANNLTSTVQVFTDSEYQLPYVLGSAHQGCLPPFPADVFMVPQYGYLTLNNGSQAVGRSSFYCLEYFPSQMLRTGNNFTFSYTFEDVPFHSSYAHSQSLDRLMNPLIDQYLYYLSKTNAPSGTTTMSRLQFSQAGASDIRDQSRNWLPGPCYRQQRVSKTAADNNNSDYSWTGATKYHLNGRDSLVNPGPAMASHKDDEEKYFPQSGVLIFGKQDSGKTNVDIEKVMITDEEEIRTTNPVATEQYGSVSTNLQSGNTQAATTDVNTQGVLPGMVWQDRDVYLQGPIWAKIPHTDGHFHPSPLMGGFGLKHPPPPILIKNTPVPANPSTTFSAAKFASFITQYSTGQVSVEIEWELQKENSKRWNPEIQYTSNYNKSVNVDFTVDTNGVYSEPRPIGTRYLTRNL

SEQ ID NO: 2397 - protein, 735 aa, Artificial Sequence
  Description of Artificial Sequence: Synthetic polypeptide
MAADGYLPDWLEDTLSEGIRQWWKLKPGPPPPKPAERHQDDSRGLVLPGYKYLGPFNGLDKGEPVNEADAAALEHDKAYDRQLDSGDNPYLKYNHADAEFQERLKEDTSFGGNLGRAVFQAKKRVLEPLGLVEEPVKTAPGKKRPVEHSPAEPDSSSGTGKAGQQPARKRLNFGQTGDADSVPDPQPLGQPPAAPSGLGTNTMATGSGAPMADNNEGADGVGNSSGNWHCDSTWMGDRVITTSTRTWALPTYNNHLYKQISSQSGASNDNHYFGYSTPWGYFDFNRFHCHFSPRDWQRLINNNWGFRPKRLNFKLFNIQVKEVTQNDGTTTIANNLTSTVQVFTDSEYQLPYVLGSAHQGCLPPFPADVFMVPQYGYLTLNNGSQAVGRSSFYCLEYFPSQMLRTGNNFTFSYTFEDVPFHSSYAHSQSLDRLMNPLIDQYLYYLSKTNAPSGTTTMSRLQFSQAGASDIRDQSRNWLPGPCYRQQRVSKTAADNNNSDYSWTGATKYHLNGRDSLVNPGPAMASHKDDEEKYFPQSGVLIFGKQDSGKTNVDIEKVMITDEEEIRATNPVATEQYGSVSTNLQSGNTQAATTDVNTQGVLPGMVWQDRDVYLQGPIWAKIPHTDGHFHPSPLMGGFGLKHPPPQILIKNTPVPANPSTTFSAAKFASFITQYSTGQVSVEIEWELQKENSKRWNPEIQYTSNYNKSVNVDFTVDTNGVYSEPRPIGTRYLTRNL

SEQ ID NO: 2398 - protein, 735 aa, Artificial Sequence
  Description of Artificial Sequence: Synthetic polypeptide
MAADGYLPDWLEDTLSEGIRQWWKLKPGPPPPKPAERHQDDSRGLVLPGYKYLGPFNGLDKGEPVNEADAAALEHDKAYDRQLDSGDNPYLKYNHADAEFQERLKEDTSFGGNLGRAVFQAKKRVLEPLGLVEEPVKTAPGKKRPVEHSPAEPDSSSGTGKAGQQPARKRLNFGQTGDADSVPDPQPLGQPPAAPSGLGTNTMATGSGAPMADNNEGADGVGNSSGNWHCDSTWMGDRVITTSTRTWALPTYNNHLYKQISSQSGASNDNHYFGYSTPWGYFDFNRFHCHFSPRDWQRLISNNWGFRPKRLNFKLFNIQVKEVTQNDGTTTIANNLTSTVQVFTDSEYQLPYVLGSAHQGCLPPFPADVFMVPQYGYLTLNNGSQAVGRSSFYCLEYFPSQMLRTGNNFTFSYTFEDVPFHSSYAHSQSLDRLMNPLIDQYLYYLSKTNAPSGTTTMSRLQFSQAGASDIRDQSRNWLPGPCYRQQRVSKTAADNNNSDYSWTGATKYHLNGRDSLVNPGPAMASHKDDEEKYFPQSGVLIFGKQDSGKTNVDIEKVMITDEEEIRTTNPVATEQYGSVSTNLQSGNTQAATTDVNTQGVLPGMVWQDRDVYLQGPIWAKIPHTDGHFHPSPLMGGFGLKHPPPQILIKNTPVPANPSTTFSAAKFASFITQYSTGQVSVEIEWEPQKENSKRWNPEIQYTSNYNKSVNVDFTVDTNGVYSEPRPIGTRYLTRNL

SEQ ID NO: 2399 - protein, 735 aa, Artificial Sequence
  Description of Artificial Sequence: Synthetic polypeptide
MAADGYLPDWLEDTLSEGIRQWWKLKPGPPPPKPAERHQDDSRGLVLPGYKYLGPFNGLDKGEPVNEADAAALEHDKAYDRQLDSGDNPYLKYNHADAEFQERLKEDTSFGGNLGRAVFQAKKGVLEPLGLVEEPVKTAPGKKRPVEHSPAEPDSSSGTGKAGQQPARKRLNFGQTGDADSVPDPQPLGQPPAAPSGLGTNTMATGSGAPMADNNEGADGVGNSSGNWHCDSTWMGDRVITTSTRTWALPTYNNHLYKQISSQSGASNDNHYFGYSTPWGYFDFNRFHCHFSPRDWQRLINNNWGFRPKRLNFKLFNIQVKEVTQNDGTTTIANNLTSTVQVFTDSEYQLPYVLGSAHQGCLPPFPADVFMVPQYGYLTLNNGSQAVGRSSFYCLEYFPSQMLRTGNNFTFSYTFEDVPFHSSYAHSQSLDRLMNPLIDQYLYYLSKTNAPSGTTTMSRLQFSQAGASDIRDQSRNWLPGPCYRQQRVSKTAADNNNSDYSWTGATKYHLNGRDSLVNPGPAMASHKDDEEKYFPQSGVLIFGKQDSGKTNVDIEKVMITDEEEIRTTNPVATEQYGSVSTNLQSGNTQAATTDVNTQGVLPGMVWQDRDVYLQGPIWAKIPHTDGHFHPSPLMGGFGLKHPPPQILIKNTPVPANPSTTFSAAKFASFITQYSTGQVSVEIEWELQKENSKRWNPEIQYTSNYNKSVNVDFTVDTNGVYSEPRPIGTRYLTRNL

SEQ ID NO: 2400 - protein, 735 aa, Artificial Sequence
  Description of Artificial Sequence: Synthetic polypeptide
MAADGYLPDWLEDTLSEGIRQWWKLKPGPPPPKPAERHQDDSRGLVLPGYKYLGPFNGLDKGEPVNEADAAALEHDKAYDRQLDSGDNPYLKYNHADAEFQERLKEDTSFGGNLGRAVFQAKKRVLEPLGLVEEPVKTAPGKKRPVEHSPAEPDSSSGTGKAGQQPARKRLNFGQTGDADSVPDPQPLGQPPAAPSGLGTNTMATGSGAPMADNNEGADGVGNSSGNWHCDSTWMGDRVITTSTRTWALPTYNNHLYKQISSQSGASNDNHYFGYSTPWGYFDFNRFHCHFSPRDWQRLINNNWGFRPKRLNFKLFNIQVKEVTQNDGTTTIANNLTSTVQVFTDSEYQLPYVLGSAHQGCLPPFPADVFMVPQYGYLTLNNGSQAVGRSSFYCLEYFPSQMLRTGNNFTFSYTFEDVPFHSSYAHSQSLDRLMNPLIDQYLYYLSRTNAPSGTTTMSRLQFSQAGASDIRDQSRNWLPGPCYRQQRVSKTAADNNNSDYSWTGATKYHLNGRDSLVNPGPAMASHKDDEEKYFPQSGVLIFGKQDSGKTNVDIEKVMITDEEEIRTTNPVATEQYGSVSTNLQSGNTQAATTDVNTQGVLPGMVWQDRDVYLQGPIWAKIPHTDGHFHPSPLMGGFGLKHPPPQILIKNTPVPANPSTTFSAAKFASFITQYSTGQVSVEIEWELQKENSKRWNPEIQYTSNYNKSVNVDFTVDTNGVYSEPRPIGTRYLTRNL

SEQ ID NO: 2401 - protein, 735 aa, Artificial Sequence
  Description of Artificial Sequence: Synthetic polypeptide
MAADGYLPDWLEDTLSEGIRQWWKLKPGPPPPKPAERHQDDSRGLVLPGYKYLGPFNGLDKGEPVNEADAAALEHDKAYDRQLDSGDNPYLKYNHADAEFQERLKEDTSFGGNLGRAVFQAKKRVLEPLGLVEEPVKTAPGKKRPVEHSPAEPDSSSGTGKAGQQPARKRLNFGQTGDADSVPDPQPLGQPPAAPSGLGTNTMATGSGAPMADNNEGADGVGNSSGNWHCDSTWMGDRVITTSTRTWALPTYNNHLYKQISSQSGASNDNHYFGYSTPWGYFDFNRFHCHFSPRDWQRLINNNWGFRPKRLNFKLFNIQVKEVTQNDGTTTIANNLTSTVQVFTDSEYQLPYVLGSAHQGCLPPFPADVFMVPQYGYLTLNNGSQAVGRSSFYCLEYFPSQMLRTGNNFTFSYTFEDVPFHSSYAHSQSLDRLMNPLIDQYLYYLSKTNAPSGTTTMSRLQFSQAGASDIRDQSRNWLPGPCYRQQRVSKTAADNNNSDYSWTGATKYHLNGRDSLVNPGPAMASHKDDEEKYFPQSGVLIFGKQDSGKTNVDIEKVMITDEEEIRTTNPVATEQYGSVSTNLQSGNTQAATTDVNTQGVLPGMVWQDRDVYLQGPIWAKIPHTDGHFHPSPLMGGFGLKHPPPQILIKNTPVPANPSTTFSAAKFASFITQYSTGQVSVEIEWELQKENSKRWNPEIQYTSNYNKSVNVDLTVDTNGVYSEPRPIGTRYLTRNL

SEQ ID NO: 2402 - protein, 735 aa, Artificial Sequence
  Description of Artificial Sequence: Synthetic polypeptide
MAADGYLPDWLEDTLSEGIRQWWKLKPGPPPLKPAERHQDDSRGLVLPGYKYLGPFNGLDKGEPVNEADAAALEHDKAYDRQLDSGDNPYLKYNHADAEFQERLKEDTSFGGNLGRAVFQAKKRVLEPLGLVEEPVKTAPGKKRPVEHSPAEPDSSSGTGKAGQQPARKRLNFGQTGDADSVPDPQPLGQPPAAPSGLGTNTMAAGSGAPMADNNEGADGVGNSSGNWHCDSTWMGDRVITTSTRTWALPTYNNHLYKQISSQSGASNDNHYFGYSTPWGYFDFNRFHCHFSPRDWQRLINNNWGFRPKRLNFKLFNIQVKEVTQNDGTTTIANNLTSTVQVFTDSEYQLPYVLGSAHQGCLPPFPADVFMVPQYGYLTLNNGSQAVGRSSFYCLEYFPSQMLRTGNNFTFSYTFEDVPFHSSYAHSQSLDRLMNPLIDQYLYYLSKTNAPSGTTTMSRLQFSQAGASDIRDQSRNWLPGPCYRQQRVSKTAADNNNSDYSWTGATKYHLNGRDSLVNPGPAMASHKDDEEKYFPQSGVLIFGKQDSGKTNVDIEKVMITDEEEIRTTNPVATEQYGSVSTNLQSGNTQAATTDVNTQGVLPGMVWQDRDVYLQGPIWAKIPHTDGHFHPSPLMGGFGLKHPPPQILIKNTPVPANPSTTFSAAKFASFITQYSTGQVSVEIEWELQKENSKRWNPEIQYTSNYNKSVNVDFTVDTNGVYSEPRPIGTRYLTRNL

SEQ ID NO: 2403 - protein, 735 aa, Artificial Sequence
  Description of Artificial Sequence: Synthetic polypeptide
MAADGYLPDWLEDTLSEGIRQWWKLKPGPPPPKPAERHQDDSRGLVLPGYKYLGPFNGLDKGEPVNEADAAALEHDKAYDRQLDSGDNPYLKYNHADAEFQERLKEDTSFGGNLGRAVFQAKKRVLEPLGLVEEPVKTAPGKKRPVEHSPAEPDSSSGTGKAGQQPARKRLNFGQTGDADSVPDPQPLGQPPAAPSGLGTNTMATGSGAPMADNNEGADGVGNSSGNWHCDSTWMGDRVITTSTRTWALPTYNNHLYKQISSQSGASNDNHYFGYSTPWGYFDFNRFHCHFSPRDWQRLINNNWGFRPKRLNFKLFNIQVKEVTQNDGTTTIANNLTSTVQVFTDSEYQLPYVLGSAHQGCLPPFPADVFMVPQYGYLTLNNGSQAVGRSSFYCLEYFPSQMLRTGNNFTFSYTFEDVPFHSSYAHSQSLDRLMNPLIDQYLYYLSKTNAPSGTTTMSRLQFSQAGASDIRDQSRNWLPGPCYRQQRVSKTAADNNNSDYSWTGATKYHLNGRDSLVNPGPAMASHKDDEEKYFPQSGVLIFGKQDSGKTNVDIEKVMITDEEEIRTTNPVATEQYGSVSTNLQSGDTQAATTDVNTQGVLPGMVWQDRDVYLQGPIWAKIPHTDGHFHPSPLMGGFGLKHPPPQILIKNTPVPANPSTTFSAAKFASFITQYSTGQVSVEIEWELQKENSKRWNPEIQYTSNYNKSVNVDFTVDTNGVYSEPRPIGTRYLTRNL

SEQ ID NO: 2404 - protein, 735 aa, Artificial Sequence
  Description of Artificial Sequence: Synthetic polypeptide
MAADGYLPDWLEDTLSEGIRQWWKLKPGPPPPKPAERHQDDSRGLVLPGYKYLGPFNGLDKGEPVNEADAAALEHDKAYDRQLDSGGNPYLKYNHADAEFQERLKEDTSFGGNLGRAVFQAKKRVLEPLGLVEEPVKTAPGKKRPVEHSPAEPDSSSGTGKAGQQPARKRLNFGQTGDADSVPDPQPLGQPPAAPSGLGTNTMATGSGAPMADNNEGADGVGNSSGNWHCDSTWMGDRVITTSTRTWALPTYNNHLYKQISSQSGASNDNHYFGYSTPWGYFDFNRFHCHFSPRDWQRLINNNWGFRPKRLNFKLFNIQVKEVTQNDGTTTIANNLTSTVQVFTDSEYQLPYVLGSAHQGCLPPFPADVFMVPQYGYLTLNNGSQAVGRSSFYCLEYFPSQMLRTGNNFTFSYTFEDVPFHSSYAHSQSLDRLMNPLIDQYLYYLSKTNAPSGTTTMSRLQFSQAGASDIRDQSRNWLPGPCYRQQRVSKTAADNNNSDYSWTGATKYHLNGRDSLVNPGPAMASHKDDEEKYFPQSGVLIFGKQDSGKTNVDIEKVMITDEEEIRTTNPVATEQYGSVSTNLQSGNTQAATTDVNTQGVLPGMVWQDRDVYLQGPIWAKIPHTDGHFHPSPLMGGFGLKHPPPQILIKNTPVPANPSTTFSAAKFASFITQYSTGQVSVEIEWELQKENSKRWNPEIQYTSNYNKSVNVDFTVDTNGVYSEPRPIGTRYLTRNL

SEQ ID NO: 2405 - protein, 735 aa, Artificial Sequence
  Description of Artificial Sequence: Synthetic polypeptide
MAADGYLPDWLEDTLSEGIRQWWKLKPGPPPPKPAERHQDDSRGLVLPGYKYLGPFNGLDKGEPVNEADAAALEHDKAYDRQLDSGDNPYLKYNHADAEFQERLKEDTSFGGNLGRAVFQAKKRVLEPLGLVEEPVKTAPGKKRPVEHSPAEPDSSSGTGKAGQQPARKRLNFGQTGDADSVPDPQPLGQPPAAPSGLGTNTMATGSGAPMADNNEGADGVGNSSGNWHCDSTWMGDRVITTSTRTWALPTYNNHLYKQISSQSGASNDNHYFGYSTPWGYFDFNRFHCHFSPRDWQRLINNNWGFRPKRLNFKLFNIQVKEVTQNDGTTTIANNLTSTVQVFTDSEYQLPYVLGSAHQGCLPPFPADVFMVPQYGYLTLNNGSQAVGRSSFYCLEYFPSQMLRTGNNFTFSYTFEDVPFHSSYAHSQSLDRLMNPLIDQYLYYLSKTNAPSGTTTMSRLQFSQAGASDIRDQSRNWLPGPCYRQQRVSKTAADNNNSDYSWTGATKYHLNGRDSLVNPGPAMASHKDDEEKYFPQSGVLIFGKQDSGKTNVDIEKVMITDEEEIRTTNPVATEQYGSVSTNLQSGNTQAATTDVNTQGVLPGMVWQDRDVYLQGPIWAKIPHTDGHFHPSPLMGGFGLKHPPPQILIKNTPVPANPSTTFSAAKLASFITQYSTGQVSVEIEWELQKENSKRWNPEIQYTSNYNKSVNVDFTVDTNGVYSEPRPIGTRYLTRNL

SEQ ID NO: 2406 - protein, 735 aa, Artificial Sequence
  Description of Artificial Sequence: Synthetic polypeptide
MAADGYLPDWLEDTLSEGIRQWWKLKPGPPPPKPAERHQDDSRGLVLPGYKYLGPFNGLDKGEPVNEADAAALEHDKAYDRQLDSGDNPYLKYNHADAEFQERLKEDTSFGGNLGRAVFQAKKRVLEPLGLVEEPVKTAPGKKRPVEHSPAEPDSSSGTGKAGQQPARKRLNFGQTGDADSVPDPQPLGQPPAAPSGLGTNTMATGSGAPMADNNEGADGVGNSSGNWHCDSTWMGDRVITTSTRTWALPTYNNHLYKQISSQSGASNDNHYFGYSTPWGYFDFNRFHCHFSPRDWQRLINNNWGFRPKRLNFKLFNIQVKEVTQSDGTTTIANNLTSTVQVFTDSEYQLPYVLGSAHQGCLPPFPADVFMVPQYGYLTLNNGSQAVGRSSFYCLEYFPSQMLRTGNNFTFSYTFEDVPFHSSYAHSQSLDRLMNPLIDQYLYYLSKTNAPSGTTTMSRLQFSQAGASDIRDQSRNWLPGPCYRQQRVSKTAADNNNSDYSWTGATKYHLNGRDSLVNPGPAMASHKDDEEKYFPQSGILIFGKQDSGKTNVDIEKVMITDEEEIRTTNPVATEQYGSVSTNLQSGNTQAATTDVNTQGVLPGMVWQDRDVYLQGPIWAKIPHTDGHFHPSPLMGGFGLKHPPPQILIKNTPVPANPSTTFSAAKFASFITQYPTGQVSVEIEWELQKENSKRWNPEIQYTSNYNKSVNVDFTVDTNGVYSEPRPIGTRYLTRNL

SEQ ID NO: 2407 - protein, 735 aa, Artificial Sequence
  Description of Artificial Sequence: Synthetic polypeptide
MAADGYLPDWLEDTLSEGIRQWWKLKPGPPPPKPAERHQDDSRGLVLPGYKYLGPFNGLDKGEPVNEADAAALEHDKAYDRQLDSGDNPYLKYNHADAEFQERLKEDTSFGGNLGRAVFQAKKRVLEPLGLVEEPVKTAPGKKRPVEHSPAEPDASSGTGKAGQQPARKRLNFGQTGDADSVPDPQPLGQPPAAPSGLGTNTMATGSGAPMADNNEGADGVGNSSGNWHCDSTWMGDRVITTSTRTWALPTYNNHLYKQISSQSGASNDNHYFGYSTPWGYFDFNRFHCHFSPRDWQRLINNNWGFRPKRLNFKLFNIQVKEVTQNDGTTTIANNLTSTVQVFTDSEYQLPYVLGSAHQGCLPPFPADVFMVPQYGYLTLNNGSQAVGRSSFYCLEYFPSQMLRTGNNFTFSYTFEDVPFHSSYAHSQSLDRLMNPLIDQYLYYLSKTNAPSGTTTMSRLQFSQAGASDIRDQSRNWLPGPCYRQQRVSKTAADNNNSDYSWTGATKYHLNGRDSLVNPGPAMASHKDDEEKYFPQSGVLIFGKQDSGKTNVDIEKVMITDEEEIRTTNPVATEQYGSVSTNLQSGNTQAATTDVNTQGVLPGMVWQDRDVYLQGPIWAKIPHTDGHFHPSPLMGGFGLKHPPPQILIKNTPVPANPSTTFSAAKFASFITQYSTGQVSVEIEWELQKENSKRWNPEIQYTSNYNKSVNVDFTVDTNGVYSEPRPIGTRYLTRNL

SEQ ID NO: 2408 - protein, 735 aa, Artificial Sequence
  Description of Artificial Sequence: Synthetic polypeptide
MAADGYLPDWLEDTLSEGIRQWWKLKPGPPPPKPAERHQDDSRGLVLPGYKYLGPFNGLDKGGPVNEADAAALEHDKAYDRQLDSGDNPYLKYNHADAEFQERLKEDTSFGGNLGRAVFQAKKRVLEPLGLVEEPVKTAPGKKRPVEHSPAEPDSSSGTGKAGQQPARKRLNFGQTGDADSVPDPQPLGQPPAAPSGLGTNTMATGSGAPMADNNEGADGVGNSSGNWHCDSTWMGDRVITTSTRTWALPTYNNHLYKQISSQSGASNDNHYFGYSTPWGYFDFNRFHCHFSPRDWQRLINNNWGFRPKRLNFKLFNIQVKEVTQNDGTTTIANNLTSTVQVFTDSEYQLPYVLGSAHQGCLPPFPADVFMVPQYGYLTLNNGSQAVGRSSFYCLEYFPSQMLRTGNNFTFSYTFEDVPFHSSYAHSQSLDRLMNPLIDQYLYYLSKTNAPSGTTTMSRLQFSQAGASDIRDQSRNWLPGPCYRQQRVSKTAADNNNSDYSWTGATKYHLNGRDSLVNPGPAMASHKDDEEKYFPQSGVLIFGKQDSGKTNVDIEKVMITDEEEIRTTNPVATEQYGSVSTNLQSGNTQAATTDVNTQGVLPGMVWQDRDVYLQGPIWAKIPHTDGHFHPSPLMGGFGLKHPPPQILIKNTPVPANPSTTFSAAKFASFITQYSTGQVSVEIEWELQKENSKRWNPEIQYTSNYNKSVNVDFTVDTNGVYSEPRPIGTRYLTRNL

SEQ ID NO: 2409 - protein, 735 aa, Artificial Sequence
  Description of Artificial Sequence: Synthetic polypeptide
MAADGYLPDWLEDTLSEGIRQWWKLKPGPPPPKPAERHQDDSRGLVLPGYKYLGPFNGLDKGEPVNEADAAALEHDKAYDRQLDSGDNPYLKHNHADAEFQERLKEDTSFGGNLGRAVFQAKKRVLEPLGLVEEPVKTAPGKKRPVEHSPAEPDSSSGTGKAGQQPARKRLNFGQTGDADSVPDPQPLGQPPAAPSGLGTNTMATGSGAPMADNNEGADGVGNSSGNWHCDSTWMGDRVITTSTRTWALPTYNNHLYKQISSQSGASNDNHYFGYSTPWGYFDFNRFHCHFSPRDWQRLINNNWGFRPKRLNFKLFNIQVKEVTQNDGTTTIANNLTSTVQVFTDSEYQLPYVLGSAHQGCLPPFPADVFMVPQYGYLTLNNGSQAVGRSSFYCLEYFPSQMLRTGNNFTFSYTFEDVPFHSSYAHSQSLDRLMNPLIDQYLYYLSKTNAPSGTTTMSRLQFSQAGASDIRDQSRNWLPGPCYRQQRVSKTAADNNNSDYSWTGATKYHLNGRDSLVNPGPAMASHKDDEEKYFPQSGVLIFGKQDSGKTNVDIEKVMITDEEEIRTTNPVATEQYGSVSTNLQSGNTQAATTDVNTQGVLPGMVWQDRDVYLQGPIWAKIPHTDGHFHPSPLMGGFGLKHPPPQILIKNTPVPANPSTTFSAAKFASFITQYSTGQVSVEIEWELQKENSKRWNPEIQYTSNYNKSVNVDFTVDTNGVYSEPRPIGTRYLTRNL

SEQ ID NO: 2410 - protein, 735 aa, Artificial Sequence
  Description of Artificial Sequence: Synthetic polypeptide
MAADGYLPDWLEDTLSEGIRQWWKLKPGPPPPKPAERHQDDSRGLVLPGYKYLGPFNGLDKGEPVNEADAAALEHDKAYDRQLDSGDNPYLKYNHADAEFQERLKEDTSFGGNLGRAVFQAKKRVLEPLGLVEEPVKTAPGKKRPVEHSPAEPDSSSGTGKAGQQPARKRLNFGQTGDADSVPDPQPLGQPPAAPSGLGTNTMATGSGAPMADNNEGADGVGNSSGNWHCDSTWMGDRVITTSTRTWALPTYNNHLYKQISSQSGASNDNHYFGYSTPWGYFDFNRFHCHFSPRDWQRLINNNWGFRPKRLNFKLFNIQVKEVTQNDGTTTIANNLTSTVQVFTDSEYQLPYVLGSAHQGCLPPFPAGVFMVPQYGYLTLNNGSQAVGRSSFYCLEYFPSQMLRTGNNFTFSYTFEDVPFHSSYAHSQSLDRLMNPLIDQYLYYLSKTNAPSGTTTMSRLQFSQAGASDIRDQSRNWLPGPCYRQQRVSKTAADNNNSDYSWTGATKYHLNGRDSLVNPGPAMASHKDDEEKYFPQSGVLIFGKQDSGKTNVDIEKVMITDEEEIRTTNPVATEQYGSVSTNLQSGNTQAATTDVNTQGVLPGMVWQDRDVYLQGPIWAKIPHTDGHFHPSPLMGGFGLKHPPPQILIKNTPVPANPSTTFSAAKFASFITQYSTGQVSVEIEWELQKENSKRWNPEIQYTSNYNKSVNVDFTVDTNGVYSEPRPIGTRYLTRNL

SEQ ID NO: 2411 - protein, 735 aa, Artificial Sequence
  Description of Artificial Sequence: Synthetic polypeptide
MAADGYLPDWLEDTLSEGIRQWWKLKPGPPPPKPAERHQDDSRGLVLPGYKYLGPFNGLDKGEPVNEADAAALEHDKAYDRQLDSGDNPYLKYNHADAEFQERLKEDTSFGGNLGRAVFQAKKRVLEPLGLVEEPVKTAPGKKRPVEHSPAEPDSSSGTGKAGQQPARKRLNFGQTGDADSVPDPQPLGQPPAAPSGLGTNTTATGSGAPMADNNEGADGVGNSSGNWHCDSTWMGDRVITTSTRTWALPTYNNHLYKQISSQSGASNDNHYFGYSTPWGYFDFNRFHCHFSPRDWQRLINNNWGFRPKRLNFKLFNIQVKEVTQNDGTTTIANNLTSTVQVFTDSEYQLPYVLGSAHQGCLPPFPADVFMVPQYGYLTLNNGSQAVGRSSFYCLEYFPSQMLRTGNNFTFSYTFEDVPFHSSYAHSQSLDRLMNPLIDQYLYYLSKTNAPSGTTTMSRLQFSQAGASDIRDQSRNWLPGPCYRQQRVSKTAADNNNSDYSWTGATKYHLNGRDSLVNPGPAMASHKDDEEKYFPQSGVLIFGKQDSGKTNVDIEKVMITDEEEIRTTNPVATEQYGSVSTNLQSGNTQAATTDVNTQGVLPGMVWQDRDVYLQGPIWAKIPHTDGHFHPSPLMGGFGLKHPPPQILIKNTPVPANPSTTFSAAKFASFITQYSTGQVSVEIEWELQKENSKRWNPEIQYTSNYNKSVNVDFTVDTNGVYSEPRPIGTRYLTRNL

SEQ ID NO: 2412 - protein, 735 aa, Artificial Sequence
  Description of Artificial Sequence: Synthetic polypeptide
MAADGYLPDWLEDTLSEGIRQWWKLKPGPPPPKPAERHQDDSRGLVLPGYKYLGPFNGLDKGEPVNEADAAALEHDKAYDRQLDSGDNPYLKYNHADAEFQERLKEDTSFGGNLGRAVFQAKKRVLEPLGLVEEPVKTAPGKKRPVEHSPAEPDSSSGTGKAGQQPARKRLNFGQTGDADSVPDPQPLGQPPAAPSGLGTNTMATGSGAPMADNNEGADGVGNSSGNWHCDSTWMGDRVITTSTRTWALPTYNNHLYKQISSQSGASNDNHYFGYSTPWGYFDFNRFHCHFSPRDWQRLIINNWGFRPKRLNFKLFNIQVKEVTQNDGTTTIANNLTSTVQVFTDSEYQLPYVLGSAHQGCLPPFPADVFMVPQYGYLTLNNGSQAVGRSSFYCLEYFPSQMLRTGNNFTFSYTFEDVPFHSSYAHSQSLDRLMNPLIDQYLYYLSKTNAPSGTTTMSRLQFSQAGASDIRDQSRNWLPGPCYRQQRVSKTAADNNNSDYSWTGATKYHLNGRDSLVNPGPAMASHKDDEEKYFPQSGVLIFGKQDSGKTNVDIEKVMITDEEEIRTTNPVATEQYGSVSTNLQSGNTQAATTDVNTQGVLPGMVWQDRDVYLQGPIWAKIPHTDGHFHPSPLMGGFGLKHPPPQILIKNTPVPANPSTTFSAAKFASFITQYSTGQVSVEIEWELQKENSKRWNPEIQYTSNYNKSVNVDFTVDTNGVYSEPRPIGTRYLTRNL

SEQ ID NO: 2413 - protein, 735 aa, Artificial Sequence
  Description of Artificial Sequence: Synthetic polypeptide
MAADGYLPDWLEDTLSEGIRQWWKLKPGPPPPKPAERHQDDSRGLVLPGYKYLGPFNGLDKGEPVNEADAAALEHDKAYDRQLDSGDNPYLKYNHADAEFQERLKEDTSFGGNLGRAVFQAKKRVLEPLGLVEEPVKTAPGKKRPVEHSPAEPDSSSGTGKAGQQPARKRLNFGQTGDADSVPDPQPLGQPPAAPSGLGTNTMATGSGAPMADNNEGADGVGNSSGNWHCDSTWMGDRVITTSTRTWALPTYNNHLYKQISSQSGASNDNHYFGYSTPWGYFDFNRFHCHFSPRDWQRLINNNWGFRPKRLNFKLFNIQVKEVTQNDGTTTIANNLTSTVQVFTDSEYQLPYVLGSAHQGCLPPFPADVFMVPQYGYLTLNNGSQAVGRSSFYCLEYFPSQMLRTGNNFTFSYTFEDVPFHSSYAHSQSLDRLMNPLIDQYLYYLSKTNAPSGTTTMSRLQFSQAGASDIRDQSRNWLPGPCYRQQRVSKTAADNNNSDYSWTGATKYHLNGRDSLVNPGPAMASHKDDEEKYFPQSGVLIFGKQDSGKTNVDIEKVMITDEEEIRTTNPVATEQYGSVSTNLQSGNTQAATTDVNTQGVLPGMVWQDRDVYQQGPIWAKIPHTDGHFHPSPLMGGFGLKHPPPQILIKNTPVPANPSTTFSAAKLASFITQYSTGQVSVEVEWELQKENSKRWNPEIQYTSNYNKSVNVDFTVDTNGVYSEPRPIGTRYLTRNL

SEQ ID NO: 2414 - protein, 735 aa, Artificial Sequence
  Description of Artificial Sequence: Synthetic polypeptide
MAADGYLPDWLEDTLSEGIRQWWKLKPGPPPPKPAERHQDDSRGLVLPGYKYLGPFNGLDKGEPVNEADAAALEHDKAYDRQLDSGDNPYLKYNHADAEFQERLKEDTSFGGNLGRAVFQAKKRVLEPLGLVEEPVKTAPGKKRPVEHSPAEPDSSSGTGKAGQQPARKRLNFGQTGDADSVPDPQPLGQPPAAPSGLGTNTMATGSGAPMADSNEGADGVGNSSGNWHCDSTWMGDRVITTSTRTWALPTYNNHLYKQISSQSGASNDNHYFGYSTPWGYFDFNRFHCHFSPRDWQRLINNNWGFRPKRLNFKLFNIQVKEVTQNDGTTTIANNLTSTVQVFTDSEYQLPYVLGSAHQGCLPPFPADVFMVPQYGYLTLNNGSQAVGRSSFYCLEYFPSQMLRTGNNFTFSYTFEDVPFHSSYAHSQSLDRLMNPLIDQYLYYLSKTNAPSGTTTMSRLQFSQAGASDIRDQSRNWLPGPCYRQQRVSKTAADNNNSDYSWTGATKYHLNGRDSLVNPGPAMASHKDDEEKYFPQSGVLIFGKQDSGKTNVDIEKVMITDEEEIRTTNPVATEQYGSVSTNLQSGNTQAATTDVNTQGVLPGMVWQDRDVYLQGPIWAKIPHTDGHFHPSPLMGGFGLKHPPPQILIKNTPVPANPSTTFSAAKFASFITQYSTGQVSVEIEWELQKENSKRWNPEIQYTSNYNKSVNVDFTVDTNGVYSEPRPIGTRYLTRNL

SEQ ID NO: 2415 - protein, 735 aa, Artificial Sequence
  Description of Artificial Sequence: Synthetic polypeptide
MAADGYLPDWLEDTLSEGIRQWWKLKPGPPPPKPAERHQDDSRGLVLPGYKYLGPFNGLDKGEPVNEADAAALEHDKAYDRQLDSGDNPYLKYNHADAEFQERLKEDTSFGGNLGRAVFQAKKRVLEPLGLVEEPVKTAPGKKRPVEHSPAEPDSSSGTGKAGQQPARKRLNFGQTGDADSVPDPQPLGQPPAAPSGLGTNTMATGSGAPMADNNEGADGVGNSSGNWHCDSTWMGDRVITTSTRTWALPTYNNHLYKQISSQSGASNDNHYFGYSTPWGYFDFNRFHCHFSPRDWQRLINNNWGFRPKRLNFKLFNIQVKEVTQNDGTTTIANNLTSTVQVFTDSEYQLPYVLGSAHQGCLPPFPADVSMVPQYGYLTLNNGSQAVGRSSFYCLEYFPSQMLRTGNNFTFSYTFEDVPFHSSYAHSQSLDRLMNPLIDQYLYYLSKTNAPSGTTTMSRLQFSQAGASDIRDQSRNWLPGPCYRQQRVSKTAADNNNSDYSWTGATKYHLNGRDSLVNPGPAMASHKDDEEKYFPQSGVLIFGKQDSGKTNVDIEKVMITDEEEIRTTNPVATEQYGSVSTNLQSGNTQAATTDVNTQGVLPGMVWQDRDVYLQGPIWAKIPHTDGHFHPSPLMGGFGLKHPPPQILIKNTPVPANPSTTFSAAKFASFITQYSTGQVSVEIEWELQKENSKRWNPEIQYTSNYNKSVNVDFTVDTNGVYSEPRPIGTRYLTRNL

SEQ ID NO: 2416 - protein, 735 aa, Artificial Sequence
  Description of Artificial Sequence: Synthetic polypeptide
MAADGYLPDWLEDTLSEGIRQWWKLKPGPPPPKPAERHQDDSRGLVLPGYKYLGPFNGLDKGEPVNEADVAALEHDKAYDRQLDSGDNPYLKYNHADAEFQERLKEDTSFGGNLGRAVFQAKKRVLEPLGLVEEPVKTAPGKKRPVEHSPAEPDSSSGTGKAGQQPARKRLNFGQTGDADSVPDPQPLGQPPAAPSGLGTNTMATGSGAPMADNNEGADGVGNSSGNWHCDSTWMGDRVITTSTRTWALPTYNNHLYKQISSQSGASNDNHYFGYSTPWGYFDFNRFHCHFSPRDWQRLINNNWGFRPKRLNFKLFNIQVKEVTQNDGTTTIANNLTSTVQVFTDSEYQLPYVLGSAHQGCLPPFPADVFMVPQYGYLTLNNGSQAVGRSSFYCLEYFPSQMLRTGNNFTFSYTFEDVPFHSSYAHSQSLDRLMNPLIDQYLYYLSKTNAPSGTTTMSRLQFSQAGASDIRDQSRNWLPGPCYRQQRVSKTAADNNNSDYSWTGATKYHLNGRDSLVNPGPAMASHKDDEEKYFPQSGVLIFGKQDSGKTNVDIEKVMITDEEEIRTTNPVATEQYGPVSTNLQSGNTQAATTDVNTQGVLPGMVWQGRDVYLQGPIWAKIPHTDGHFHPSPLMGGFGLKHPPPQILIKNTPVPANPSTTFSAAKFASFITQYSTGQVSVEIEWELQKENSKRWNPEIQYTSNYNKSVNVDFTVDTNGVYSEPRPIGTRYLTRNL

SEQ ID NO: 2417 - protein, 735 aa, Artificial Sequence
  Description of Artificial Sequence: Synthetic polypeptide
MAADGYLPDWLEGTLSEGIRQWWKLKPGPPPPKPAERHQDDSRGLVLPGYKYLGPFNGLDKGEPVNEADAAALEHDKAYDRQLDSGDNPYLKYNHADAEFQERLKEDTSFGGNLGRAVFQAKKRVLEPLGLVEEPVKTAPGKKRPVEHSPAEPDSSSGTGKAGQQPARKRLNFGQTGDADSVPDPQPLGQPPAAPSGLGTNTMATGSGAPMADNNEGADGVGNSSGNWHCDSTWMGDRVITTSTRTWALPTYNNHLYKQISSQSGASSDNHYFGYSTPWGYFDFNRFHCHFSPRDWQRLINNNWGFRPKRLNFKLFNIQVKEVTQNDGTTTIANNLTSTVQVFTDSEYQLPYVLGSAHQGCLPPFPADVFMVPQYGYLTLNNGSQAVGRSSFYCLEYFPSQMLRTGNNFTFSYTFEDVPFHSSYAHSQSLDRLMNPLIDQYLYYLSKTNAPSGTTTMSRLQFSQAGASDIRDQSRNWLPGPCYRQQRVSKTAADNNNSDYSWTGATKYHLNGRDSLVNPGPAMASHKDDEEKYFPQSGVLIFGKQDSGKTNVDIEKVMITDEEEIRTTNPVATEQYGSVSTNLQSGNTQAATTDVNTQGVLPGMVWQDRDVYLQGPIWAKIPHTDGHFHPSPLMGGFGLKHPPPQILIKNTPVPANPSTTFSAAKLASFITQYSTGQVSVEIEWELQKENSKRWNPEIQYTSNYNKSVNVDFTVDTNGVYSEPRPIGTRYLTRNL

SEQ ID NO: 2418 - protein, 735 aa, Artificial Sequence
  Description of Artificial Sequence: Synthetic polypeptide
MAADGYLPDWLEDTLSEGIRQWWKLKPGPPPPKPAERHQDDSRGLVLPGYKYLGPFNGLDKGEPVNEADVAALEHDKAYDRQLDSGDNPYLKYNHADAEFQERLKEDTSFGGNLGRAVFQAKKRVLEPLGLVEEPVKTAPGKKRPVEHSPAEPDSSSGTGKAGQQPARKRLNFGQTGDADSVPDPQPLGQPPAAPSGLGTNTMATGSGAPMADNNEGADGVGNSSGNWHCDSTWMGDRVITTSTRTWALPTYNNHLYKQISSQSGASNDNHYFGYSTPWGYFDFNRFHCHFSPRDWQRLINNNWGFRPKRPNFKLFNIQVKEVTQNDGTTTIANNLTSTVQVFTDSEYQLPYVLGSAHQGCLPPFPADVFMVPQYGYLTLNNGSQAVGRSSFYCLEYFPSQMLRTGNNFTFSYTFEDVPFHSSYAHSQSLDRLMNPLIDQYLYYLSKTNAPSGTTTMSRLQFSQAGASDIRDQSRNWLPGPCYRQQRVSKTAADNNNSDYSWTGATKYHLNGRDSLVNPGPAMASHKDDEEKYFPQSGVLIFGKQDSGKTNVDIEKVMITDEEEIRTTNPVATEQYGSVSTNLQSGNTQAATTDVNTQGVLPGMVWQDRDVYLQGPIWAKIPHTDGHFHPSPLMGGFGLKHPPPQILIKNTPVPANPSTTFSAAKFASFITQYSTGQVSVEIEWELQKENSKRWNPEIQYTSNYNKSVNVDFTVDTNGVYSEPRPIGTRYLTRNL

SEQ ID NO: 2419 - protein, 735 aa, Artificial Sequence
  Description of Artificial Sequence: Synthetic polypeptide
MAADGYLPDWLEDTLSEGIRQWWKLKPGPPPPKPAERHQDDSRGLELPGYKYLGPFNGLDKGEPVNEADAAALEHDKAYDRQLDSGDNPYLKYNHADAEFQERLKEDTSFGGNLGRAVFQAKKRVLEPLGLVEEPVKTAPGKKRPVEHSPAEPDSSSGTGKAGQQPARKRLNFGQTGDADSVPDPQPLGQPPAAPSGLGTNTMATGSGAPMADNNEGADGVGNSSGNWHCDSTWMGDRVITTSTRTWALPTYNNHLYKQISSQSGASNDNHYFGYSTPWGYFDFNRFHCHFSPRDWQRLINNNWGFRPKRLNFKLFNIQVKEVTQNDGTTTIANNLTSTVQVFTDSEYQLPYVLGSAHQGCLPPFPADVFMVPQYGYLTLNNGSQAVGRSSFYCLEYFPSQMLRTGNNFTFSYTFEDVPFHSSYAHSQSLDRLMNPLIDQYLYYLSKTNAPSGTTTMSRLQFSQAGASDIRDQSRNWLPGPCYRQQRVSKTAADNNNSDYSWTGATKYHLNGRDSLVNPGPAMASHKDDEEKYFPQSGVLIFGKQDSGKTNVDIEKVMITDEEEIRTTNPVATEQYGSVSTNLQSGNTQAATTDVNTQGVLPGMVWQDRDVYLQGPIWAKIPHTDGHFHPSPLMGGFGLKHPPPQILIKNTPVPANPSTTFSAAKFASFITQYSTGQVSVEIEWELQKENSKRWNPEIQYTSNYNKSVNVDFTVDTNGVYSEPRPIGTRYLTRNL

SEQ ID NO: 2420 - protein, 735 aa, Artificial Sequence
  Description of Artificial Sequence: Synthetic polypeptide
MAADGYLPDWLEDTLSEGIRQWWKLKPGPPPPKPAERHQDDSRGLVLPGYKYLGPFNGLDKGEPVNEADAAALEHDKAYDRQLDSGDNPYLKYNHADAEFQERLKEDTSFGGNLGRAVFQAKKRVLEPLGLVEEPVKTAPGKKRPVEHSPAEPDSSSGTGKAGQQPARKRLNFGQTGDADSVPDPQPLGQPPAAPSGLGTNTMATGSGAPMADNNEGADGVGNSSGNWHCDSTWMGDRVITTSTRTWALPTYNNHLYKQISSQSGASNDNHYFGYSTPWGYFDFNRFHCHFSPRDWQRLINNNWGFRPKRLNFKLFNIQVKEVTQNDGMTTIANNLTSTVQVFTDSEYQLPYVLGSAHQGCLPPFPADVFMVPQYGYLTLNNGSQAVGRSSFYCLEYFPSQMLRTGNNFTFSYTFEDVPFHSSYAHSQSLDRLMNPLIDQYLYYLSKTNAPSGTTTMSRLQFSQAGASDIRDQSRNWLPGPCYRQQRVSKTAADNNNSDYSWTGATKYHLNGRDSLVNPGPAMASHKDDEEKYFPQSGVLIFGKQDSGKTNVDIEKVMITDEEEIRTTNPVATEQYGSVSTNLQSGNTQAATTDVNTQGVLPGMVWQDRDVYLQGPIWAKIPHTDGHFHPSPLMGGFGLKHPPPQILIKNTPVPANPSTTFSAAKFASFITQYSTGQVSVEIEWELQKENSKRWNPEIQYTSNYNKSVNVDFTVDTNGVYSEPRPIGTRYLTRNL

SEQ ID NO: 2421 - protein, 735 aa, Artificial Sequence
  Description of Artificial Sequence: Synthetic polypeptide
MAADGYLPDWLEDTLSEGIRQWWKLKPGPPPLKPAERHQDDSRGLVLPGYKYLGPFNGLDKGEPVNEADAAALEHDKAYDRQLDSGDNPYLKYNHADAEFQERLKEDTSFGGNLGRAVFQAKKRVLEPLGLVEEPVKTAPGKKRPVEHSPAEPDSSSGTGKAGQQPARKRLNFGQTGDADSVPDPQPLGQPPAAPSGLGTNTMATGSGAPMADNNEGADGVGNSSGNWHCDSTWMGDRVITTSTRTWALPTYNNHLYKQISSQSGASNDNHYFGYSTPWGYFDFNRFHCHFSPRDWQRLINNNWGFRPKRLNFKLFNIQVKEVTQNDGTTTIANNLTSTVQVFTDSEYQLPYVLGSAHQGCLPPFPADVFMVPQYGYLTLNNGSQAVGRSSFYCLEYFPSQMLRTGNNFTFSYTFEDVPFHSSYAHSQSLDRLMNPLIDQYLYYLSKTNAPSGTTTMSRLQFSQAGASDIRDQSRNWLPGPCYRQQRVSKTAADNNNSDYSWTGATKYHLNGRDSLVNPGPAMASHKDDEEKYFPQSGVLIFGKQDSGKTNVDIEKVMITDEEEIRTTNPVATEQYGSVSTNLQSGNTQAATTDVNTQGVPPGMVWQDRDVYLQGPIWAKIPHTDGHFHPSPLMGGFGLKHPPPQILIKNTPVPANPSTTFSAAKFASFITQYSTGQVSVEIEWELQKENSKRWNPEIQYTSNYNKSVNVDFTVDTNGVYSEPRPIGTRYLTRNL

SEQ ID NO: 2422 - protein, 735 aa, Artificial Sequence
  Description of Artificial Sequence: Synthetic polypeptide
MAADGYLPDWLEDTLSEGIRQWWKLKPGPPPPKPAERHQDDSRGLVLPGYKYLGPFNGLDKGEPVNEADAAALEHDKAYDRQLDSGDNPYLKYNHADAEFQERLKEDTSFGGNLGRAVFQAKKRVLEPLGLVEEPVKTAPGKKRPVEHSPAEPDSSSGTGKAGQQPARKRLNFGQTGDADSVPDPQPLGQPPAAPSGLGTNTMATGSGAPMADNNEGADGVGNSSGNWHCDSTWMGDRVITTSTRTWALPTYNNHLYKQISSQSGASNDNHYFGYSTPWGYFDFNRFHCHFSPRDWQRLINNNWGFRPKRLNFKLFNIQVKEVTQNDGTTTIANNLTSTVQVFTDSEYQLPYVLGSAHQGCLPPFPADVFMVPQYGYLTLNNGSQAVGRSSFYCLEYFPSQMLRTGNNFTFSYTFEDVPFHSSYAHSQSLDRLMNPLIDQYLYYLSKTNAPSGTTTMSRLQFSQAGASDIRDQSRNWLPGPCYRQQRVSKTAADNNNSDYSWTGATKYHLNGRDSLVNPGPAMASHKDDEEKYFPQSGVLIFGKQDSGKTNVDIEKVMITDEEEIRTTNPVATEQYGSVSTNLQSGNTQAATTDVNTQGVLPGMAWQDRDVYLQGPIWAKIPHTDGHFHPSPLMGGFGLKHPPPQILIKNTPVPANPSTTLSAAKFASFITQYSTGQVSVEIEWELQKENSKRWNPEIQYTSNYNKSVNVDFTVDTNGVYSEPRPIGTRYLTRNL

SEQ ID NO: 2423 - protein, 735 aa, Artificial Sequence
  Description of Artificial Sequence: Synthetic polypeptide
MAADGYLPDWLEDTLSEGIRQWWKLKPGPPPPKPAERHQDDSRGLVLPGYKYLGPFNGLDKGEPVNEADAAALEHDKAHDRQLDSGDNPYLKYNHADAEFQERLKEDTSFGGNLGRAVFQAKKRVLEPLGLVEEPVKTAPGKKRPVEHSPAEPDSSSGTGKAGQQPARKRLNFGQTGDADSVPDPQPLGQPPAAPSGLGTNTMATGSGAPMADNNEGADGVGNSSGNWHCDSTWMGDRVITTSTRTWALPTYNNHLYKQISSQSGASNDNHYFGYSTPWGYFDFNRFHCHFSPRDWQRLINNNWGFRPKRLNFKLFNIQVKEVTQNDGTTTIANNLTSTVQVFTDSEYQLPYVLGSAHQGCLPPFPADVFMVPQYGYLTLNNGSQAVGRSSFYCLEYFPSQMLRTGNNFTFSYTFEDVPFHSSYAHSQSLDRLMNPLIDQYLYYLSKTNAPSGTTTMSRLQFSQAGASDIRDQSRNWLPGPCYRQQRVSKTAADNNNSDYSWTGATKYHLNGRDSLVSPGPAMASHKDDEEKYFPQSGVLIFGKQDSGKTNVDIEKVMITDEEEIRTTNPVATEQYGSVSTNLQSGNTQAATTDVNTQGVLPGMVWQDRDVYLQGPIWAKIPHTDGHFHPSPLMGGFGLKHPPPQILIKNTPVPANPSTTFSAAKFASFITQYSTGQVSVEIEWELQKENSKRWNPEIQYTSNYNKSVNVDFTVDTNGVYSEPRPIGTRYLTRNL

SEQ ID NO: 2424 - protein, 735 aa, Artificial Sequence
  Description of Artificial Sequence: Synthetic polypeptide
MAADGYLPDWLEDTLSEGIRQWWKLKPGPPPLKPAERHQDDSRGLVLPGYKYLGPFNGLDKGEPVNEADAAALEHDKAYDRQLDSGDNPYLKYNHADAEFQERLKEDTSFGGNLGRAVFQAKKRVLEPLGLVEEPVKTAPGKKRPVEHSPAEPDSSSGTGKAGQQPARKRLNFGQTGDADSVPDPQPLGQPPAAPSGLGTNTMATGSGAPMADNNEGADGVGNSSGNWHCDSTWMGDRVITTSTRTWALPTYNNHLYKQISSQSGASNDNHYFGYSTPWGYFDFNRFHCHFSPRDWQRLINNNWGFRPKRLNFKLFNIQVKEVTQNDGTTTIANNLTSTVQVFTDSEYQLPYVLGSAHQGCLPPFPADVFMVPQYGYLTLNNGSQAVGRSSFYCLEYFPSQMLRTGNNFTFSYTFEDVPFHSSYAHSQSLDRLMNPLIDQYLYYLSKTNAPSGTTTMSRLQFSQAGASDIRDQSRNWLPGPCYRQQRVSKTAADNNNSDYSWTGATKYHLNGRDSLVNPGPAMASHKDDEEKYFPQSGVLIFGKQDSGKTNVDIEKVMITDEEEIRTTNPVATEQYGSVSTNLQSGNTQAATTDVNTQGVLPGMVWQDRDVYLQGPIWAKIPHTDGHFHPSPLMGGFGLKHPPPQILIKNTPVPANPSTTFSAAKFASFITQYSTGQVSVGIEWELQKENSKRWNPEIQYTSNYNKSVNVDFTVDTNGVYSEPRPIGTRYLTRNL

SEQ ID NO: 2425 - protein, 735 aa, Artificial Sequence
  Description of Artificial Sequence: Synthetic polypeptide
MAADGYLPDWLEDTLSEGIRQWWKLKPGPPPPKPAERHQDDSRGLVLPGYKYLGPFNGLDKGEPVNEADAAALEHDKAYDRQLDSGDNPYLKYNHADAEFQERLKEDTSFGGNLGRAVFQAKKRVLEPLGLVEEPVKTAPGKKRPVEHSPAEPDSSSGTGKAGQQPARKRLNFGQTGDADSVPDPQPLGQPPAAPSGLGTNTMATGSGAPMADNNEGADGVGNSSGNWHCDSTWMGDRVITTSTRTWALPTYNNHLYKQISSQSGASNDNHYFGYSTPWGYFDFNRFHCHFSPRDWQRLINNNWGFRPKRLNFKLFNIQVKEVTQNDGTTTIANNLTSTVQVFTDSEYQLPYVLGSAHQGCLPPFPADVFMVPQYGYLTLNNGSQAVGRSSFYCLEYFPSQMLRTGNNFTFSYTFEDVPFHSSYAHSQSLDRLMNPLIDQYLYYLSKTNAPSGTTTMSRLQFSQAGASDIRDQSRNWLPGPCYRQQRVSKTAADNNNSDYSWTGATKYHLNGRDSLVNPGPAMASHKDDEEKYFPQSGVLIFGKQDSGKTNVDIEKVMITDEEEIRTTNPVATEQYGSVSTNLQSGNTQAATTDVNTQGVLPGMVWQDRDVCLQGPIWAKIPHTDGHFHPSPLMGGFGLKHPPPQILIKNTPVPANPSTTFSAAKFASFITQYSTGQVSVEIEWELQKENSKRWNPEIQYTSNYNKSVNVDFTVDTNGVYSEPRPIGTRYLTRNL

SEQ ID NO: 2426 - protein, 735 aa, Artificial Sequence
  Description of Artificial Sequence: Synthetic polypeptide
MAADGYLPDWLEDTLSEGIRQWWKLKPGPPPPKPAERHQDDSRGLVLPGYKYLGPFNGLDKGEPVNEADAAALEHDKAYDRQLDSGDNPYLKYNHADAEFQERLKEDTSFGGNLGRAVFQAKKRVLEPLGLVEEPVKTAPGKKRPVEHSPAEPDSSSGTGKAGQQPARKRLNFGQTGDADSVPDPQPLGQPPAAPSGLGTNTMATGSGAPMADNNEGADGVGNSSGNWHCDSTWMGDRVITTSTRTWALPTYNNHLYKQISSQSGASNDNHYFGYSTPWGYFDFNRFHCHFSPRDWQRLINNNWGFRPKRLNFKLFNIQVKEVAQNDGTTTIANNLTSTVQVFTDSEYQLPYVLGSAHQGCLPPFPADVFMVPQYGYLTLNNGSQAVGRSSFYCLEYFPSQMLRTGNNFTFSYTFEDVPFHSSYAHSQSLDRLMNPLIDQYLYYLSKTNAPSGTTTMSRLQFSQAGASDIRDQSRNWLPGPCYRQQRVSKTAADNNNSDYSWTGATKYHLNGRDSLVNPGPAMASHKDDEEKYFPQSGVLIFGKQDSGKTNVDIEKVMITDEEEIRTTNPVATEQYGSVSTNLQSGNTQAATTDVNTQGVLPGMVWQDRDVYLQGPIWAKIPHTDGHFHPSPLMGGFGLKHPPPQILIKNTPVPANPSTTFSAAKFASFITQYSTGQVSVEIEWELQKENSKRWNPEIQYTSNYNKSVNVDFTVDTNGVYSEPRPIGTRYLTRNL

SEQ ID NO: 2427 - protein, 735 aa, Artificial Sequence
  Description of Artificial Sequence: Synthetic polypeptide
MAADGYLPDWLEDTLSEGIRQWWKLKPGPPPPKPAERHKDDSRGLVLPGYKYLGPFNGLDKGEPVNEADAAALEHDKAYDRQLDSGDNPYLKYNHADAEFQERLKEDTSFGGNLARAVFQAKKRVLEPLGLVEEPVKTAPGKKRPVEHSPAEPDSSSGTGKSGQQPARKRLNFGQTGDADSVPDPQPLGQPPAAPSGLGTNTMASGSGAPMADNNEGADGVGNSSGNWHCDSTWMGDRVITTSTRTWALPTYNNHLYKQISSQSGASNDNHYFGYSTPWGYFDFNRFHCHFSPRDWQRLINNNWGFRPKRLNFKLFNIQVKEVTQNDGTTTIANNLTSTVQVFTDSEYQLPYVLGSAHQGCLPPFPADVFMVPQYGYLTLNNGSQAVGRSSFYCPEYLPSQMLRTGNNFTFSYTFEDVPFHSSYAHSQSLDRLMNPLIDQYLYYLSRTNTPSGTTTQSRLQFSQAGASDIRDQSRNWLPGPCYRQQRVSKTAADNNNSDYSWTGATKYHLNGRDSLVNPGTAMASHKDDEEKYFPQSGVLIFGKQDSGKTNVDIEKVMITDEEETRTTNPVATEQYGSVSTNLQSGNTQAATSDVNTQGVLPGMVWQDRDVYLQGPIWAKIPHTDGHFHPSPLMGGFGLKHPPPQILIKNTPVPANPSTAFSAAKFASFITQYSTGQVSVEIEWELQKENSERWNPEIQYTSNYNKSVNVDFTVDTNGVYSEPRPIGTRYLTRNL

SEQ ID NO: 2428 - protein, 735 aa, Artificial Sequence
  Description of Artificial Sequence: Synthetic polypeptide
MAADGYLPDWLEDTLSEGIRQWWKLKPGPPPPKPAERHKDDSRGLVLPGYKYLGPFNGLDKGEPVNEADAAALEHDKAYDRQLDSGDNPYLKYNHADAEFQERLKEDTSFGGNLARAVFQAKKRVLEPLGLVEEPVKTAPGKKRPVEHSPAEPDSSSGTGKSGQQPARKRLNFGQTGDADSVPDPQPLGQPPAAPSGLGTNTMASGSGAPMADNNEGADGVGNSSGNWHCDSTWMGDRVITTSTRTWALPTYNNHLYKQISSQSGASNDNHYFGYSTPWGYFDFNRFHCHFSPRDWQRLINNNWGFRPKRLNFKLFNIQVKEVTQNDGTTTIANNLTSTVQVFTDSEYQLPYVLGSAHQGCLPPFPADVLMVPQYGYLTLNNGSQAVGRSSFYCPEYLPSQMLRTGNNFTFSYTFEDVPFHSSYAHSQSLDRLMNPLIDQYLYYLSRTNTPSGTTTQSRLQFSQAGASDIRDQSRNWLPGPCYRQQRVSKTAADNNNSDYSWTGATKYHLNGRDSLVNPGTAMASHKDDEEKYFPQSGVLIFGKQDSGKTNVDIEKVMITDEEEIRTTNPVATEQYGSVSTNLQSGNTQAATSDVNTQGVLPGMVWQDRDVYLQGPIWAKIPHTDGHFHPSPLMGGFGLKHPPPQILIKNTPVPANPSTAFSAAKFASFITQYSTGQVSVEIEWELQKENSERWNPEIQYTSNYNKSVNVDFTADTNGVYSEPRPIGTRYLTRNL

SEQ ID NO: 2429 - protein, 735 aa, Artificial Sequence
  Description of Artificial Sequence: Synthetic polypeptide
MAADGYLPDWLEDTLSEGIRQWWKLKPGPPPPKPAERHKDDSRGLVLPGYKYLGPFNGLDKGEPVNEADAAALEHDKAYDRQLDSGDNPYLKYNHADAEFQERLKEDTSFGGNLARAVFQAKKRVLEPLGLVEEPVKTAPGKKRPVEHSPAEPDSSSGTGKSGQQPARKRLNFGQTGDADSVPDPQPLGQPPAAPSGLGTNTMASGSGAPMADNNEGADGVGNSSGNWHCDSTWMGDRVITTSTRAWALPTYNNHLYKQISSQSGASNDNHYFGYSTPWGYFDFNRFHCHFSPRDWQRLINNNWGFRPKRLNFKLFNIQVKEVTQNDGTTTIANNLTSTVQVFTDSEYQLPYVLGSAHQGCLPPFPADVLMVPQYGYLTLNNGSQAVGRSSFYCPEYLPSQMLRTGNNFTFSYTFEDVPFHSSYAHSQSLDRLMNPLIDQYLYYLSRTNTPSGTTTQSRLQFSQAGASDIRDQSRNWLPGPCYRQQRVSKTAADNNNSDYSWTGATKYHLNGRDSLVNPGTAMASHKDDEEKYFPQSGVLIFGKQDSGKTNVDIEKVMITDEEEIRTTNPVATEQYGSVSTNLQSGNTQAATSDVNTQGVLPGMVWQDRDVYLQGPIWAKIPHTDGHFHPSPLMGGFGLKHPPPQILIKNTPVPANPSTAFSAAKFASFITQYSTGQVSVEIEWELQKENSERWNPEIQYTSNYNKSVNVDFTVDTNGVYSEPRPIGTRYLTRNL

SEQ ID NO: 2430 - protein, 735 aa, Artificial Sequence
  Description of Artificial Sequence: Synthetic polypeptide
MAADGYLPDWLEDTLSEGIRQWWKLKPGPPPPKPAERHKDDSRGLVLPGYKYLGPFNGLDKGEPVNEADAAALEHDKAYDRQLDSGDNPYLKYNHADAEFQERLKEDTSFGGNLARAVFQAKKRVLEPLGLVEEPVKTAPGKKRPVEHSPAEPDSSSGTGKSGQQPARKRLNFGQTGDADSVPDPQPLGQPPAAPSGLGTNTMASGSGAPMADNNEGADGVGNSSGNWHCDSTWMGDRVITTSTRTWALPTYNNHLYKQISSQSGASNDNHYFGYSTPWGYFDFNRFHCHFSPRDWQRLINNNWGFRPKRLNFKLFNIQVKEVTQNDGTTTIANNLTSTVQVFTDSEYQLPYVLGSAHQGCLPPFPADVFMVPQYGYLTLNNGSQAVGRSSFYCPEYLPSQMLRTGNNFTFSYTFEDVPFHSSYAHSQSLDRLMNPLIDQYLYYLSRTNTPSGTTTQSRLQFSQAGASDIRDQSRNWLPGPCYRQQRVSKTAADNNNSDYSWTGATKYHLNGRDSLVNPGTATASHKDDEEKYFPQSGVLIFGKQDSGKTNVDIEKVMITDEEEIRTTNPVATEQYGSVSTNLQSGNTQAATSDVNTQGVLPGMVWQDRDVYLQGPIWAKIPHTDGHFHPSPLMGGFGLKHPPPQILIKNTPVPANPSTAFSAAKFASFITQYSTGQVSVEIEWELQKENSERWNPEIQYTSNYNKSVNVDFTVDTNGVYSEPRPIGTRYLTRNL

SEQ ID NO: 2431 - protein, 734 aa, Artificial Sequence
  Description of Artificial Sequence: Synthetic polypeptide
MAADGYLPDWLEDTLSEGIRQWWKLKPGPPPPKPAERHKDDSRGLVLPGYKYLGPFNGLDKGEPVNEADAAALEHDKAYDRQLDSGDNPYLKYNHADAEFQERLKEDTSFGGNLARAVFQAKKRVLEPLGLVEEPVKTAPGKKRPVEHSPAEPDSSSGTGKSGQQPARKRLNFGQTGDADSVPDPQPLGQPPAAPSGLGTNTMASGSGAPMADNNEGADGVGNSSGNWHCDSTWMGDRVITTSTRTWALPTYNNHLYKQISSQSGASNDNHYFGYSTPWGYFDFNRFHCHFSPRDWQRLINNNWGFRPKRLNFKLFNIQVKEVTQNDGTTTIANNLTSTVQVFTDSEYQLPYVLGSAHQGCLPPFPADVFMVPQYGYLTLNNGSQAVGRSSFYCPEYLPSQMLRTGNNFTFSYTFEDVPFHSSYAHSQSLDRLMNPLIDQYLYYLSRTNTPSGTTTQSRLQFSQAGASDIRDQSRNWLPGPCYRQQRVSKTAADNNSDYSWTGATKYHLNGRDSLVNPGTAMASHKDDEEKYFPQSGVLIFGKQDSGKTNVDIEKVMITDEEEIRTTNPVATEQYGSVSTNLQSGNTQAATSDVNTQGVLPGMVWQDRDVYLQGPIWAKIPHTDGHFHPSPLMGGFGLKHPPPQILIKNTPVPANPSTAFSAAKFASFITQYSTGQVSVEIEWELQKENSERWNPEIQYTSNYNKSVNVDFTVDTNGVYSEPRPIGTRYLTRNL

SEQ ID NO: 2432 - protein, 735 aa, Artificial Sequence
  Description of Artificial Sequence: Synthetic polypeptide
MAADGYLPDWLEDTLSEGIRQWWKLKPGPPPPKPAERHKDDSRGLVLPGYKYLGPFNGLDKGEPVNEADAAALEHDKAYDRQLDSGDNPYLKYNHADAEFQERLKEDTSFGGNLARAVFQAKKRVLDPLGLVEEPVKTAPGKKRPVEHSPAEPDSSSGTGKSGQQPARKRLNFGQTGDADSVPDPQPLGQPPAAPSGLGTNTMASGSGAPMADNNEGADGVGNSSGNWHCDSTWMGDRVITTSTRTWALPTYNNHLYKQISSQSGASNDNHYFGYSTPWGYFDFNRFHCHFSPRDWQRLINNNWGFRPKRLNFKLFNIQVKEVTQNDGTTTIANNLTSTVQVFTDSEYQLPYVLGSAHQGCLPPFPADVFMVPQYGYLTLNNGSQAVGRSSFYCPEYLPSQMLRTGNNFTFSYTFEDVPFHSSYAHSQSLDRLMNPLIDQYLYYLSRTNTPSGTTTQSRLQFSQAGASDIRDQSRNWLPGPCYRQQRVSKTAADNNNSDYSWTGATKYHLNGRDSLVNPGTAMASHKDDEEKYFPQSGVLIFGKQDSGKTNVDIEKVMITDEEEIRTTNPVATEQYGSVSTNLQSGNTQAATSDVNTQGVLPGMVWQDRDVYLQGPIWAKIPHTDGHFHPSPLMGGFGLKHPPPQILIKNTPVPANPSTAFSAAKFASFITQYSTGQVSVEIEWELQKENSERWNPEIQYTSNYNKSVNVDFTVDTNGVYSEPRPIGTRYLTRNL

SEQ ID NO: 2433 - protein, 735 aa, Artificial Sequence
  Description of Artificial Sequence: Synthetic polypeptide
MAADGYLPDWLEDTLSEGIRQWWKLKPGPPPPKPAERHKDDSRGLVLPGYKYLGPFNGLDKGEPVNEADAAALEHDKAYDRQLDSGDNPYLKYNHADAEFQERLKEDTSFGGNLARAVFQAKKRVLEPLGLVEEPVKTAPGKKRPVEHSPAEPDSSSGTGKSGQQPARKRLNFGQTGDADSVPDPQPLGQPPAAPSGLGTNTMASGSGAPMADNNEGADGVGNSSGNWHCDSTWMGDRVITTSTRTWALPTYNNHLYKQISSQSGASNDNHYFGYSTPWGYFDFNRFHCHFSPRDWQRLINNNWGFRPKRLNFKLFNIQVKEVTQNDGTTTIANNLTSTVQVFTDSEYQLPYVLGSAHQGCLPPFPADVFMVPQYGYLTLNNGSQAVGRSSFYCPEYLPSQMLRTGNNFTFSYTFEDVPFHSSYAHSQSLDRLMNPLIDQYLYYLSRTNTPSGTTTQSRLQFSQAGASDIRDQSRNWLPGPCYRQQRVSKTAADNNNSDYSWTGATKYHLNGRDSLVNPGTAMASHKDDEEKYFPQSGVLIFRKQDSGKTNVDIEKVMITDEEEIRTTNPVATEQYGSVSTNLQSGNTQAATSDVNTQGVLPGMVWQDRDVYLQGPIWAKIPHTDGHFHPSPLMGGFGLKHPPPQILIKNTPVPANPSTAFSAAKFASFITQYSTGQVSVEIEWELQKENSERWNPEIQYTSNYNKSVNVDFTVDTNGVYSEPRPIGTRYLTRNL

SEQ ID NO: 2434 - protein, 735 aa, Artificial Sequence
  Description of Artificial Sequence: Synthetic polypeptide
MAADGYLPDWLEDTLSEGIRQWWKLKPGPPPPKPAERHKDDSRGLVLPGYKYLGPFNGLDKGEPVNEADAAALEHDKAYDRQLDSGDNPYLKYNHADAEFQERLKEDTSFGGNLARAVFQAKKRVLEPLGLVEEPVKTAPGKKRPVEHSPAEPDSSSGTGKSGQQPARKRLNFGQTGDADSVPDPQPLGQPPAAPSGLGTNTMASGSGAPMADNNEGADGVGNSSGNWHCDSTWMGDRVITTSTRTWALPTYNNHLYKQISSQSGASNDNHYFGYSTPWGYFDFNRFHCHFSPRDWQRLINNNWGFRPKRLNFKLFNIQVKEVTQNDGTTTIANNLTSTVQVFTDSEYQLPYVLGSAHQGCLPPFPADVLMVPQYGYLTLNNGSQAVGRSSFYCPEYLPSQMLRTGNNFTFSYTFEDVPFHSSYAHSQSLDRLMNPLIDQYLYYLSRTNTPSGTTTQSRLQFSQAGASDIRDQSRNWLPGPCYRQQRVSKTAADNNNSDYSWTGATKYHLNGRDSLVNPGTAMASHKDDEEKYFPQSGVLIFRKQDSGKTNVDIEKVMITDEEEIRTTNPVATEQYGSVSTNLQSGNTQAATSDVNTQGVLPGMVWQDRDVYLQGPIWAKIPHTDGHFHPSPLMGGFGLKHPPPQILIKNTPVPANPSTAFSAAKFASFITQYSTGQVSVEIEWELQKENSERWNPEIQYTSNYNKSVNVDFTVDTNGVYSEPRPIGTRYLTRNL

SEQ ID NO: 2435 - protein, 735 aa, Artificial Sequence
  Description of Artificial Sequence: Synthetic polypeptide
MAADGYLPDWLEDTLSEGIRQWWKLKPGPPPPKPAERHKDDSRGLVLPGYKYLGPFNGLDKGEPVNEADAAALEHDKAYDRQLDSGDNPYLKYNHADAEFQERLKEDTSFGGNLARAVFQAKKRVLEPLGLVEEPVKTAPGKKRPVEHSPAEPDSSSGTGKSGQQPARKRLNFGQTGDADSVPDPQPLGQPPAAPSGLGTNTMASGSGAPMADNNEGADGVGNSSGNWHCDSTWMGDRVITTSTRTWALPTYNNHLYKQISSQSGASNDNHYFGYSTPWGYFDFNRFHCHFSPRDWQRLINNNWGFRPKRLNFKLFNIQVKEVTQNDGTTTIANNLTSTVQVFTDSEYQLPYVLGSAHQGCLPPFPADVLMVPQYGYLTLNNGSQAVGRSSFYCPEYLPSQMLRTGNNFTFSYTFEDVPFHSSYAHSQSLDRLMNPLIDQYLYYLSRTNTPSGTTTQSRLQFSQAGASDIRDQSRNWLPGPCYRQQRVSKTAADNNNSDYSWTGATKYHLNGRDSLVNPGTAMASHKDDEEKYFPQSGVLIFGKQDSGKTNVDIEKVMITDEEEIRTTNPVATEQYGSVSTNLQSGNTQAATSDVNTQGVLPGMVWQDRDVYLQGPIWAKIPHTDGHFHPSPLMGGFGLKHPPPQILIKNTPVPANPSTAFSAAKFASFITQYSTGQVSVEIEWELQKENSERWNPEIQYTSNYNKSVNVDFTVDTNGVYSEPRPIGTRYLTRNL

SEQ ID NO: 2436 - protein, 735 aa, Artificial Sequence
  Description of Artificial Sequence: Synthetic polypeptide
MAADGYLPDWLEDTLSEGIRQWWKLKPGPPPPKPAERHKDDSRGLVLPGYKYLGPFNGLDKGEPVNEADAAALEHDKAYDRQLDSGDNPYLKYNHADAEFQERLKEDTSFGGNLARAVFQAKKRVLEPLGLVEEPVKTAPGKKRPVEHSPAEPDSSSGTGKSGQQPARKRLNFGQTGDADSVPDPQPLGQPPAAPSGLGTNTMASGSGAPMADNNEGADGVGNSSGNWHCDSTWMGDRVITTSTRTWALPTYNNHLYKQISSQSGASNDNHYFGYSTPWGYFDFNRFHCHFSPRDWQRLINNNWGFRPKRLNFKLFNIQVKEVTQNDGTTTIANNLTSTVQVFTDSEYQLPYVLGSAHQGCLPPFPADVFMVPQYGYLTLNNGSQAVGRSSFYCPEYLPSQMLRTGNNFTFSYTFEDVPFHSSYAHSQSLDRLMNPLIDQYLYYLSRTNTPSGTTTQSRLQFSQAGASDIRDQSRNWLPGPCYRQQRVSKTAADNNNSDYSWTGATKYHLNGRDSLVNPGTAMASHKDDEEKYFPQSGVLIFGKQDSGKTNVDIEKVMITDEEEIRTTNPVATEQYGSVSTNLQSGNTQAATSDVNTQGVLPGMVWQDRDVYLQGPIWAKIPHTDGHFHPSPLMGGFGLKHPPPQILIKNTPVPANPSTAFSAAKFASFITQYSTGQVSVEIEWELQKENSERWNPEIQYTSNYNKSVNVDFTVDTNGVYSEPRPIGTRYLTRNL

SEQ ID NO: 2437 - protein, 735 aa, Artificial Sequence
  Description of Artificial Sequence: Synthetic polypeptide
MAADGYLPDWLEDTLSEGIRQWWKLKPGPPPPKPAERHKDDSRGLVLPGYKYLGPFNGLDKGEPVNEADAAALEHDKAYDRQLDSGDNPYLKYNHADAEFQERLKEDTSFGGNLARAVFQAKKRVLEPLGLVEEPVKTAPGKKRPVEHSPAEPDSSSGTGKSGQQPARKRLNFGQTGDADSVPDPQPLGQPPAAPSGLGTNTMASGSGAPMADNNEGADGVGNSSGNWHCDSTWMGDRVITTSTRTWALPTYNNHLYKQISSQSGASNDNHYFGYSTPWGYFDFNRFHCHFSPRDWQRLINNNWGFRPKRLNFKLFNIQVKEVTQNDGTTTIANNLTSTVQVFTDSEYQLPYVLGSAHQGCLPPFPADVLMVPQYGYLTLNNGSQAVGRSSFYCPEYLPSQMLRTGNNFTFSYTFEDVPFHSSYAHSQSLDRLMNPLIDQYLYYLSRTNTPSGTTTQSRLQFSQAGASDIRDQSRNWLPGPCYRQQRVSKTAADNNNSDYSWTGATKYHLNGRDSLVNPGTATASHKDDEEKYFPQSGVLIFGKQDSGKTNVDIEKVMITDEEEIRTTNPVATEQYGSVSTNLQSGNTQAATSDVNTQGVLPGMVWQDRDVYLQGPIWAKIPHTDGHFHPSPLMGGFGLKHPPPQILIKNTPVPANPSTAFSAAKFASFITQYSTGQVSVEIEWELQKENSERWNPEIQYTSNYNKSVNVDFTVDTNGVYSEPRPIGTRYLTRNL

SEQ ID NO: 2438 - protein, 735 aa, Artificial Sequence
  Description of Artificial Sequence: Synthetic polypeptide
MAADGYLPDWLEDTLSEGIRQWWKLKPGPPPPKPAERHKDDSRGLVLPGYKYLGPFNGLDKGEPVNEADAAALEHDKAYDRQLDSGDNPYLKYNHADAEFQERLKEDTSFGGNLARAVFQAKKRVLEPLGLVEEPVKTAPGKKRPVEHSPAEPDSSSGTGKSGQQPARKRLNFGQTGDADSVPDPQPLGQPPAAPSGLGTNTMASGSGAPMADNNEGADGVGNSSGNWHCDSTWMGDRVITTSTRTWALPTYNNHLYKQISSQSGASNDNHYFGYSTPWGYFDFNRFHCHFSPRDWQRLINNNWGFRPKRLNFKLFNIQVKEVTQNDGTTTIANNLTSTVQVFTDSEYQLPYVLGSAHQGCLPPFPADVFMVPQYGYLTLNNGSQAVGRSSFYCPEYLPSQMLRTGNNFTFSYTFEDVPFHSSYAHSQSLDRLMNPLIDQYLYYLSRTNTPSGTTTQSRLQFSQAGASDIRDQSRNWLPGPCYRQQRVSKTAADNNNSDYSWTGATKYHLNGRDSLVNPGTAMASHKDDGEKYFPQSGVLIFGKQDSGKTNVDIEKVMITDEEEIRTTNPVATEQYGSVSTNLQSGNTQAATSDVNTQGVLPGMVWQDRDVYLQGPIWAKIPHTDGHFHPSPLMGGFGLKHPPPQILIKNTPVPANPSTAFSAAKFASFITQYSTGQVSVEIEWELQKENSERWNPEIQYTSNYNKSVNVDLTVDTNGVYSEPRPIGTRYLTRNL

SEQ ID NO: 2439 - protein, 735 aa, Artificial Sequence
  Description of Artificial Sequence: Synthetic polypeptide
MAADGYLPDWLEDTLSEGIRQWWKLKPGPPPPKPAERHKDDSRGLVLPGYKYLGPFNGLDKGEPVNEADAAALEHDKAYDRQLDSGDNPYLKYNHADAEFQERLKEDTSFGGNLARAVFQAKKRVLEPLGLVEEPVKTAPGKKGPVEHSPAEPDSSSGTGKSGQQPARKRLNFGQTGDADSVPDPQPLGQPPAAPSGLGTNTMASGSGAPMADNNEGADGVGNSSGNWHCDSTWMGDRVITTSTRTWALPTYNNHLYKQISSQSGASNDNHYFGYSTPWGYFDFNRFHCHFSPRDWQRLINNNWGFRPKRLNFKLFNIQVKEVTQNDGTTTIANNLTSTVQVFTDSEYQLPYVLGSAHQGCLPPFPADVFMVPQYGYLTLNNGSQAVGRSSFYCLEYFPSQMLRTGNNFTFSYTFEDVPFHSSYAHSQSLDRLMNPLIDQYLYYLSRTNTPSGTTTQSRLRFSQAGASDIRDQSRNWLPGPCYRQQRVSKTAADNNNSDYSWTGATKYHLNGRDSLVNPGTAMASHKDDEEKYFPQSGVLIFGKQDSGKTNVDIERVMITDEEEIRTTNPVATEQYGSVSTNLQSGNTQAATSDVNTQGVLPGMVWQDRDVYLQGPIWAKIPHTDGHFHPSPLMGGFGLKHPPPQILIKNTPVPANPSTTFSAAKFASFITQYSTGQVSVEIEWELQKENSKRWNPEIQYTSNYNKSVNVDFTVDTNGVYSEPRPIGTRYLTRNL

SEQ ID NO: 2440 - protein, 735 aa, Artificial Sequence
  Description of Artificial Sequence: Synthetic polypeptide
MAADGYLPDWLEDTLSEGIRQWWKLKPGPPPPKPAERHKDDSRGLVLPGYKYLGPFNGLDKGEPVNEADAAALEHDKAYDRQLDSGDNPYLKYNHADAEFQERLKEDTSFGGNLARAVFQAKKRVLEPLGLVEEPVKTAPGKKRPVEHSPAGPDSSSGTGKSGQQPARKRLNFGQTGDADSVPDPQPLGQPPAAPSGLGTNTMASGSGAPMADNNEGADGVGNSSGNWHCDSTWMGDRVITTSTRTWALPTYNNHLYKQISSQSGASNDNHYFGYSTPWGYFDFNRFHCHFSPRDWQRLINNNWGFRPKRLNFELFNIQVKEVTQNDGTTTIANNLTSTVQVFTDSEYQLPYVLGSAHQGCLPPFPADVFMVPQYGYLTLNNGSQAVGRSSFYCLEYFPSQMLRTGNNFTFSYTFEDVPFHSSYAHSQSLDRLMNPLIDQYLYYLSRTNTPSGTTTQSRLQFSQAGASDIRDQSRNWLPGPCYRQQRVSKTAADNNNSDYSWTGATKYHLNGRDSLVNPGTAMASHKDDEEKYFPQSGVLIFGKQDSGKTNVDIEKVMITDEEEIRTTNPVATEQYGSVSTNLQSGNTQAATSDVNTQGVLPGMVWQDRDVYLQGPIWAKIPHTDGHFHPSPLMGGFGLKHPPPQILIKSTPVPANPSTTFSAAKFASFITQYSTGQVSVEIEWELQKENSKRWNPEIQYTSNYNKSVNVDFTVDTNGVYSDPRPIGTRYLTRNL

SEQ ID NO: 2441 - protein, 735 aa, Artificial Sequence
  Description of Artificial Sequence: Synthetic polypeptide
MAADGYLPDWLEDTLSEGIRQWWKLKPGPPPPRPAERHQDDSRGLVLPGYKYLGPFNGLDKGEPVNEADAAALEHDKAYDRQLDSGDNPYLKYNHADAEFQERLKEDTSFGGNLGRAVFQAKKRVLEPLGLVEEPVKTAPGKKRPVEHSPAEPDSSSGTGKAGQQPARKRLNFGQTGDADSVPDPQPLGQPPAAPTSLGSTTMATGSGAPMADNNEGADGVGNSSGNWHCDSQWLGDRVITTSTRTWALPTYNNHLYKQISSQSGASNDNHYFGYSTPWGYFDFNRFHCHFSPRDWQRLINNNWGFRPKRLNFKLFNIQVKEVTQNDGTTTIANNLTSTVQVFTDSEYQLPYVLGSAHQGCLPPFPADVFMVPQYGYLTLNNGSQAVGRSSFYCLEYFPSQMLRTGNNFTFSYTFEDVPFHSSYAHSQSLDRLMNPLIDQYLYYLSRTNTPSGTTTQSRLRFSQAGASDIRDQSRNWLPGPCYRQQRVSKTAADNNNSDYSWTGATKYHLNGRDSLVNPGTAMASHKDDEEKYFPQSGVLIFGKQDSGKTNVDIERVMITDEEEIRTTNPVATEQYGSVSTNLQSGNTQAATSDVNTQGVLPGMVWQDRDVYLQGPIWAKIPHTDGHFHPSPLMGGFGLKHPPPQILIKNTPVPANPSTTFSAAKFASFITQYSTGQVSVEIEWELQKENSKRWNPEIQYTSNYNKSVNVDFTVDTNGVYSEPRPIGTRYLTRNL

SEQ ID NO: 2442 - protein, 735 aa, Artificial Sequence
  Description of Artificial Sequence: Synthetic polypeptide
MAADGYLPDWLEDTLSEGIRQWWKLKPGPPPPRPAERHQDDSRGLVLPGYKYLGPFNGLDKGEPVNEADAAALEHDKAYDRQLDSGDNPYLKYNHADAEFQERLKEDTSFGGNLGRAVFQAKKRVLEPLGLVEEPVKTAPGKKRPVEHSPAEPDSSSGTGKAGQQPARKRLNFGQTGDADSVPDPQPLGQPPAAPSGLGTNTMASGSGAPMADNNEGADGVGNSSGNWHCDSTWMGDRVITTSTRTWALPTYNNHLYKQISSQSGASNDNHYFGYSTPWGYFDFNRFHCHFSPRDWQRLINNNWGFRPKRLNFKLFNIQVKEVTQNDGTTTIANNLTSTVQVFTDSEYQLPYVLGSAHQGCLPPFPADVFMVPQYGYLTLNNGSQAVGRSSFYCLEYFPSQMLRTGNNFTFSYTFEDVPFHSSYAHSQSLDRLMNPLIDQYLYYLSRTNTPSGTTTQSRLRFSQAGASDIRDQSRNWLPGPCYRQQRVSKTAADNNNSDYSWTGATKYHLNGRDSLVNPGTAMASHKDDEEKYFPQSGVLIFGKQDSGKTNVDIERVMITDEEEIRTTNPVATEQYGSVSTNLQSGNTQAATSDVNTQGVLPGMVWQDRDVYLQGPIWAKIPHTDGHFHPSPLMGGFGLKHPPPQILIKNTPVPANPSTTFSAAKFASFITQYSTGQVSVEIEWELQKENSKRWNPEIQYTSNYNKSVNVDFTVDTNGVYSEPRPIGTRYLTRNL

SEQ ID NO: 2443 - protein, 735 aa, Artificial Sequence
  Description of Artificial Sequence: Synthetic polypeptide
MAADGYLPDWLEDTLSEGIRQWWKLKPGPPPPKPAERHKDDSRGLVLPGYKYLGPFNGLDKGEPVNEADAAALEHDKAYDRQLDSGDNPYLKYNHADAEFQERLKEDTSFGGNLARAVFQAKKRVLEPLGLVEEPVKTAPGKKRPVEHSPAGPDSSSGTGKSGQQPARKRLNFGQTGDADSVPDPQPLGQPPAAPSGLGTNTMASGSGAPMADNNEGADGVGNSSGNWHCDSTWMGDRVITTSTRTWALPTYNNHLYKQISSQSGASNDNHYFGYSTPWGYFDFNRFHCHFSPRDWQRLINNNWGFRPKRLNFELFNIQVKEVTQNDGTTTIANNLTSTVQVFTDSEYQLPYVLGSAHQGCLPPFPADVFMVPQYGYLTLNNGSQAVGRSSFYCLEYFPSQMLRTGNNFTFSYTFEDVPFHSSYAHSQSLDRLMNPLIDQYLYYLSRTNTPSGTTTQSRLQFPQAGASDIRDQSRNWLPGPCYRQQRVSKTAADNNNSDYSWTGATKYHLNGRDSLVNPGTAMASHKDDEEKYFPQSGVLIFGKQDSGKTNVDIEKVMITDEEEIRTTNPVATEQYGSVSTNLQSGNTQAATSDVNTQGVLPGMVWQDRDVYLQGPIWAKIPHTDGHFHPSPLMGGFGLKHPPPQILIKSTPVPANPSTTFSAAKFASFITQYSTGQVSVEIEWELQKENSKRWNPEIQYTSNYNKSVNVDFTVDTNGVYSEPRPIGTRYLTRNL

SEQ ID NO: 2444 - protein, 735 aa, Artificial Sequence
  Description of Artificial Sequence: Synthetic polypeptide
MAADGYLPDWLEDTLSEGIRQWWKLKPGPPPPRPAERHQDDSRGLVLPGYKYLGPFNGLDKGEPVNEADAAALEHDKAYDRQLDSGDNPYLKYNHADAEFQERLKEDTSFGGNLGRAVFQAKKRVLEPLGLVEEPVKTAPGKKRPVEHSPAEPDSSSGTGKSGQQPARKRLNFGQTGDADSVPDPQPLGQPPAAPSGLGTNTMASGSGAPMADNNEGADGVGNSSGNWHCDSTWMGDRVITTSTRTWALPTYNNHLYKQISSQSGASNDNHYFGYSTPWGYFDFNRFHCHFSPRDWQRLINNNWGFRPKRLNFKLFNIQVKEVTQNDGTTTIANNLTSTVQVFTDSEYQLPYVLGSAHQGCLPPFPADVFMVPQYGYLTLNNGSQAVGRSSFYCLEYFPSQMLRTGNNFTFSYTFEDVPFHSSYAHSQSLDRLMNPLIDQYLYYLSRTNTPSGTTTQSRLRFSQAGASDIRDQSRNWLPGPCYRQQRVSKTAADNNNSDYSWTGATKYHLNGRDSLVNPGTAMASHKDDEEKYFPQSGVLIFGKQDSGKTNVDIERVMITDEEEIRTTNPVATEQYGSVSTNLQSGNTQAATSDVNTQGVLPGMVWQDRDVYLQGPIWAKIPHTDGHFHPSPLMGGFGLKHPPPQILIKNTPVPANPSTTFSAAKFASFITQYSTGQVSVEIEWELQKENSKRWNPEIQYTSNYNKSVNVDFTVDTNGVYSEPRPIGTRYLTRNL

SEQ ID NO: 2445 - protein, 735 aa, Artificial Sequence
  Description of Artificial Sequence: Synthetic polypeptide
MAADGYLPDWLEDTLSEGIRQWWKLKPGPPPPKPAERHKDDSRGLVLPGYKYLGPFNGLDKGEPVNEADAAALEHDKAYDRQLDSGDNPYLKYNHADAEFQERLKEDTSFGGNLARAVFQAKKRVLEPLGLVEEPVKTAPGKKRPVEHSPAEPDSSSGTGKSGQQPARKRLNFGQTGDADSVPDPQPLGQPPAAPSGLGTNTMASGSGAPMADNNEGADGVGNSSGNWHCDSTWMGDRVITTSTRTWALPTYNNHLYKQISSQSGASNDNHYFGYSTPWGYFDFNRFHCHFSPRDWQRLINNNWGFRPKRLNFKLFNIQVKEVTQNDGTTTIANNLTSTVQVFTDSEYQLPYVLGSAHQGCLPPFPADVFMVPQYGYLTLNNGSQAVGRSSFYCLEYFPSQMLRTGNNFTFSYTFEDVPFHSSYAHSQSLDRLMNPLIDQYLYYLSRTNTPSGTTTQSRLRFSQAGASDIRDQSRNWLPGPCYRQQRVSKTAADNNNSDYSWTGATKYHLNGRDSLVNPGTAMASHKDDEEKYFPQSGVLIFGKQDSGKTNVDIERVMITDEEEIRTTNPVATEQYGSVSTNLQSGNTQAATSDVNTQGVLPGMVWQDRDVYLQGPIWAKIPHTDGHFHPSPLMGGFGLKHPPPQILIKNTPVPANPSTTFSAAKFASFITQYSTGQVSVEIEWELQKENSKRWNPEIQYTSNYNKSVNVDFTVDTNGVYSEPRPIGTRYLTRNL

SEQ ID NO: 2446 - protein, 735 aa, Artificial Sequence
  Description of Artificial Sequence: Synthetic polypeptide
MAADGYLPDWLEDTLSEGIRQWWKLKPGPPPPKPAERHKDDSRGLVLPGYKYLGPFNGLDKGEPVNEADAAALEHDKAYDRQLDSGDNPYLKYNHADAEFQERLKEDTSFGGNLARAVFQAKKRVLEPLGLVEEPVKTAPGKKRPVEHSPAEPDSSSGTGKSGQQPARKRLNFGQTGDADSVPDPQPLGQPPAAPSGLGTNTMASGSGAPMADNNEGADGVGNSSGNWHCDSTWMGDRVITTSTRTWALPTYNNHLYKQISSQSGASNDNHYFGYSTPWGYFDFNRFHCHFSPRDWQRLINNNWGFRPKRLNFKLFNIQVKEVTQNDGTTTIANNLTSTVQVFTDSEYQLPYVLGSAHQGCLPPFPADVFMVPQYGYLTLNNGSQTVGRSSFYCLEYFPSQMLRTGNNFTFSYTFEDVPFHSSYAHSQSLDRLMNPLIDQYLYYLSRTNTPSGTTTQSRLRFSQAGASDIRDQSRNWLPGPCYRQQRVSKTAADNNNSDYSWTGATKYHLNGRDSLVNPGTAMASHKDDEEKYFPQSGVLIFGKQDSGKTNVDIERVMITDEEEIRTTNPVATEQYGSVSTNLQSGNTQAATSDVNTQGVLPGMVWQDRDVYLQGPIWAKIPHTDGHFHPSPLMGGFGLKHPPPQILIKNTPVPANPSTTFSAAKFASFITQYSTGQVSVEIEWELQKENSKRWNPEIQYTSNYNKSVNVDFTVDTNGVYSEPRPIGTRYLTRNL

SEQ ID NO: 2447 - protein, 735 aa, Artificial Sequence
  Description of Artificial Sequence: Synthetic polypeptide
MAADGYLPDWLEDTLSEGIRQWWKLKPGPPPPKPAERHKDDSRGLVLPGYKYLGPFNGLDKGEPVNEADAAALEHDKAYDRQLDSGDNPYLKYNHADAEFQERLKEDTSFGGNLARAVFQAKKRVLEPLGLVEEPVKTAPGKKRPVEHSPAEPDSSSGTGKSGQQPARKRLNFGQTGDADSVPDPQPLGQPPAAPSGLGTNTMASGSGAPMADNNEGADGVGNSSGNWHCDSTWMGDRVIPTSTRTWALPTYNNHLYKQISSQSGASNDNHYFGYSTPWGYFDFNRFHCHFSPRDWQRLINNNWGFRPKRLNFKLFNIQVKEVTQNDGTTTIANNLTSTVQVFTDSGYQLPYVLGSAHQGCLPPFPADVFMVPQYGYLTLNNGSQAVGRSSFYCLEYFPSQMLRTGNNFTFSYTFEDVPFHSSYAHSQSLDRLMNPLIDQYLYYLSRTNTPSGTTTQSRLRFSQAGASDIRDQSRNWLPGPCYRQQRVSKTAADNNNSDYSWTGATKYHLNGRDSLVNPGTAMASHKDDEEKYFPQSGVLIFGKQDSGKTNVDIERVMITDEEEIRTTNPVATEQYGSVSTNLQSGNTQAATSDVNTQGVLPGMVWQDRDVYLQGPIWAKIPHTDGHFHPSPLMGGFGLKHPPPQILIKNTPVPANPSTTFSAAKFASFITQYSTGQVSVEIEWELQKENSKRWNPEIQYTSNYNKSVNVDFTVDTNGVYSEPRPIGTRYLTRNL

SEQ ID NO: 2448 - protein, 735 aa, Artificial Sequence
  Description of Artificial Sequence: Synthetic polypeptide
MAADGYLPDWLEDTLSEGIRQWWKLKPGPPPPKPAERHKDDSRGLVLPGYKYLGPFNGLDKGEPVNEADAAALEHDKAYDRQLDSGDNPYLKYNHADAEFQERLKEDTSFGGNLARAVFQAKKRVLEPLGLVEEPVKTAPGKKRPVEHSPAEPDSSSGTGKSGQQPARKRLNFGQTGDADSVPDPQPLGQPPAAPSGLGTNTMASGSGAPMADNNEGADGVGNSSGNWHCDSTWMGDRVITTSTRTWALPTYNNHLYKQISSQSGASNDNHYFGYSTPWGYFDFNRFHCHFSPRDWQRLINNNWGFRPKRLNFKLFNIQVKEVTQNDGTTTIANNLTSTVQVFTDSEYQLPYVLGSAHQGCLPPFPADVFMVPQYGYLTLNNGSQAVGRSSFYCLEYFPSQMLRTGNNFTFSYTFEDVPFHSSYAHSQSLDRLMNPLIDQYLYYLSRTNTPSGTTTQSRLRFSQAGASDIRDQSRNWLPGPCYRQQRVSKTAADNNNSDYSWTGATKYHLNGRDSLVNPGTAMASHKDDEEKYFPQSGVLIFGKQDSGKTNVDIERVMITDEEEIRTTNPVATEQYGSVSTNLQSGDTQAATSDVNTQGVLPGMVWQDRDVYLQGPIWAKIPHTDGHFHPSPLMGGFGLKHPPPQILIKNTPVPANPSTTFSAAKFASFITQYSTGQVSVEIEWELQKENSKRWNPEIQYTSNYNKSVNVDFTVDTNGVYSEPRPIGTRYLTRNL

SEQ ID NO: 2449 - protein, 734 aa, Artificial Sequence
  Description of Artificial Sequence: Synthetic polypeptide
MAADGYLPDWLEDTLSEGIRQWWKLKPGPPPPKPAERHKDDSRGLVLPGYKYLGPFNGLDKGEPVNEADAAALEHDKAYDRQLDSGDNPYLKYNHADAEFQERLKEDTSFGGNLARAVFQAKKRVLEPLGLVEEPVKTAPGKKRPVEHSPAEPDSSSGTGKSGQQPARKRLNFGQTGDADSVPDPQPLGQPPAAPSGLGTNTMASGSGAPMADNNEGADGVGNSSGNWHCDSTWMGDRVITTSTRTWALPTYNNHLYKQISSQSGASNDNHYFGYSTPWGYFDFNRFHCHFSPRDWQRLINNNWGFRPKRLNFKLFNIQVKEVTQNDGTTTIANNLTSTVQVFTDSEYQLPYVLGSAHQGCLPPFPADVFMVPQYGYLTLNNGSQAVGRSSFYCLEYFPSQMLRTGNNFTFSYTFEDVPFHSSYAHSQSLDRLMNPLIDQYLYYLSRTNTPSGTTTQSRLRFSQAGASDIRDQSRNWLPGPCYRQQRVSKTAADNNSDYSWTGATKYHLNGRDSLVNPGTAMASHKDDEEKYFPQSGVLIFGKQDSGKTNVDIERVMITDEEEIRTTNPVATEQYGSVSTNLQSGNTQAATSDVNTQGVLPGMVWQDRDVYLQGPIWAKIPHTDGHFHPSPLMGGFGLKHPPPQILIKNTPVPANPSTTFSAAKFASFITQYSTGQVSVEIEWELQKENSKRWNPEIQYTSNYNKSVNVDFTVDTNGVYSEPRPIGTRYLTRNL

SEQ ID NO: 2450 - protein, 735 aa, Artificial Sequence
  Description of Artificial Sequence: Synthetic polypeptide
MAADGYLPDWLEDTLSEGIRQWWKLKPGPPPPKPAERHKDDSRGLVLPGYKYLGPFNGLDKGEPVNEADAAALEHDKAYDRQLDSGDNPYLKYNHADAEFQERLKEDTSFGGNLARAVFQAKKRVLEPLGLVEEPVKTAPGKKRPVEHSPAEPDSSSGTGKSGQQPARKRLNFGQTGDADSVPDPQPLGQPPAAPSGLGTNTMASGSGAPMADNNEGADGVGNSSGNWHCDSTWMGDRVITTSTRTWALPTYNNHLYKQISSQSGASNDNHYFGYSTPWGYFDFNRFHCHFSPRDWQRLINNNWGFRPKRLNFKLFNIQVKEVTQNDGTTTIANNLTSTVQVFTDSEYQLPYVLGSAHQGCLPPFPADVFMVPQYGYLTLNNGSQAVGRSSFYCLEYFPSQMLRTGNNFTFSYTFEDVPFHSSYAHSQSSDRLMNPLIDQYLYYLSRTNTPSGTTTQSRLRFSQAGASDIRDQSRNWLPGPCYRQQRVSKTAADNNNSDYSWTGATKYHLNGRDSLVNPGTAMASHKDDEEKYFPQSGVLIFGKQDSGKTNVDIERVMITDEEEIRTTNPVATEQYGSVSTNLQSGNTQAATSDVNTQGVLPGMVWQDRDVYLQGPIWAKIPHTDGHFRPSPLMGGFGLKHPPPQILIKNTPVPANPSTTFSAAKFASFITQYSTGQVSVEIEWELQKENSKRWNPEIQYTSNYNKSVNVDFTVDTNGVYSEPRPIGTRYLTRNL

SEQ ID NO: 2451 - protein, 735 aa, Artificial Sequence
  Description of Artificial Sequence: Synthetic polypeptide
MAADGYLPDWLEDTLSEGIRQWWKLKPGPPPPKPAERHKDDSRGLVLPGYKYLGPFNGLDKGEPVNEADAAALEHDKAYDRQLDSGDNPYLKYNHADAEFQERLKEDTSFGGNLARAVFQAKKRVLEPLGLVEEPVKTAPGKKRPVEHSPAGPDSSSGTGKSGQQPARKRLNFGQTGDADSVPDPQPLGQPPAAPSGLGTNTMASGSGAPMADNNEGADGVGNSSGNWHCDSTWMGDRVITTSTRTWALPTYNNHLYKQISSQSGASNDNHYFGYSTPWGYFDFNRFHCHFSPRDWQRLINNNWGFRPKRLNFELFNIQVKEVTQNDGTTTIANNLTSTVQVFTDSEYQLPYVLGSAHQGCLPPFPADVFMVPQYGYLTLNNGSQAVGRSSFYCLEYFPSQMLRTGNNFTFSYTFEDVPFHSSYAHSQSLDRLMNPLIDQYLYYLSRTNTPSGTTTQSRLQFSQAGASDIRDQSRNWLPGPCYRQQRVSKTAADNNNSDYSWTGATKYHLNGRDSLVNPGTAMASHKDDEEKYFPQSGVLIFGKQDSGKTNVDIEKVMITDEEEIRTTNPVATEQYGSVSTNLQSGNTQAATSDVNTQGVLPGMVWQDRGVYLQGPIWAKIPHTDGHFHPSPLMGGFGLKHPPPQILIKSTPVPANPSTTFSAAKFASFITQYSTGQVSVEIEWELQKENSKRWNPEIQYTSNYNKSVNVDFTVDTNGVYSDPRPIGTRYLTRNL

SEQ ID NO: 2452 - protein, 735 aa, Artificial Sequence
  Description of Artificial Sequence: Synthetic polypeptide
MAADGYLPDWLEDTLSEGIRQWWKLKPGPPPPKPAERHKDDSRGLVLPGYKYLGPFNGLDKGEPVNEADAAALEHDKAYDRQLDSGDNPYLKYNHADAEFQERLKEDTSFGGNLARAVFQAKKRVLEPLGLVEEPVKTAPGKKRPVEHSPAEPDSSSGTGKSGQQPARKRLNFGQTGDADSVPDPQPLGQPPAAPSGLGTNTMASGSGAPMADNNEGADGVGNSSGNWHCDSTWMGDRVITTSTRTWALPTYNNHLYKQISSQSGASNDNHYFGYSTPWGYFDFNRFHCHFSPRGWQRLINNNWGFRPKRLNFKLFNIQVKEVTQNDGTTTIANNLTSTVQVFTDSEYQLPYVLGSAHQGCLPPFPADVFMVPQYGYLTLNNGSQAVGRSSFYCLEYFPSQMLRTGSNFTFSYTFEDVPFHSSYAHSQSLDRLMNPLIDQYLYYLSRTNTPSGTTTQSRLRFSQAGASDIRDQSRNWLPGPCYRQQRVSKTAADNNNSDYSWTGATKYHLNGRDSLVNPGTAMASHKDDEEKYFPQSGVLIFGKQDSGKTNVDIERVMITDEEEIRTTNPVATEQYGSVSTNLQSGNTQAATSDVNTQGVLPGMVWQDRDVYLQGPIWAKIPHTDGHFHPSPLMGGFGLKHPPPQILIKNTPVPANPSTTFSAAKFASFITQYSTGQVSVEIEWELQKENSKRWNPEIQYTSNYNKSVNVDFTVDTNGVYSEPRPIGTRYLTRNL

SEQ ID NO: 2453 - protein, 735 aa, Artificial Sequence
  Description of Artificial Sequence: Synthetic polypeptide
MAADGYLPDWLEDTLSEGIRQWWKLKPGPPPPRPAERHQDDSRGLVLPGYKYLGPFNGLDKGEPVNEADAAALEHDKAYDRQLDSGDNPYLKYNHADAEFQERLKEDTSFGGNLARAVFQAKKRVLEPLGLVEEPVKTAPGKKRPVEHSPAEPDSSSGTGKSGQQPARKRLNFGQTGDADSVPDPQPLGQPPAAPSGLGTNTMASGSGAPMADNNEGADGVGNSSGNWHCDSTWMGDRVITTSTRTWALPTYNNHLYKQISSQSGASNDNHYFGYSTPWGYFDFNRFHCHFSPRDWQRLINNNWGFRPKRLNFKLFNIQVKEVTQNDGTTTIANNLTSTVQVFTDSEYQLPYVLGSAHQGCLPPFPADVFMVPQYGYLTLNNGSQAVGRSSFYCLEYFPSQMLRTGNNFTFSYTFEDVPFHSSYAHSQSLDRLMNPLIDQYLYYLSRTNTPSGTTTQSRLRFSQAGASDIRDQSRNWLPGPCYRQQRVSKTAADNNNSDYSWTGATKYHLNGRDSLVNPGTAMASHKDDEEKYFPQSGVLIFGKQDSGKTNVDIERVMITDEEEIRTTNPVATEQYGSVSTNLQSGNTQAATSDVNTQGVLPGMVWQDRDVYLQGPIWAKIPHTDGHFHPSPLMGGFGLKHPPPQILIKNTPVPANPSTTFSAAKFASFITQYSTGQVSVEIEWELQKENSKRWNPEIQYTSNYNKSVNVDFTVDTNGVYSEPRPIGTRYLTRNL

SEQ ID NO: 2454 - protein, 735 aa, Artificial Sequence
  Description of Artificial Sequence: Synthetic polypeptide
MAADGYLPDWLEDTLSEGIRQWWKLKPGPPPPKPAERHKDDSRGLVLPGYKYLGPFNGLDKGEPVNEADAAALEHDKAYDRQLDSGDNPYLKYNHADAEFQERLKEDTSFGGNLARAVFQAKKRVLEPLGLVEEPVKTAPGKKRPVEHSPAEPDSSSGTGKSGQQPARKRLNFGQTGDADSVPDPQPLGQPPAAPSGLGTNTMASGSGAPMADNNEGADGVGNSSGNWHCDSTWMGDRVITTSTRTWALPTYNNHLYKQISSQSGASNDNHYFGYSTPWGYFDFNRFHCHFSPRDWQRLINNNWGFRPKRLNFKLFNIQVKEVTQNDGTTTIANNLTSTVQVFTDSEYQLPYVPGSAHQGCLPPFPADVFMVPQYGYLTLNNGSQAVGRSSFYCLEYFPSQMLRTGNNFTFSYTFEDVPFHSSYAHSQSLDRLMNPLIDQYLYYLSRTNTPSGTTTQSRLRFSQAGASDIRDQSRNWLPGPCYRQQRVSKTAADNNNSDYSWTGATKYHLNGRDSLVNPGTAMASHKDDEEKYFPQSGVLIFGKQDSGKTNVDIERVMITDEEEIRTTNPVATEQYGSVSTNLQSGNTQAATSDVNTQGVLPGMVWQDRDVYLQGPIWAKIPHTDGHFHPSPLMGGFGLKHPPPQILIKNTPVPANPSTTFSAAKFASFITQYSTGQVSVEIEWELQKENSKRWNPEIQYTSNYNKSVNVDFTVDTNGVYSEPRPIGTRYLTRNL

SEQ ID NO: 2455 - protein, 735 aa, Artificial Sequence
  Description of Artificial Sequence: Synthetic polypeptide
MAADGYLPDWLEDTLSEGIRQWWKLKPGPPPPKPAERHKDDSRGLVLPGYKYLGPFNGLDKGEPVNEADAAALEHDKAYDRQLDSGDNPYLKYNHADAEFQERLKEDTSFGGNLARAVFQAKKRVLEPLGLVEEPVKTAPGKKRPVEHSPAEPDSSSGTGKSGQQPARKRLNFGQTGDADSVPDPQPLGQPPAAPSGLGTNTMASGSGAPMADNNEGADGVGNSSGNWHCDSTWMGDRVITTSTRTWALPTYDNHLYKQISSQSGASNDNHYFGYSTPWGYFDFNRFHCHFSPRDWQRLINNNWGFRPKRLNFKLFNIQVKEVTQNDGTTTIANNLTSTVQVFTDSEYQLPYVLGSAHQGCLPPFPADVFMVPQYGYLTLNNGSQAVGRSSFYCLEYFPSQMLRTGNNFTFSYTFEDVPFHSSYAHSQSLDRLMNPLIDQYLYYLSRTNTSSGTTTQSRLRFSQAGASDIRDQSRNWLPGPCYRQQRVSKTAADNNNSDYSWTGATKYHLNGRDSLVNPGTAMASHKDDEEKYFPQSGVLIFGKQDSGKTNVDIERVMITDEEEIRTTNPVATEQYGSVSTNLQSGNTQAATSDVNTQGVLPGMVWQDRDVYLQGPIWAKIPHTDGHFHPSPLMGGFGLKHPPPQILIKNTPVPANPSTTFSAAKFASFITQYSTGQVSVEIEWELQKENSKRWNPEIQYTSNYNKSVNVDFTVDTNGVYSEPRPIGTRYLTRNL

SEQ ID NO: 2456 - protein, 735 aa, Artificial Sequence
  Description of Artificial Sequence: Synthetic polypeptide
MAADGYLPDWLEDTLSEGIRQWWKLKPGPPPPRPAERHQDDSRGLVLPGYKYLGPFNGLDKGEPVNEADAAALEHDKAYDRQLDSGDNPYLKYNHADAEFQERLKEDTSFGGNLGRAVFQAKKRVLEPLGLVEEPVKTAPGKKRPVEHSPAEPDSSSGTGKAGQQPARKRLNFGQTGDADSVPDPQPLGQPPAAPTSLGSTTMATGSGAPMADNNEGADGVGNSSGNWHCDSQWLGDRVITTSTRTWALPTYNNHLYKQISSQSGASNDNHYFGYSTPWGYFDFNRFHCHFSPRDWQRLINNNWGFRPKRLNFKLFNIQVKEVTQNDGTTTIANNLTSTVQVFTDSEYQLPYVLGSAHQGCLPPFPADVFMVPQYGYLTLNNGSQAVGRSSFYCLEYFPSQMLRTGNNFTFSYTFEDVPFHSSYAHSQSLDRLMNPLIDQYLYYLSRTNTPSGTTTQSRLQFSQAGASDIRDQSRNWLPGPCYRQQRVSKTAADNNNSDYSWTGATKYHLNGRDSLVNPGTAMASHKDDEEKYFPQSGVLIFGKQDSGKTNVDIEKVMITDEEEIRTTNPVATEQYGSVSTNLQSGNTQAATSDVNTQGVLPGMVWQDRDVYLQGPIWAKIPHTDGHFHPSPLMGGFGLKHPPPQILIKSTPVPANPSTTFSAAKFASFITQYSTGQVSVEIEWELQKENSKRWNPEIQYTSNYNKSVNVDFTVDTNGVYSEPRPIGTRYLTRNL

SEQ ID NO: 2457 - protein, 735 aa, Artificial Sequence
  Description of Artificial Sequence: Synthetic polypeptide
MAADGYLPDWLEDTLSEGIRQWWKLKPGPPPPKPAERHKDDSRGLVLPGYKYLGPFNGLDKGEPVNEADAAALEHDKAYDRQLDSGDNPYLKYNHADAEFQERLKEDTSFGGNLARAVFQAKKRVLEPLGLVEEPVKTAPGKKRPVEHSPAEPDSSSGTGKSGQQPARKRLNFGQTGDADSVPDPQPLGQPPAAPSGLGTNTMASGSGAPMADNNEGADGVGNSSGNWHCDSTWMGDRVITTSTRTWALPTYNNHLYKQISSQSGASNDNHYFGYSTPWGYFDFNRFHCHFSPRDWQRLINNNWGFRPKRLNFKLFNIQVKEVTQNDGTTTIANNLTSTVQVFTDSEYQLPYVLGSAHQGCLPPFPADVFMVPQYGYLTLNNGSQAVGRSSFYCLEYFPSQMLRTGNNFTFSYTFEDVPFHSSYAHSQSSDRLMNPLIDQYLYYLSRTNTPSGTTTQSRLRFSQAGASDIRDQSRNWLPGPCYRQQRVSKTAADNNNSDYSWTGATKYHLNGRDSLVNPGTAMASHKDDEEKYFPQSGVLIFGKQDSGKTNVDIERVMITDEEEIRTTNPVATEQYGSVSTNLQSGNTQAATSDVNTQGVLPGMVWQDRDVYLQGPIWAKIPHTDGHFHPSPLMGGFGLKHPPPQILIKNTPVPANPSTTFSAAKLASFITQYSTGQVSVEIEWELQKENSKRWNPEIQYTSNYNKSVNVDFTVDTNGVYSEPRPIGTRYLTRNL

SEQ ID NO: 2458 - protein, 735 aa, Artificial Sequence
  Description of Artificial Sequence: Synthetic polypeptide
MAADGYLPDWLEDTLSEGIRQWWKLKPGPPPPKPAERHKDDSRGLVLPGYKYLGPFNGLDKGEPVNEADAAALEHDKAYDRQLDSGDNPYLKYNHADAEFQERLKEDTSFGGNLARAVFQAKKRVLEPLGLVEEPVKTAPGKKRPVEHSPAEPDSSSGTGKSGQQPARKRLNFGQTGDADSVPDPQPLGQPPAAPSGLGTNTMASGSGAPMADNNEGADGVGNSSGNWHCDSTWMGDRVITTSTRTWALPTYNNHLYKQISSQSGASNDNHYFGYSTPWGYFDFNRFHCHFSPRDWQRLINNNWGFRPKRLNFKLFNIQVKEVTQNDGTTTIANNLTSTVQVFTDSEYQLPYVLGSAHQGCLPPFPADVFMVPQYGYLTLNNGSQAVGRSSFYCLEYFPSQMLRTGNNFTFSYTFEDVPFHSSYAHSQSLDRLMNPLIDQYLYYLSRTNTPSGTTTQSRLRFSQAGASDIRDQSRNWLPGPCYRQQRVSKTAADNNNSDYSWTGATKYHLNGRDSLVNPGTAMASHKDDEEKYFPQSGVLIFGKQDSGKTNVDIERVMITDEEEIRTTNPVATEQYGSVSTNLQSGNTQAATSDVNTQGVLPGMVWQDRDVYLQGPIWAKIPHTDGHFHPSPLMGGFGLKHPPPQILIKNTPVPANPSTTFSAAKFASFITQYSTGQVSVEIEWELQKENSKRWNPEIQYTSNYNKSVNVDFTVDANGVYSEPRPIGTRYLTRNL

SEQ ID NO: 2459 - protein, 735 aa, Artificial Sequence
  Description of Artificial Sequence: Synthetic polypeptide
MAADGYLPDWLEDTLSEGIRQWWKLKPGPPPPKPAERHKDDSRGLVLPGYKYLGPFNGLDKGEPVNEADAAALEHDKAYDRQLDSGDNPYLKYNHADAEFQERLKEDTSFGGNLARAVFQAKKRVLEPLGLVEEPVKTAPGKKRPVEHSPAGPDSSSGTGKSGQQPARKRLNFGQTGDADSVPDPQPLGQPPAAPSGLGTNTMASGSGAPMADNNEGADGVGNSSGNWHCDSTWMGDRVITTSTRTWALPTYNNHLYKQISSQSGASNDNHYFGYSTPWGYFDFNRFHCHFSPRDWQRLINNNWGFRPKRLNFELFNIQVKEVTQNDGTTTIANNLTSTVQVFTDSEYQLPYVLGSAHQGCLPPFPADVFMVPQYGYLTLNNGSQAVGRSSFYCLEYFPSQMLRTGNNFTFSYTFEDVPFHSSYAHSQSLDRLMNPLIDQYLYYLSRTNTPSGTTTQSRLQFSQAGASDIRDQSRNWLPGPCYRQQRVSKTAADNNNSDYSWTGATKYHLNGRDSLVNPGTAMASHKDDEEKYFPQSGVLIFGKQDSGKTNVDIEKVMITDEEEIRTTNPVATEQYGSVSTNLQSGNTQAATSDVNTQGVLPGMVWQDRDVYLQGPIWAKIPHTDGHFHPSPLMGGFGLKHPPPQILIKSTPVPANPSTTFSAAKFASFITQYSTGQVSVEIEWELQKENSKRWNPEIQYTSNCNKSVNVDFTVDTNGVYSDPRPIGTRYLTRNL

SEQ ID NO: 2460 - protein, 735 aa, Artificial Sequence
  Description of Artificial Sequence: Synthetic polypeptide
MAADGYLPDWLEDTLSEGIRQWWKLKPGPPPPKPAERHKDDSRGLVLPGYKYLGPFNGLDKGEPVNEADAAALEHDKAYDRQLDSGDNPYLKYNHADAELQERLKEDTSFGGNLARAVFQAKKRVLEPLGLVEEPVKTAPGKKRPVEHSPAEPDSSSGTGKSGQQPARKRLNFGQTGDADSVPDPQPLGQPPAAPSGLGTNTMASGSGAPMADNNEGADGVGNSSGNWHCDSTWMGDRVITTSTRTWALPTYNNHLYKQISSQSGASNDNHYFGYSTPWGYFDFNRFHCHFSPRDWQRLINNNWGFRPKRLNFKLFNIQVKEVTQNDGTTTIANNLTSTVQVYTDSEYQLPYVLGSAHQGCLPPFPADVFMVPQYGYLTLNNGSQAVGRSSFYCLEYFPSQMLRTGNNFTFSYTFEDVPFHSSYAHSQSLDRLMNPLIDQYLYYLSRTNTPSGTTTQSRLRFSQAGASDIRDQSRNWLPGPCYRQQRVSKTAADNNNSDYSWTGATKYHLNGRDSLVNPGTAMASHKDDEEKYFPQSGVLIFGKQDSGKTNVDIERVMITDEEEIRTTNPVATEQYGSVSTNLQSGNTQAATSDVNTQGVLPGMVWQDRDVYLQGPIWAKIPHTDGHFHPSPLMGGFGLKHPPPQILIKNTPVPANPSTTFSAAKFASFITQYSTGQVSVEIEWELQKENSKRWNPEIQYTSNYNKSVNVDFTVDTNGVYSEPRPIGTRYLTRNL

SEQ ID NO: 2461 - protein, 735 aa, Artificial Sequence
  Description of Artificial Sequence: Synthetic polypeptide
MAADGYLPDWLEDTLSEGIRQWWKLKPGPPPPKPAERHKDDSRGLVLPGYKYLGPFNGLDKGEPVNEADAAALEHDKAYDRQLDSGDNPYLKYNHADAEFQERLKEDTSFGGNLARAVFQAKKRVLEPLGLVEEPVKTAPGKKRPVEHSPAEPDSSSGTGKSGQQPVRKRLNFGQTGDADSVPDPQPLGQPPAAPSGLGTNTMASGSGAPMADNNEGADGVGNSSGNWHCDSTWMGDRVITTSTRTWALPTYNNHLYKQISSQSGASNDNHYFGYSTPWGYFDFNRFHCHFSPRDWQRLINNNWGFRPKRLNFKLFNIQVKEVTQNDGTTTIANNLTSTVQVFTDSEYQLPYVLGSAHQGCLPPFPADVFMVPQYGYLTLNNGSQAVGRSSFYCLEYFPSQMLRTGSNFTFSYTFEDVPFHSSYAHSQSLDRLMNPLIDQYLYYLSRTNTPSGTTTQSRLRFSQAGASDIRDQSRNWLPGPCYRQQRVSKTAADNNNSDYSWTGATKYHLNGRDSLVNPGTAMASHKDDEEKYFPQSGVLIFGKQDSGKTNVDIERVMITDEEEIRTTNPVATEQYGSVSTNLQSGNTQAATSDVNTQGVLPGMVWQDRDVYLQGPIWAKIPHTDGHFHPSPLMGGFGLKHPPPQILIKNTPVPANPSTTFSAAKFASFITQYSTGQVSVEIEWELQKENSKRWNPEIQYTSNYNKSVNVDFTVDTNGVYSEPRPIGTRYLTRNL

SEQ ID NO: 2462 - protein, 735 aa, Artificial Sequence
  Description of Artificial Sequence: Synthetic polypeptide
MAADGYLPDWLEDTLSEGIRQWWKLKPGPPPPRPAERHQDDSRGLVLPGYKYLGPFNGLDKGEPVNEADAAALEHDKAYDRQLDSGDNPYLKYNHADAEFQERLKEDTSFGGNLGRAVFQAKKRVLEPLGLVEEPVKTAPGKKRPVEHSPAGPDSSSGTGKSGQQPARKRLNFGQTGDADSVPDPQPLGQPPAAPSGLGTNTMASGSGAPMADNNEGADGVGNSSGNWHCDSTWMGDRVITTSTRTWALPTYNNHLYKQISSQSGASNDNHYFGYSTPWGYFDFNRFHCHFSPRDWQRLINNNWGFRPKRLNFELFNIQVKEVTQNDGTTTIANNLTSTVQVFTDSEYQLPYVLGSAHQGCLPPFPADVFMVPQYGYLTLNNGSQAVGRSSFYCLEYFPSQMLRTGNNFTFSYTFEDVPFHSSYAHSQSLDRLMNPLIDQYLYYLSRTNTPSGTTTQSRLQFSQAGASDIRDQSRNWLPGPCYRQQRVSKTAADNNNSDYSWTGATKYHLNGRDSLVNPGTAMASHKDDEEKYFPQSGVLIFGKQDSGKTNVDIEKVMITDEEEIRTTNPVATEQYGSVSTNLQSGNTQAATSDVNTQGVLPGMVWQDRDVYLQGPIWAKIPHTDGHFHPSPLMGGFGLKHPPPQILIKSTPVPANPSTTFSAAKFASFITQYSTGQVSVEIEWELQKENSKRWNPEIQYTSNYNKSVNVDFTVDTNGVYSEPRPIGTRYLTRNL

SEQ ID NO: 2463 - protein, 735 aa, Artificial Sequence
  Description of Artificial Sequence: Synthetic polypeptide
MAADGYLPDWLEDTLSEGIRQWWKLKPGPPPPKPAERHKDDSRGLVLPGYKYLGPFNGLDKGEPVNEADAAALEHDKAYDRQLDSGDNPYLKYNHADAEFQERLKEDTSFGGNLARAVFQAKKRVLEPLGLVEEPVKTAPGKKRPVEHSPAEPDSSSGTGKSGQQPARKRLNFGQTGDADSVPDPQPLGQPPAAPSGLGTNTMASGSGAPMADNNEGADGVGNSSGNWHCDSTWMGDRVITTSTRTWALPTYNNHLYKQISSQSGASNDNHYFGYSTPWGYFDFNRFHGHFSPRDWQRLINNNWGFRPKRLNFKLFNIQVKEVTQNDGTTTIANNLTSTVQVFTDSEYQLPYVLGSAHQGCLPPFPADVFMVPQYGYLTLNNGSQAVGRSSFYCLEYFPSQMLRTGNNFTFSYTFEDVPFHSSYAHSQSLDRLMNPLIDQYLYYLSRTNTPSGTTTQSRLRFSQAGASDIRDQSRNWLPGPCYRQQRVSKTAADNNNSDYSWTGATKYHLNGRDSLVNPGTAMASHKDDEEKYFPQSGVLIFGKQDSGKTNVDIERVMITDEEEIRTTNPVATEQYGSVSTNLQSGNTQAATSDVNTQGVLPGMVWQDRDVYLQGPIWAKIPHTDGHFHPSPLMGGFGLKHPPPQILIKNTPVPANPSTTFSAAKFASFITQYSTGQVSVEIEWELQKENSKRWNPEIQYTSNYNKSVNVDFTVDTNGVYSEPRPIGTRYLTRNL

SEQ ID NO: 2464 - protein, 735 aa, Artificial Sequence
  Description of Artificial Sequence: Synthetic polypeptide
MAADGYLPDWLEDTLSEGIRQWWKLKPGPPPPKPAERHKDDSRGLVLPGYKYLGPFNGLDKGEPVNEADAAALEHDKAYDRQLDSGDNPYLKYNHADAEFQERLKEDTSFGGNLARAVFQAKKRVLEPLGLVEEPVKTAPGKKRPVEHSPAEPDSSSGTGKSGQQPARKRLNFGQTGDADSVPDPQPLGQPPAAPSGLGTNTMASGSGAPMADNNEGADGVGNSSGNWHCDSTWMGDRVITTSTRTWALPTYNNHLYKQISSQSGASNDNHYFGYSTPWGYFDFNRFHCHFSPRDWQRLINNNWGFRPKRLNFKLFNIQVKEVTQNDGTTTIANNLTSTVQVFTDSEYQLPYVLGSAHQGCLPPFPADVFMVPQYGYLTLNNGSQAVGRSSFYCLEYFPSQMLRTGNNFTFSYTFEDVPFHSSYAHSQSLDRLMNPLIDQYLYYLSRTNTPSGTTTQSRLRFSQAGASDIRDQSRNWLPGPCYRQQRVSKTAADNNNSDYSWTGATKYHLNGRDSLVNPGTAMASHKDDEEKYFPQSGVLIFGKQDSGKTNVDIERVMITDEEEIRTTNPVATEQYGSVSTNLQSGNTQAATSDVNTQGVLPGMVWQDRDVYLQGPIWAKIPHTDGHFRPSPLMGGFGLKHPPPQILIKNTPVPANPSTTFSAAKFASFITQYSTGQVSVEIEWELQKENSKRWNPEIQYTSNYNKSVNVDFTVDTNGVYSEPRPIGTRYLTRNL

SEQ ID NO: 2465 - protein, 735 aa, Artificial Sequence
  Description of Artificial Sequence: Synthetic polypeptide
MAADGYLPDWLEDTLSEGIRQWWKLKPGPPPPKPAERHKDDSRGLVLPGYKYLGPFNGLDKGEPVNEADAAALEHDKAYDRQLDSGDNPYLKYNHADAEFQERLKEDTSFGGNLGRAVFQAKKRALEPLGLVEEPVKTAPGKKRPVEHSPVEPDSSSGTGKAGQQPARKRLNFGQTGDADSVPDPQPLGQPPAAPSGLGTNTMATGSGAPMADNNEGADGVGNSSGNWHCDSTWMGDRVITTSTRTWALPTYNNHLYKQISSQSGASNDNHYFGYSTPWGYFDFNRFHCHFSPRDWQRLINNNWGFRPKRLNFKLFNIQVKEVTQNDGTTTIANNLTSTVQVFTDSEYQLPYVLGSAHQGCLPPFPADVFMVPQYGYLTLNNGSQAVGRSSFYCLEYFPSQMLRTGNNFTFSYTFEDVPFHSSYAHSQSLDRLMNPLIDQYLYYLSRTNTPSGTTTQSRLQFSQAGASDIRDQSRNWLPGPCYRQQRVSKTSADNNNSEYSWTGATKYHLNGRDSLVNPGPAMASHKDDEEKFFPQSGVLIFGKQGSEKTNVDIEKVMITDEEEIRTTNPVATEQYGSVSTNLQRGNRQAATADVNTQGVLPGMVWQDRDVYLQGPIWAKIPHTDGHFHPSPLMGGFGLKHPPPQILIKNTPVPANPSTTFSAAKFASFITQYSTGQVSVEIEWELQKENSKRWNPEIQYTSNYNKSVNVDFTVDTNGVYSEPRPIGTRYLTRNL

SEQ ID NO: 2466 - protein, 735 aa, Artificial Sequence
  Description of Artificial Sequence: Synthetic polypeptide
MAADGYLPDWLEDTLSEGIRQWWKLKPGPPPPKPAERHKDDSRGLVLPGYKYLGPFNGLDKGEPVNEADAAALEHDKAYDRQLDSGDNPYLKYNHADAEFQERLKEDTSFGGNLGRAVFQAKKRVLEPLGLVEEPVKTAPGKKRPVEHSPVEPDSSSGTGKAGQQPARKRLNFGQTGDADSVPDPQPLGQPPAAPSGLGTNTMATGSGAPMADNNEGADGVGNSSGNWHCDSTWMGDRVITTSTRTWALPTYNNHLYKQISSQSGASNDNHYFGYSTPWGYFDFNRFHCHFSPRDWQRLINNNWGFRPKRLNFKLFNIQVKEVTQNDGTTTIANNLTSTVQVFTDSEYQLPYVLGSAHQGCLPPFPADVFMVPQYGYLTLNNGSQAVGRSSFYCLEYFPSQMLRTGNNFTFSYTFEDVPFHSSYAHSQSLDRLMNPLIDQYLYYLSRTNTPSGTTTQSRLQFSQAGASDIRDQSRNWLPGPCYRQQRVSKTSADNNNSEYSWTGATKYHLNGRDSLVNPGPAMASHKDDEEKFFPQSGVLIFGKQGSEKTNVDIEKVMITDEEEIRTTNPVATEQYGSVSTNLQRGNRQAATADVNTQGVLPGTVWQDRDVYLQGPIWAKIPHTDGHFHPSPLMGGFGLKHPPPQILIKNTPVPANPSTTFSAAKFASFITQYSTGQVSVEIEWELQKENSKRWNPEIQYTSNYNKSVNVDFTVDTNGVYSEPRPIGTRYLTRNL

SEQ ID NO: 2467 - protein, 735 aa, Artificial Sequence
  Description of Artificial Sequence: Synthetic polypeptide
MAADGYLPDWLEDTLSEGIRQWWKLKPGPPPPKPAERHKDDSRGLVLPGYKYLGPFNGLDKGEPVNEADAAALEHDKAYNRQLDSGDNPYLKYNHADAEFQERLKEDTSFGGNLGRAVFQAKKRVLEPLGLVEEPVKTAPGKKRPVEHSPVEPDSSSGTGKAGQQPARKRLNFGQTGDADSVPDPQPLGQPPAAPSGLGTNTMATGSGAPMADNNEGADGVGNSSGNWHCDSTWMGDRVITTSTRTWALPTYNNHLYKQISSQSGASNDNHYFGYSTPWGYFDFNRFHCHFSPRDWQRLINNNWGFRPKRLNFKLFNIQVKEVTQNDGTTTIANNLTSTVQVFTDSEYQLPYVLGSAHQGCLPPFPADVFMVPQYGYLTLNNGSQAVGRSSFYCLEYFPSQMLRTGNNFTFSYTFEDVPFHSSYAHSQSLDRLMNPLIDQYLYYLSRTNTPSGTTTQSRLQFSQAGASDIRDQSRNWLPGPCYRQQRVSKTSADNNNSEYSWTGATKYHLNGRDSLVNPGPAMASHKDDEEKFFPQSGVLIFGKQGSEKTNVDIEKVMITDEEEIRTTNPVATEQYGSVSTNLQRGNRQAATADVNTQGVLPGMVWQDRDVYLQGPIWAKIPHTDGHFHPSPLMGGFGLKHPPPQILIKNTPVPANPSTTFSAAKFASFITQYSTGQVSVEIEWELQKENSKRGNPEIQYTSNYNKSVNVDFTVDTNGVYSEPRPIGTRYLTRNL

SEQ ID NO: 2468 - protein, 735 aa, Artificial Sequence
  Description of Artificial Sequence: Synthetic polypeptide
MAADGYLPDWLEDTLSEGIRQWWKLKPGPPPPKPAERHKDDSRGLVLPGYKYLGPFNGLDKGEPVNEADAAALEHDKAYDRQLDSGDNPYLKYNHADAEFQERLKEDTSFGGNLGRAVFQAKKRVLEPLGLVEEPVKTAPGKKRPVEHSPVEPDSSSGTGKAGQQPARKRLNFGQTGDADSVPDPQPLGQPPAAPSGLGTNTMATGSGAPMADNNEGADGVGNSSGNWHCDSTWMGDRVITTSTRTWALPTYNNHLYKQISSQSGASNDNHYFGYSTPWGYFDFNRFHCHFSPRDWQRLINNNWGFRPKRLNFKLFNIQVKEVTQNDGTTTIANNLTSTVQVFTDSEYQLPYVLGSAHQGCLPPFPADVFMVPQYGYLTLNNGSQAVGRSSFYCLEYFPSQMLRTGNNFTFSYTFEDVPFHSSYAHSQSLDRLMNPLIDQYLYYLSRTNTPSGTTTQSRLQFSQAGASDIRDQSRNWLPGPCYRQQRVSKTSADNNNSEYPWTGATKYHLNGRDSLVNPGPAMASHKDDEEKFFPQSGVLIFGKQGSEKTNVDIEKVMITDEEEIRTTNPVATEQYGSVSTNLQRGNRQAATADVNTQGVLPGTVWQDRDVYLQGPIWAKIPHTDGHFHPSPLMGGFGLKHPPPQILIKNTPVPANPSTTFSAAKFASFITQYSTGQVSVEIEWELQKENSKRWNPEIQYTSNYNKSVNVDFTVDTNGVYSEPRPIGTRYLTRNL

SEQ ID NO: 2469 - protein, 735 aa, Artificial Sequence
  Description of Artificial Sequence: Synthetic polypeptide
MAADGYLPDWLEDTLSEGIRQWWKLKPGPPPPKPAERHKDDSRGLVLPGYKYLGPFNGLDKGEPVNEADAAALEHDKAYDRQLDSGDNPYLKYNHADAEFQERLKEDTSFGGNLGRAVFQAKKRVLEPLGLVEEPVKTAPGKKRPVEHSPVEPDSSSGTGKAGQQPARKRLNFGQTGDADSVPDPQPLGQPPAAPSGLGTNTMATGSGAPMADNNEGADGVGNSSGNWHCDSTWMGDRVITTSTRTWALPTYNNHLYKQISSQSGASNDNHYFGYSTPWGYFDFNRFHCHFSPRDWQRLINNNWGFRPKRLNFKLFNIQVKEVTQNDGTTTIANNLTSTVQVFTDSEYQLPYVLGSAHQGCLPPFPADVFMVPQYGYLTLNNGSQAVGRSSFYCLEYFPSQMLRTGNNFTFSYTFEDVPFHSSYAHSQSLDRLMNPLIDQYLYYLSRTNTPSGTTTQSRLQFSQAGASDIRDQSRNWLPGPCYRQQRVSKTSADNNNSEYSWTGATKYHLNGRDSLVNPGPAMASHKDDEEKFFPQSGVLIFGKQGSEKTNVGIEKVMITDEEEIRTTNPVATEQYGSVSTNLQRGNRQAATADVNTQGVLPGTVWQDRDVYLQGPIWAKIPHTDGHFHPSPLMGGFGLKHPPPQILIKNTPVPANPSTTFSAAKFASFITQYSTGQVSVEIEWELQKENSKRWNPEIQYTSNYNKSVNVDFTVDTNGVYSEPRPIGTRYLTRNL

SEQ ID NO: 2470 - protein, 735 aa, Artificial Sequence
  Description of Artificial Sequence: Synthetic polypeptide
MAADGYLPDWLEDTLSEGIRQWWKLKPGPPPPKPAGRHKDDSRGLVLPGYKYLGPFNGLDKGEPVNEADAAALEHDKAYDRQLDSGDNPYLKYNHADAEFQERLKEDTSFGGNLGRAVFQAKKRALEPLGLVEEPVKTAPGKKRPVEHSPVEPDSSSGTGKAGQQPARKRLNFGQTGDADSVPDPQPLGQPPAAPSGLGTNTMATGSGAPMADNNEGADGVGNSSGNWHCDSTWMGDRVITTSTRTWALPTYNNHLYKQISSQSGASNDNHYFGYSTPWGYFDFNRFHCHFSPRDWQRLINNNWGFRPKRLNFKLFNIQVKEVTQNDGTTTIANNLTSTVQVFTDSEYQLPYVLGSAHQGCLPPFPADVFMVPQYGYLTLNNGSQAVGRSSFYCLEYFPSQMLRTGNNFTFSYTFEDVPFHSSYAHSQSLDRLMNPLIDQYLYYLSRTNTPSGTTTQSRLQFSQAGASDIRDQSRNWLPGPCYRQQRVSKTSADNNNSEYSWTGATKYHLNGRDSLVNPGPAMASHKDDEEKFFPQSGVLIFGKQGSEKTNVDIEKVMITDEEEIRTTNPVATEQYGSVSTNLQRGNRQAATADVNTQGVLPGMVWQDRDVYLQGPIWAKIPHTDGHFHPSPLMGGFGLKHPPPQILIKNTPVPANPSTTFSAAKFASFITQYSTGQVSVEIEWELQKENSKRWNPEIQYTSNYNKSVNVDFTVDTNGVYSEPRPIGTRYLTRNL

SEQ ID NO: 2471 - protein, 735 aa, Artificial Sequence
  Description of Artificial Sequence: Synthetic polypeptide
MAADGYLPDWLEDTLSEGIRQWWKLKPGPPPPKPAERHKDDSRGLVLPGYKYLGPFNGLDKGEPVNEADAAALEHDKAYDRQLDSGDNPYLKYNHADAEFQERLKEDTSFGGNLGRAVFQAKKRVLEPLGLVEEPVKTAPGKKRPVEHSPVEPDSSSGTGKAGQQPARKRLNFGQTGDADSVPDPQPLGQPPAAPSGLGTNTMATGSGAPMADNNEGADGVGNSSGNWHCDSTWMGDRVITTSTRTWALPTYNNHLYKQISSQSGASNDNHYFGYSTPWGYFDFNRFHCHFSPRDWQRLINNNWGFRPKRLNFKLFNIQVKEVTQNDGTTTIANNLTSTVQVFTDSEYQLPYVLGSAHQGCLPPFPADVFMVPQYGYLTLNNGSQAVGRSSFYCLEYFPSQMLRTGNNFTFSYTFEDVPFHSSYAHSQSLDRLMNPLIDQYLYYLSRTNTPSGTTTQSRPQFSQAGASDIRDQSRNWLPGPCYRQQRVSKTSADNNNSEYSWTGATKYHLNGRDSLVNPGPAMASHKDDEEKFFPQSGVLIFGKQGSEKTNVDIEKVMITDEEEIRTTNPVATEQYGSVSTNLQRGNRQAATADVNTQGVLPGTVWQDRDVYLQGPIWAKIPHTDGHFHPSPLMGGFGLKHPPPQILIKNTPVPANPSTTFSAAKFASFITQYSTGQVSVEIEWELQKENSKRWNPEIQYTSNYNKSVNVDFTVDTNGVYSEPRPIGTRYLTRNL

SEQ ID NO: 2472 - protein, 735 aa, Artificial Sequence [sequence omitted]

SEQ ID NO: 2473 - protein, 735 aa, Artificial Sequence
  Description of Artificial Sequence: Synthetic polypeptide
MAADGYLPDWLEDTLSEGIRQWWKLKPGPPPPKPAERHKDDSRGLVLPGYKYLGPFNGLDKGEPVNEADAAALEHDKAYNRQLDSGDNPYLKYNHADAEFQERLKEDTSFGGNLGRAVFQAKKRVLEPLGLVEEPVKTAPGKKRPVEHSPVEPDSSSGTGKAGQQPARKRLNFGQTGDADSVPDPQPLGQPPAAPSGLGTNTMATGSGAPMADNNEGADGVGNSSGNWHCDSTWMGDRVITTSTRTWALPTYNNHLYKQISSQSGASNDNHYFGYSTPWGYFDFNRFHCHFSPRDWQRLINNNWGFRPKRLNFKLFNIQVKEVTQNDGTTTIANNLTSTVQVFTDSEYQLPYVLGSAHQGCLPPFPADVFMVPQYGYLTLNNGSQAVGRSSFYCLEYFPSQMLRTGNNFTFSYTFEDVPFHSSYAHSQSLDRLMNPLIDQYLYYLSRTNTPSGTTTQSRLQFSQAGASDIRDQSRNWLPGPCYRQQRVSKTSADNNNSEYSWTGATKYHLNGRDSLVNPGPAMASHKDDEEKFFPQSGVLIFGKQGSEKTNVDIEKVMITDEEEIRTTNPVATEQYGSVSTNLQRGNRQAATADVNTQGVLPGMVWQDRDVYLQGPIWAKIPHTDGHFHPSPLMGGFGLKHPPPQILIKNTPVPANPSTTFSAAKFASFITQYSTGQVSVEIEWELQKENSKRWNPEIQYTSNYNKSVNVDFTVDTNGVYSEPRPIGTRYLTRNL

SEQ ID NO: 2474 - protein, 735 aa, Artificial Sequence
  Description of Artificial Sequence: Synthetic polypeptide
MAADGYLPDWLEDTLSEGIRQWWKLKPGPPPPKPAERHKDDSRGLVLPGYKYLGPFNGLDKGEPVNEADAAALEHDKAYDRQLDSGDNPYLKYNHADAEFQERLKEDTSFGGNLGRAVFQAKKRVLEPLGLVEEPVKTAPGKKRPVEHSPVEPDSSSGTGKAGQQPARKRLNFGQTGDADSVPDPQPLGQPPAAPSGLGTNTMATGSGAPMADNNEGADGVGNSSGNWHCDSTWMGDRVITTSTRTWALPTYNNHLYKQISSQSGASNDNHYFGYSTPWGYFDFNRFHCHFSPRDWQRLINNNWGFRPKRLNFKLFNIQVKEVTQNDGTTTIANNLTSTVRVFTDSEYQLPYVLGSAHQGCLPPFPADVFMVPQYGYLTLNNGSQAVGRSSFYCLEYFPSQMLRTGNNFTFSYTFEDVPFHSSYAHSQSLDRLMNPLIDQYLYYLSRTNTPSGTTTQSRLQFSQAGASDIRDQSRNWLPGPCYRQQRVSKTSADNNNSEYSWTGATKYHLNGRDSLVNPGPAMASHKDDEEKFFPQSGVLIFGKQGSEKTNVDIEKVMITDEEEIRTTNPVATEQYGSVSTNLQRGNRQAATADVNTQGVLPGTVWQDRDVYLQGPIWAKIPHTDGHFHPSPLMGGFGLKHPPPQILIKNTPVPANPSTTFSAAKFASFITQYSTGQVSVEIEWELQKENSKRWNPEIQYTSNYNKSVNVDFTVDTNGVYSEPRPIGTRYLTRNL

SEQ ID NO: 2475 - protein, 735 aa, Artificial Sequence
  Description of Artificial Sequence: Synthetic polypeptide
MAADGYLPDWLEDTLSEGIRQWWKLKPGPPPPKPAERHKDDSRGLVLPGYKYLGPFNGLDKGEPVNEADAAALEHDKAYDRQLDSGDNPYLKYNHADAEFQERLKEDTSFGGNLGRAVFQAKKRVLEPLGLVEEPVKTAPGKKRPVEHSPVEPDSSSGTGKAGQQPARKRLNFGQTGDADSVPDPQPLGQPPAAPSGLGTNTMATGSGAPMADNNEGADGVGNSSGNWHCDSTWMGDRVITTSTRTWALPTYNNHLYKQISSQSGASNDNHYFGYSTPWGYFDFNRFHCHFSPRDWQRLINNNWGFRPKRLNFKLFNIQVKEVTQNDGTTTIANNLTSTVQVFTDSEYQLPYVLGSAHQGCLPPFPADVFMVPQYGYLTLNNGSQAVGRSSFYCLEYFPSQMLRTGNNFTFSYTFEDAPFHSSYAHSQSLDRLMNPLIDQYLYYLSRTNTPSGTTTQSRLQFSQAGASDIRDQSRNWLPGPCYRQQRVSKTSADNNNSEYSWTGATKYHLNGRDSLVNPGPAMASHKDDEEKFFPQSGVLIFGKQGSEKTNVDIEKVMITDEEEIRTTNPVATEQYGSVSTNLQRGNRQAATADVNTQGVLPGTVWQDRDVYLQGPIWAKIPHTDGHFHPSPLMGGFGLKHPPPQILIKNTPVPANPSTTFSAAKFASFITQYSTGQVSVEIEWELQKENSKRWNPEIQYTSNYNKSVNVDFTVDTNGVYSEPRPIGTRYLTRNL

SEQ ID NO: 2476 - protein, 734 aa, Artificial Sequence
  Description of Artificial Sequence: Synthetic polypeptide
MAADGYLPDWLEDTLSEGIRQWWKLKPGPPPKPAERHKDDSRGLVLPGYKYLGPFNGLDKGEPVNEADAAALEHDKAYDRQLDSGDNPYLKYNHADAEFQERLKEDTSFGGNLGRAVFQAKKRVLEPLGLVEEPVKTAPGKKRPVEHSPVEPDSSSGTGKAGQQPARKRLNFGQTGDADSVPDPQPLGQPPAAPSGLGTNTMATGSGAPMADNNEGADGVGNSSGNWHCDSTWMGDRVITTSTRTWALPTYNNHLYKQISSQSGASNDNHYFGYSTPWGYFDFNRFHCHFSPRDWQRLINNNWGFRPKRLNFKLFNIQVKEVTQNDGTTTIANNLTSTVQVFTDSEYQLPYVLGSAHQGCLPPFPADVFMVPQYGYLTLNNGSQAVGRSSFYCLEYFPSQMLRTGNNFTFSYTFEDVPFHSSYAHSQSLDRLMNPLIDQYLYYLSRTNTPSGTTTQSRLQFSQAGASDIRDQSRNWLPGPCYRQQRVSKTSADNNNSEYSWTGATKYHLNGRDSLVNPGPAMASHKDDEEKFFPQSGVLIFGKQGSEKTNVDIEKVMITDEEEIRTTNPVATEQYGSVSTNLQRGNRQAATADVNTQGVLPGTVWQDRDVYLQGPIWAKIPHTDGHFHPSPLMGGFGLKHPPPQILIKNTPVPANPSTTFSAAKFASFITQYSTGQVSVEIEWELQKENSKRWNPEIQYTSNYNKSVNVDFTVDTNGVYSEPRPIGTRYLTRNL

SEQ ID NO: 2477 - protein, 735 aa, Artificial Sequence
  Description of Artificial Sequence: Synthetic polypeptide
MAADGYLPDWLEDTLSEGIRQWWKLKPGPPPPKPAERHKDDSRGLVLPGYKYLGPFNGLDKGEPVNEADAAALEHDKAYDRQLDSGDNPYLKYNHADAEFQERLKEDTSFGGNLGRAVFQAKKRALEPLGLVEEPVKTAPGKKRPVEHSPVEPDSSSGTGKAGQQPARKRLNFGQTGDADSVPDPQPLGQPPAAPSGLGTNTMATGSGAPMADNNEGADGVGNSSGNWHCDSTWMGDRVITTSTRTWALPTYNNHLYKQISSQSGASNDNHYFGYSTPWGYFDFNRFHCHFSPRDWQRLINNNWGFRPKRLNFKLFNIQVKEVTQNDGTTTIANNLTSTVQVFTDSEYQLPYVLGSAHQGCLPPFPADVFMVPQYGYLTLNNGSQAVGRSSFYCLEYFPSQMLRTGNNFTFSYTFEDVPFHSSYAHSQSLDRLMNPLIDQYLYYLSRTNTPSGTTTQSRLRFSQAGASDIRDQSRNWLPGPCYRQQRVSKTSADNNNSEYSWTGATKYHLNGRDSLVNPGPAMASHKDDEEKFFPQSGVLIFGKQGSEKTNVDIEKVMITDEEEIRTTNPVATEQYGSVSTNLQRGNRQAATADVNTQGVLPGMVWQDRDVYLQGPIWAKIPHTDGHFHPSPLMGGFGLKHPPPQILIKNTPVPANPSTTFSAAKFASFITQYSTGQVSVEIEWELQKENSKRWNPEIQYTSNYNKSVNVDFTVDTNGVYSEPRPIGTRYLTRNL

SEQ ID NO: 2478 - protein, 735 aa, Artificial Sequence
  Description of Artificial Sequence: Synthetic polypeptide
MAADGYLPDWLEDTLSEGIRQWWKLKPGPPPPKPAERHKDDSRGLVLPGYKYLGPFNGLDKGEPVNEADAAALEHDKAYDRQLDSGDNPYLKYNHADAEFQERLKEDTSFGGNLGRAVFQAKKRVLEPLGLVEEPVKTAPGKKRPVEHSPVEPDSSSGTGKAGQRPARKRLNFGQTGDADSVPDPQPLGQPPAAPSGLGTNTMATGSGAPMADNNEGADGVGNSSGNWHCDSTWMGDRVITTSTRTWALPTYNNHLYKQISSQSGASNDNHYFGYSTPWGYFDFNRFHCHFSPRDWQRLINNNWGFRPKRLNFKLFNIQVKEVTQNDGTTTIANNLTSTVQVFTDSEYQLPYVLGSAHQGCLPPFPADVFMVPQYGYLTLNNGSQAVGRSSFYCLEYFPSQMLRTGNNFTFSYTFEDVPFHSSYAHSQSLDRLMNPLIDQYLYYLSRTNTPSGTTTQSRLQFSQAGASDIRDQSRNWLPGPCYRQQRVSKTSADNNNSEYSWTGATKYHLNGRDSLVNPGPAMASHKDDEEKFFPQSGVLIFGKQGSEKTNVDIEKVMITDEEEIRTTNPVATEQYGSVSTNLQRGNRQAATADVNTQGVLPGTVWQDRDVYLQGPIWAKIPHTDGHFHPSPLMGGFGLKHPPPQILIKNTPVPANPSTTFSAAKFASFITQYSTGQVSVEIEWELQKENSKRWNPEIQYTSNYNKSVNVDFTVDTNGVYSEPRPIGTRYLTRNL

SEQ ID NO: 2479 - protein, 735 aa, Artificial Sequence
  Description of Artificial Sequence: Synthetic polypeptide
MAADGYLPDWLEDTLSEGIRQWWKLKPGPPPPKPAERHKDDSRGLVLPGYKYLGPFNGLDKGEPVNEADAAALEHDKAYDRQLDSGDNPYLKYNHADAEFQERLKEDTSFGGNLGRAVFQAKKRVLEPLGLVEEPVKTAPGKKRPVEHSPVEPDSSSGTGKAGQQPARKRLNFGQTGDADSVPDPQPLGQPPAAPSGLGTNTMATGSGAPMADNNEGADGVGNSSGNWHCDSTWMGDRVITTSTRTWALPTYNNHLYKQISSQSGASNDNHYFGYSTPWGYFDFNRFHCHFSPRDWQRLINNNWGFRPKRLNFKLFNIQVKEVTQNDGTTTIANNLTSTVQVFTDSEYQLPYVLGSAHQGCLPPFPADVFMVPQYGYLTLNNGSQAVGRSSFYCLEYFPSQMLRTGNNFTFSYTFEDVPFHSSYAHSQSLDRLMNPLIDQYLYYLSRTNTPSGTTTQSRLQFSQAGASDIRDQSRNWLPGPCYRQQRVSKTSADNNNSEYSWTGATKYHLNGRDSLVNPGPAMASHKDDEEKFFPQSGVLIFGKQGSEKTNVDIEKVMITDEEEIRTTNPVATEQYGSVSTNLQRGNRQAATADVNTQGVLPGMVWQDRDVYLQGPIWAKIPHTDGHFHPSPLMGGFGLKHPPPQILIKNTPVPANPSTTFSAAKFASFITQYSTGQVSVEIEWELQKENSNRWNPEIQYTSNYNKSVNVDFTVDTNGVYSEPRPIGTRYLTRNL

SEQ ID NO: 2480 - protein, 735 aa, Artificial Sequence
  Description of Artificial Sequence: Synthetic polypeptide
MAADGYLPDWLEDTLSEGIRQWWKLKPGPPPPKPAERHKDDSRGLVLPGYKYLGPFNGLDKGEPVNEADAAALEHDKAYDRQLDSGDNPYLKYNHADAEFQERLKEDTSFGGNLGRAVFQAKKRVLEPLGLVEEPVKTAPGKKRPVEHSPVEPDSSSGTGKAGQQPARKRLNFGQTGDADSVPDPQPLGQPPAAPSGLGTNTMATGSGAPMADNNEGADGVGNSSGNWHCDSTWMGDRVITTSTRTWALPTYNNHLYKQISSQSGASNDNHYFGYSTPWGYFDFNRFHCHFSPRDWQRLINNNWGFRPKRLNFKLFNIQVKEVTQNDGTTTIANNLTSTVQVFTDSEYQLPYVLGSAHQGCLPPFPADVFMVPQYGYLTLNNGSQAVGRSSFYCLEYFPSQMLRTGNNFTFSYTFEDVPFHSSYAHSQSLDRLMNPLIDQYLYYLSRTNTPSGTTTQSRLQFSQAGASDIRDQSRNWLPGPCYRQQRVSKTSADNNNSEYSWTGATKYHLNGRDSLVNPGPAMASHKDDEEKFFPQSGVLIFGKQGSEKTNVDIEKVMITDEEEIRTTNPVATEQYGSVSTNLQRGNRQAATADVNTQGVLPGTVWQDRDVYLQGPIWAKIPHTDGHFHPSPLMGGFGLKHPPPQILIKNTPVPANPSTTFSAAKFASFITQYSTGQVGVEIEWELQKENSKRWNPEIQYTSNYNKSVNVDFTVDTNGVYSEPRPIGTRYLTRNL

SEQ ID NO: 2481 - protein, 735 aa, Artificial Sequence
  Description of Artificial Sequence: Synthetic polypeptide
MAADGYLPDWLEDTLSEGIRQWWKLKPGPPPPKPAERHKDDSRGLVLPGYKYLGPFNGLDKGEPVNEADAAALEHDKAYDRQLDSGDNPYLKYNHADAEFQERLKEDTSFGGNLGRAVFQAKKRVLEPLGLVEEPVKTAPGKKRPVEHSPVEPDSSSGTGKAGQQPARKRLNFGQTGDADSVPDPQPLGQPPAAPSGLGTNTMATGSGAPMADNNEGADGVGNSSGNWHCDSTWMGDRVITTSTRTWALPTYNNHLYKQISSQSGASNDNHYFGYSTPWGYFDFNRFHCHFSPRDWQRLINNNWGFRPKRLNFKLFNIQVKEVTQNDGTTTIANNLTSTVQVFTDSEYQLPYVLGSAHQGCLPPFPADVFMVPQYGYLTLNNGSQAVGRSSFYCLEYFPSQMLRTGNNFTFSYTFEDVPFHSSYAHSQSLDRLMNPLIDQYLYYLSRTNTPSGTTTQSRLQFSQAGASDIRDQSRNWLPGPCYRQQRVSKTSADNNNSEYSWTGATKYHLNGRDSLVNPGPAMASHKDDEEKFFPQSGVLIFGKQGSEKTNVDIEKVMITDEEEIRATNPVATEQCGSVSTNLQRGNRQAATADVNTQGVLPGTVWQDRDVYLQGPIWAKIPHTDGHFHPSPLMGGFGLKHPPPQILIKNTPVPANPSTTFSAAKFASFITQYSTGQVSVEIEWELQKENSKRWNPEIQYTSNYNKSVNVDFTVDTNGVYSEPRPIGTRYLTRNL

SEQ ID NO: 2482 - protein, 735 aa, Artificial Sequence
  Description of Artificial Sequence: Synthetic polypeptide
MAADGYLPDWLEDTLSEGIRQWWKLKPGPPPPKPAERHKDDSRGLVLPGYKYLGPFNGLDKGEPVNEADAAALEHDKAYDRQLDSGDNPYLKYNHADAEFQERLKEDTSFGGNLGRAVFQAKKRALEPLGLVEEPVKTAPGKKRPVEHSPVEPDSSSGTGKAGQQPARKRLNFGQTGDADSVPDPQPLGQPPAAPSGLGTNTMATGSGAPMADNNEGADGVGNSSGNWHCDSTWMGDRVITTSTRTWALPTYNNHLYKQISSQSGASNDNHYFGYSTPWGYFDFNRFHCHFSPRDWQRLINNNWGFRPKRLNFKLFNIQVKEVTQNDGTTTIANNLTSTVQVFTDSEYQLPYVLGSAHQGCLPPFPADVFVVPQYGYLTLNNGSQAVGRSSFYCLEYFPSQMLRTGNNFTFSYTFEDVPFHSSYAHSQSLDRLMNPLIDQYLYYLSRTNTPSGTTTQSRLQFSQAGASDIRDQSRNWLPGPCYRQQRVSKTSADNNNSEYSWTGATKYHLNGRDSLVNPGPAMASHKDDEEKFFPQSGVLIFGKQGSEKTNVDIEKVMITDEEEIRTTNPVATEQYGSVSTNLQRGNRQAATADVNTQGVLPGMVWQDRDVYLQGPIWAKIPHTDGHFHPSPLMGGFGLKHPPPQILIKNTPVPANPSTTFSAAKFASFITQYSTGQVSVEIEWELQKENSKRWNPEIQYTSNYNKSVNVDFTVDTNGVYSEPRPIGTRYLTRNL

SEQ ID NO: 2483 - protein, 735 aa, Artificial Sequence
  Description of Artificial Sequence: Synthetic polypeptide
MAADGYLPDWLEDTLSEGIRQWWKLKPGPPPPKPAERHKDDSRGLVLPGYKYLGPFNGLDKGEPVNEADAAALEHDKAYDRQLDSGDNPYLKYNHADAEFQERLKEDTSFGGNLGRAVFQAKKRVLEPLGLVEEPVKTAPGKKRPVEHSPVEPDSSSGTGKAGQQPARKRLNFGQTGDADSVPDPQPLGQPPAAPSGLGTNTMATGSGAPMADNNEGADGVGNSSGNWHCDSTWMGDRVITTSTRTWALPTYNNHLYKQISSQSGASNDNHYFGYSTPWGYFDFNRFHCHFSPRDWQRLINNNWGFRPKRLNFKLFNIQVKEVTQNDGTTTIANNLTSTVQVFTDSEYQLPYVLGSAHQGCLPPFPADVFMVPQYGYLTLNNGSQAVGRSSFYCLEYFPSQMLRTGNNFTFSYTFEDVPFHSSYAHSQSLDRLMNPLIDQYLYYLSRTNTPSGTTTQSRLQFSQAGASDIRDQSRNWLPGPCYRQQRVSKTSADNNNSEYSWTGATKYHLNGRDSLVNPGPAMASHKDDEEKFFPQSGVLIFGKQGSEKTNVDIEKVMITDEEEIRTTNPVATEQYGSVSTNLQRGNRQAATADVNTQGVLPGTVWQDRDVYLQGPIWAKIPHTDGHFHPSPLVGGFGLKHPPPQILIKNTPVPANPSTTFSAAKFASFITQYSTGQVSVEIEWELQKENSKRWNPEIQYTSNYNKSVNVDFTVDTNGVYSEPRPIGTRYLTRNL

SEQ ID NO: 2484 - protein, 735 aa, Artificial Sequence
  Description of Artificial Sequence: Synthetic polypeptide
MAADGYLPDWLEDTLSEGIRQWWKLKPGPPPPKPAERHKDDSRGLVLPGYKYLGPFNGLDKGEPVNEADAAALEHDKAYDRQLDSGDNPYLKYNHADAEFQERLKEDTSFGGNLGRAVFQAKKRVLEPLGLVEEPVKTAPGKKRPVEHSPVEPDSSSGTGKAGQQPARKRLNFGQTGDADSVPDPQPLGQPPAAPSGLGTNTMATGSGAPMADNNEGADGVGNSSGNWHCDSTWMGDRVITTSTRTWALPTYNNHLYKQISSQSGASNDNHYFGYSTPWGYFDFNRFHCHFSPRDWQRLINNNWGFRPKRLNFKLFNIQVKEVTQNDGTTTIANNLTSTVQVFTDSEYQLPYVLGSAHQGCLPPFPADVFMVPQYGYLTLNNGSQAVGRSSFYCLEYFPSQMLRTGNNFTFSYTFEDVPFHSSYAHSQSLDRLMNPLIDQYLYYLSRTNTPSGTTTQSRLQFSQAGASDIRDQSRNWLPGPCYRQQRVSKTSADNNNSEYSWTGATKYHLNGRDSLVNPGPAMASHKDDEEKFFPQSGVLIFGKQGSEKTNVDIEKVMITDEEEIRTTNPVATEQYGSVSTNLQRGNRQAATADVNTQGVLPGTVWQDRDVYLQGPIWAKIPHTDGHFHPSPLMGGFGLKHPPPQILIKNTPVPANPSTTLSAAKFASFITQYSTGQVSVEIEWELQKENSKRWNPEIQYTSNYNKSVNVDFTVDTNGVYSEPRPIGTRYLTRNL

SEQ ID NO: 2485 - protein, 735 aa, Artificial Sequence
  Description of Artificial Sequence: Synthetic polypeptide
MAADGYLPDWLEDTLSEGIRQWWKLKPGPPPPKPAERHKDDSRGLVLPGYKYLGPFNGLDKGEPVNEADAAALEHDKAYDRQLDSGDNPYLKYNHADAEFQERLKEDTSFGGNLGRAVFQAKKRVLEPLGLVEEPVKTAPGKKRPVEHSPVEPDSSSGTGKAGQQPARKRLNFGQTGDADSVPDPQPLGQPPAAPSGLGTNTMATGSGAPMADNNEGADGVGNSSGNWHCDSTWMGDRVITTSTRTWALPTYNNHLYKQISSQSGASNDNHYFGYSTPWGYFDFNRFHCHFSPRDWQRLINNNWGFRPKRLNFKLFNIQVKEVTQNDGTTTIANNLTSTVQVFTDSEYQLPYVLGSAHQGCLPPFPADVFMVPQYGYLTLNNGSQAVGRSSFYCLEYFPSQMLRTGNNFTFSYTFEDVPFHSSYAHSQSLDRLMNPLIDQYLYYLSRTNTPSGTTTQSRLQFSQAGASDIRDQSRNWLPGPCYRQQRVSKTSADNNNSEYSWTGATKYHLNGRDSLVNPGPAMASHKDDEEKFFPQSGVLIFGKQGSEKTNVDIEKVMITDEGEIRTTNPVATEQYGSVSTNLQRGNRQAATADVNTQGVLPGTVWQDRDVYLQGPIWAKIPHTDGHFHPSPLMGGFGLKHPPPQILIKNTPVPANPSTTFSAAKFASFITQYSTGQVSVEIEWELQKENSKRWNPEIQYTSNYNKSVNVDFTVDTNGVYSEPRPIGTRYLTRNL

SEQ ID NO: 2486 - protein, 735 aa, Artificial Sequence
  Description of Artificial Sequence: Synthetic polypeptide
MAADGYLPDWLEDTLSEGIRQWWKLKPGPPPPKPAERHKDDSRGLVLPGYKYLGPFNGLDKGEPVNEADAAALEHDKAYDRQLDSGDNPYLKYNHADAEFQERLKEDTSFGGNLGRAVFQAKKRALEPLGLVEEPVKTAPGKKRPVEHSPVEPDSSSGTGKAGQQPARKRLNFGQTGDADSVPDPQPLGQPPAAPSGLGTNTMATGSGAPMADNNEGADGVGNSSGNWHCDSTWMGDRVITTSTRTWALPTYNNHLYKQISSQSGASNDNHYFGYSTPWGYFDFNRFHCHFSPRDWQRLINNNWGFRPKRLNFKLFNIQVKEVTQNDGTTTIANNLTSTVQVFTDSEYQLPYVLGSAHQGCLPPFPADVFMVPQYGYLTLNNGSQAVGRSSFYCLEYFPSQMLRTGNNFTFSYTFEDVPFHSSYAHSQSLDRLMNPLIDQYLYYLSRTNTPSGTTTQSRLQFSQAGASDIRDQSRNWLPGPCYRQQRVSKTSADNNNSEYSWTGATKYHLNGRDSLVNPGPAMASHKDDEEKFFPQSGVLIFGKQGSEKTNVDIEKVMITDEEEIRTTNPVATEQYGSVSTNLQRGNRQAATADVNTQGVLPGMVWQDRDVYLQGPIWAKIPHTDGHFHPSPLMGGFGLKHPPPQILIKNTPVPANPSTTFSAAKFASFITQYSAGQVSVEIEWELQKENSKRWNPEIQYTSNYNKSVNVDFTVDTNGVYSEPRPIGTRYLTRNL

SEQ ID NO: 2487 - protein, 735 aa, Artificial Sequence
  Description of Artificial Sequence: Synthetic polypeptide
MAADGYLPDWLEDTLSEGIRQWWKLKPGPPPPKPAERHKDDSRGLVLPGYKYLGPFNGLDKGEPVNEADAAALEHDKAYDRQLDSGDNPYLKYNHADAEFQERLKEDTSFGGNLGRAVFQAKKRVLEPLGLVEEPVKTAPGKKRPVEHSPVEPDSSSGTGKAGQQPARKRLNFGQTGDADSVPDPQPLGQPPAAPSGLGTNTMATGSGAPMADNNEGADGVGNSSGNWHCDSTWMGDRVITTSTRTWALPTYNNHLYKQISSQSGASNDNHYFGYSTPWGYFDFNRFHCHFSPRDWQRLINNNWGFRPKRLNFKLFNIQVKEVTQNDGTTTIANNLTSTVQVFTDSEYQLPYVLGSAHQGCLPPFPADVFMVPQYGYLTLNNGSQAVGRSSFYCLEYFPSQMLRTGNNFTFSYTFEDVPFHSSYAHSQSLDRLMNPLIDQYLYYLSRTNTPSGTTTQSRLQFSQAGASDIRDQSRNWLPGPCYRQQRVSKTSADNNNSEYSWTGATEYHLNGRDSLVNPGPAMASHKDDEEKFFPQSGVLIFGKQGSEKTNVDIEKVMITDEEEIRTTNPVATEQYGSVSTNLQRGNRQAATADVNTQGVLPGTVWQDRDVYLQGPIWAKIPHTDGHFHPSPLMGGFGLKHPPPQILIKNTPVPANPSTTFSAAKFASFITQYSTGQVSVEIEWELQKENSKRWNPEIQYTSNYNKSVNVDFTVDTNGVYSEPRPIGTRYLTRNL

SEQ ID NO: 2488 - protein, 735 aa, Artificial Sequence
  Description of Artificial Sequence: Synthetic polypeptide
MAADGYLPDWLEDTLSEGIRQWWKLKPGPPPPKPAERHKDDSRGLVLPGYKYLGPFNGLDKGEPVNEADAAALEHGKAYDRQLDSGDNPYLKYNHADAEFQERLKEDTSFGGNLGRAVFQAKKRVLEPLGLVEEPVKTAPGKKRPVEHSPVEPDSSSGTGKAGQQPARKRLNFGQTGDADSVPDPQPLGQPPAAPSGLGTNTMATGSGAPMADNNEGADGVGNSSGNWHCDSTWMGDRVITTSTRTWALPTYNNHLYKQISSQSGASNDNHYFGYSTPWGYFDFNRFHCHFSPRDWQRLINNNWGFRPKRLNFKLFNIQVKEVTQNDGTTTIANNLTSTVQVFTDSEYQLPYVLGSAHQGCLPPFPADVFMVPQYGYLTLNNGSQAVGRSSFYCLEYFPSQMLRTGNNFTFSYTFEDVPFHSSYAHSQSLDRLMNPLIDQYLYYLSRTNTPSGTTTQSRLQFSQAGASDIRDQSRNWLPGPCYRQQRVSKTSADNNNSEYSWTGATKYHLNGRDSLVNPGPAMASHKDDEEKFFPQSGVLIFGKQGSEKTNVDIEKVMITDEEEIRTTNPVATEQYGSVSTNLQRGNRQAATADVNTQGVLPGTVWQDRDVYLQGPIWAKIPHTDGHFHPSPLMGGFGLKHPPPQILIKNTPVPANPSTTFSAAKFASFITQYSTGQVSVEIEWELQKENSKRWNPEIQYTSNYNKSVNVDFTVDTNGVYSEPRPIGTRYLTRNL

SEQ ID NO: 2489 - protein, 735 aa, Artificial Sequence
  Description of Artificial Sequence: Synthetic polypeptide
MAADGYLPDWLEDTLSEGIRQWWKLKPGPPPPKPAERHKDDSRGLVLPGYKYLGPFNGLDKGEPVNEADAAALEHDKAYDRQLDSGDNPYLKYNHADAEFQERLKEDTSFGGNLGRAVFQAKKRALEPLGLVEEPVKTAPGKKRPVEHSPVEPDSSSGTGKAGQQPARKRLNFGQTGDADSVPDPQPLGQPPAAPSGLGTNTMATGSGAPMADNNEGADGVGNSSGNWHCDSTWMGDRVITTSTRTWALPTYNNHLYKQISSQSGASNDNHYFGYSTPWGYFDFNRFHCHFSPRDWQRLINNNWGFRPKRLNFKLFNIQVKEVTQNDGTTTIANNLTSTVQVFTDSEYQLPYVLGSAHQGCLPPFPADVFMVPQYGYLTLNNGSQAVGRSSFYCLEYFPSQMLRTGNNFTFSYTFEDVPFHSSYAHSQSLDRLMNPLVDQYLYYLSRTNTPSGTTTQSRLQFSQAGASDIRDQSRNWLPGPCYRQQRVSKTSADNNNSEYSWTGATKYHLNGRDSLVNPGPAMASHKDDEEKFFPQSGVLIFGKQGSEKTNVDIEKVMITDEEEIRTTNPVATEQYGSVSTNLQRGNRQAATADVNTQGVLPGMVWQDRDVYLQGPIWAKIPHTDGHFHPSPLMGGFGLKRPPPQILIKNTPVPANPSTTFSAAKFASFITQYSTGQVSVEIEWELQKENSKRWNPEIQYTSNYNKSVNVDFTVDTNGVYSEPRPIGTRYLTRNL

SEQ ID NO: 2490 - protein, 735 aa, Artificial Sequence
  Description of Artificial Sequence: Synthetic polypeptide
MAADGYLPDWLEDTLSEGIRQWWKLKPGPPPPKPAERHKDDSRGLVLPGYKYLGPFNGLDKGEPVNEADAAALEHDKAYDRQLDSGDNPYLKYNHADAEFQERLKEDTSFGGNLGRAVFQAKKRVLEPLGLVEEPVKTAPGKKRPVEHSPVEPDSSSGTGKAGQQPARKRLNFGQTGDADSVPDPQPLGQPPAAPSGLGTNTMATGSGAPMADNNEGADGVGNSSGNWHCDSTWMGDRVITTSTRTWALPTYNNHLYKQISSQSGASNDNHYFGYSTPWGYFDFNRFHCHFSPRDWQRLINNNWGFRPKRLNFKLFNIQVKEVTQNDGTTTIANNLTSTVQVFTDSEYQLPYVLGSAHQGCLPPFPADVFMVPQYGYLTLNNGSQAVGRSSFYCLEYFPSQMLRTGNNFTFSYTFEDVPFHSSYAHSQSLDRLMNPLIDQYLYYLSRTNTPSGTTTQSRLQFSQAGASDIRDQSRNWLPGPCYRQQRVSKTSADNNNSEYSWTGATKYHLNGRDSLVNPGPAMASHKDDEEKFFPQSGVLIFGKQGSEKTNVDIEKVMITDEEEIRTTNPVATEQYGSVSTNLQRGNRQAATADVNTQGVLPGTVWQDRDVYLQGPIWAKIPHTDGHFHPSPLMGGFGLKHPPPQILIKNTPVPANPSTTFSAAKFASFITQHSTGQVSVEIEWELQKENSKRWNPEIQYTSNYNKSVNVDFTVDTNGVYSEPRPIGTRYLTRNL

SEQ ID NO: 2491 - protein, 735 aa, Artificial Sequence
  Description of Artificial Sequence: Synthetic polypeptide
MAADGYLPDWLEDTLSEGIRQWWKLKPGPPPPKPAERHKDDSRGLVLPGYKYLGPFNGLDKGEPVNEADAAALEHDKAYDRQLDSGDDPYLKYNHADAEFQERLKEDTSFGGNLARAVFQAKKRVLEPLGLVEEPVKTAPGKKRPVEHSPAEPDSSSGTGKAGQQPARKRLNFGQTGDADSVPDPQPLGQPPAAPSGLGTNTMATGSGAPMADNNEGADGVGNSSGNWHCDSTWMGDRVITTSTRTWALPTYNNHLYKQISSQSGASNDNHYFGYSTPWGYFDFNRFHCHFSPRDWQRLINNNWGFRPKRLSFKLFNIQVKEVTQNDGTTTIANNLTSTVQVFTDSEYQLPYVLGSAHQGCLPPFPADVFMVPQYGYLTLNNGSQAVGRSSFYCLEYFPSQMLRTGNNFTFSYTFEDVPFHSSYAHSQSLDRLMNPLIDQYLYYLSKTNAPSGTTTMSRLQFSQAGASDIRDQSRNWLPGPCYRQQRVSKTAADNNNSDYSWTGATKYHLNGRDSLVNPGPAMASHKDDEEKYFPQSGVLIFGKQGSNKTNVDIEKVMITDEEEIRTTNPVATEQYGSVSTNLQSGNTQAATSDVNTQGVLPGMVWQDRDVYLQGPIWAKIPHTDGHFHPSPLMGGFGLKHPPPQILIKNTPVPANPSTTFSAAKFASFITQYSTGQVSVEIEWELQKENSKRWNPEIQYTSNYNKSVNVDFTVDTNGVYSEPRPIGTRYLTRNL

SEQ ID NO: 2492 - protein, 735 aa, Artificial Sequence
  Description of Artificial Sequence: Synthetic polypeptide
MAADGYLPDWLEDTLSEGIRQWWKLKPGPPPPKPAERHKDDSRGLVLPGYKYLGPFNGLDKGEPVNEADAAALEHDKAYDRQLDSGDNPYLKYNHADAEFQERLKEDTSFGGNLGRAVFQAKKRVLEPLGLVEEPVKTAPGKKRPVEHSPVEPDSSSGTGKAGQQPARKRLNFGQTGDADSVPDPQPLGQPPAAPSGLGTNTMATGSGAPMADNNEGADGVGNSSGNWHCDSTWMGDRVITTSTRTWALPTYNNHLYKQISSQSGASNDNHYFGYSTPWGYFDFNRFHCHFSPRDWQRLINNNWGFRPKRLNFKLFNIQVKEVTQNDGTTTIANNLTSTVQVFTDSEYQLPYVLGSAHQGCLPPFPADVFMVPQYGYLTLNNGSQAVGRSSFYCLEYFPSQMLRTGNNFTFSYTFEDVPFHSSYAHSQSLDRLMNPLIDQYLYYLSRTNTPSGTTTQPRLQFSQAGASDIRDQSRNWLPGPCYRQQRVSKTSADNNNSEYSWTGATKYHLNGRDSLVNPGPAMASHKDDEEKFFPQSGVLIFGKQGSEKTNVDIEKVMITDEEEIRTTNPVATEQYGSVSTNLQRGNRQAATADVNTQGVLPGTVWQDRDVYLQGPIWAKIPHTDGHFHPSPLMGGFGLKHPPPQILIKNTPVPANPSTTFSAAKFASFITQYSTGQVSVEIEWELQKENSKRWNPEIQYTSNYNKSVNVDFTVDTNGVYSEPRPIGTRYLTRNL

SEQ ID NO: 2493 - protein, 735 aa, Artificial Sequence
  Description of Artificial Sequence: Synthetic polypeptide
MAADGYLPDWLEDTLSEGIRQWWKLKPGPPPPKPAERHKDDSRGLVLPGYKYLGPFNGLDKGEPVNEADAAALEHDKAYDRQLDSGDNPYLKYNHADAEFQERLKEDTSFGGNLGRAVFQAKKRVLEPLGLVEEPVKTAPGKKRPVEHSPVEPDSSSGTGKAGQQPARKRLNFGQTGDADSVPDPQPLGQPPAAPSGLGTNTMATGSGAPMADNNEGADGVGNSSGNWHCDSTWMGDRVITTSTRTWALPTYNNHLYKQISSQSGASNDNHYFGYSTPWGYFDFNRFHCHFSPRDWQRLINNNWGFRPKRLNFKLFNIQVKEVTQNDGTTTIANNLTSTVQVFTDSEYQLPYVLGSAHQGCLPPFPADVFMVPQYGYLTLNNGSQAVGRSSFYCLEYFPSQMLRTGNNFTFSYTFEDVPFHSSYAHSQSLDRLMNPLIDQYLYYLSRTNTPSGTTTQSRLQFSQAGASDIRDQSRNWLPGPCYRQQRVSKTSADNNNSEYLWTGATKYHLNGRDSLVNPGPAMASHKDDEEKFFPQSGVLIFGKQGSEKTNVDIEKVMITDEEEIRTTNPVATEQYGSVSTNLQRGNRQAATADVNTQGVLPGTVWQDRDVYLQGPIWAKIPHTDGHFHPSPLMGGFGLKHPPPQILIKNTPVPANPSTTFSAAKFASFITQYSTGQVSVEIEWELQKENSKRWNPEIQYTSNYNKSVNVDFTVDTNGVYSEPRPIGTRYLTRNL

SEQ ID NO: 2494 - protein, 735 aa, Artificial Sequence
  Description of Artificial Sequence: Synthetic polypeptide
MAADGYLPDWLEDTLSEGIRQWWKLKPGPPPPKPAERHKDDSRGLVLPGYKYLGPFNGLDKGEPVNEADAAALEHDKAYDRQLDSGDNPYLKYNHADAEFQERLKEDTSFGGNLGRAVFQAKKRVLEPLGLVEEPVKTAPGKKRPVEHSPVEPDSSSGTGKAGQQPARKRLNFGQTGDADSVPDPQPLGQPPAAPSGLGTNTMATGSGAPMADNNEGADGVGNSSGNWHCDSTWMGDRVITTSTRTWALPTYNNHLYKQISSQSGASNDNHYFGYSTPWGYFDFNRFHCHFSPRDWQRLINNNWGFRPKRLNFKPFNIQVKEVTQNDGTTTIANNLTSTVQVFTDSEYQLPYVLGSAHQGCLPPFPADVFMVPQYGYLTLNNGSQAVGRSSFYCLEYFPSQMLRTGNNFTFSYTFEDVPFHSSYAHSQSLDRLMNPLIDQYLYYLSRTNTPSGTTTQSRLQFSQAGASDIRDQSRNWLPGPCYRQQRVSKTSADNNNSEYSWTGATKYHLNGRDSLVNPGPAMASHKDDEEKFFPQSGVLIFGKQGSEKTNVDIEKVMITDEEEIRTTNPVATEQYGSVSTNLQRGNRQAATADVNTQGVLPGTVWQDRDVYLQGPIWAKIPHTDGHFHPSPLMGGFGLKHPPPQILIKNTPVPANPSTTFSAAKFASFITQYSTGQVSVEIEWELQKENSKRWNPEIQYTSNYNKSVNVDFTVDTNGVYSEPRPIGTRYLTRNL

SEQ ID NO: 2495 - protein, 735 aa, Artificial Sequence
  Description of Artificial Sequence: Synthetic polypeptide
MAADGYLPDWLEDTLSEGIRQWWKLKPGPPPPKPAERHKDDSRGLVLPGYKYLGPFNGLDKGEPVNEADAAALEHDKAYDRQLDSGDNPYLKYNHADAEFQERLKEDTSFGGNLGRAVFQAKKRVLEPLGLVEEPVKTAPGKKRPVEHSPVEPDSSSGTGKAGQQPARKRLNFGQTGDADSVPDPQPLGQPPAAPSGLGTNTMATGSGAPMADNNEGADGVGNSSGNWHCDSTWMGDRVITTSTRTWALPTYNNHLYKQISSQSGASNDNHYFGYSTPWGYFDFNRFHCHFSPRDWQRLINNNWGFRPKRLNFKLFNIQVKEVTQNDGTTTIANNLTSTVQVFTDSEYQLPYVLGSAHQGCLPPFPADVFMVPQYGYLTLNNGSQAVGRSSFYCLEYFPSQMLRTGNNFTFSYTFEDVPFHSSYAHSQSLDRLMNPLIDQYPYYLSRTNTPSGTTTQSRLQFSQAGASDIRDQSRNWLPGPCYRQQRVSKTSADNNNSEYSWTGATKYHLNGRDSLVNPGPAMASHKDDEEKFFPQSGVLIFGKQGSEKTNVDIEKVMITDEEEIRTTNPVATEQYGSVSTNLQRGNRQAATADVNTQGVLPGTVWQDRDVYLQGPIWAKIPHTDGHFHPSPLMGGFGLKHPPPQILIKNTPVPANPSTTFSAAKFASFITQYSTGQVSVEIEWELQKENSKRWNPEIQYTSNYNKSVNVDFTVDTNGVYSEPRPIGTRYLTRNL

SEQ ID NO: 2496 - protein, 735 aa, Artificial Sequence
  Description of Artificial Sequence: Synthetic polypeptide
MAADGYLPDWLEDTLSEGIRQWWKLKPGPPPPKPAERHKDDSRGLVLPGYKYLGPFNGLDKGEPVNEADAAALEHDKAYDRQLDSGDNPYLKYNHADAEFQERLKEDTSFGGNLGRAVFQAKKRALEPLGLVEEPVKTAPGKKRPVEHSPVEPDSSSGTGKAGQQPARKRLNFGQTGDADSVPDPQPLGQPPAAPSGLGTNTMATGSGAPMADNNEGADGVGNSSGNWHCDSTWMGDRVITTSTRTWALPTYNNHLYKQISSQSGASNDNHYFGYSTPWGYFDFNRFHCHFSPRDWQRLINNNWGFRPKRLNFKLFNIQVKEVTQNDGTTTIANNLTSTVQVFTDSEYQLPYVLGSAHQGCLPPFPADVFMVPQYGYLTLNNGSQAVGRSSFYCLEYFPSQMLRTGNNFTFSYTFEDVPFHSSYAHSQSLDRLMNPLIDQYLYYLSRTNTPSGTTTQSRLQFSQAGASDIRDQSRNWLPGPCYRQQRVSKTSADNNNSEYSWTGATKYHLNGRDSLVNPGPAMASHKDDEEKFFPQSGVLIFGKQGSEKTNVDIEKVMITDEEEIRTTNPVATEQYGSVSTNLQRGNRQAATADVNTQGVLPGTVWQDRDVYLQGPIWAKIPHTDGHFHPSPLMGGFGLKHPPPQILIKNTPVPANPSTTFSAAKFASFITQYSTGQVSVEIEWELQKENSKRWNPEIQYTSNYNKSVNVDFTVDTNGVYSEPRPIGTRYLTRNL

SEQ ID NO: 2497 - protein, 735 aa, Artificial Sequence
  Description of Artificial Sequence: Synthetic polypeptide
MAADGYLPDWLEDTLSEGIRQWWKLKPGPPPPKPAERHKDDSRGLVLPGYKYLGPFNGLDKGEPVNEADAAALEHDKAYDRQLDSGDNPYLKYNHADAEFQERLKEDTSFGGNLGRAVFQAKKRVLEPLGLVGEPVKTAPGKKRPVEHSPVEPDSSSGTGKAGQQPARKRLNFGQTGDADSVPDPQPLGQPPAAPSGLGTNTMATGSGAPMADNNEGADGVGNSSGNWHCDSTWMGDRVITTSTRTWALPTYNNHLYKQISSQSGASNDNHYFGYSTPWGYFDFNRFHCHFSPRDWQRLINNNWGFRPKRLNFKLFNIQVKEVTQNDGTTTIANNLTSTVQVFTDSEYQLPYVLGSAHQGCLPPFPADVFMVPQYGYLTLNNGSQAVGRSSFYCLEYFPSQMLRTGNNFTFSYTFEDVPFHSSYAHSQSLDRLMNPLIDQYLYYLSRTNTPSGTTTQSRLQFSQAGASDIRDQSRNWLPGPCYRQQRVSKTSADNNNSEYSWTGATKYHLNGRDSLVNPGPAMASHKDDEEKFFPQSGVLIFGKQGSEKTNVDIEKVMITDEEEIRTTNPVATEQYGSVSTNLQRGNRQAATADVNTQGVLPGMVWQDRDVYLQGPIWAKIPHTDGHFHPSPLMGGFGLKHPPPQILIKNTPVPANPSTTFSAAKFASFITQYSTGQVSVEIEWELQKENSKRWNPEIQYTSNYNKSVNVDFTVDTNGVYSEPRPIGTRYLTRNL

SEQ ID NO: 2498 - protein, 735 aa, Artificial Sequence
  Description of Artificial Sequence: Synthetic polypeptide
MAADGYLPDWLEDTLSEGIRQWWKLKPGPPPPKPAERHKDDSRGLVLPGYKYLGPFNGLDKGEPVNEADAAALEHDKAYDRQPDSGDNPYLKYNHADAEFQERLKEDTSFGGNLGRAVFQAKKRVLEPLGLVEEPVKTAPGKKRPVEHSPVEPDSSSGTGKAGQQPARKRLNFGQTGDADSVPDPQPLGQPPAAPSGLGTNTMATGSGAPMADNNEGADGVGNSSGNWHCDSTWMGDRVITTSTRTWALPTYNNHLYKQISSQSGASNDNHYFGYSTPWGYFDFNRFHCHFSPRDWQRLINNNWGFRPKRLNFKLFNIQVKEVTQNDGTTTIANNLTSTVQVFTDSEYQLPYVLGSAHQGCLPPFPADVFMVPQYGYLTLNNGSQAVGRSSFYCLEYFPSQMLRTGNNFTFSYTFEDVPFHSSYAHSQSLDRLMNPLIDQYLYYLSRTNTPSGTTTQSRLQFSQAGASDIRDQSRNWLPGPCYRQQRVSKTSADNNNSEYSWTGATKYHLNGRDSLVNPGPAMASHKDDEEKFFPQSGVLIFGKQGSEKTNVDIEKVMITDEEEIRTTNPVATEQYGSVSTNLQRGNRQAATADVNTQGVLPGTVWQDRDVYLQGPIWAKIPHTDGHFHPSPLMGGFGLKHPPPQILIKNTPVPANPSTTFSAAKFASFITQYSTGQVSVEIEWELQKENSKRWNPEIQYTSNYNKSVNVDFTVDTNGVYSEPRPIGTRYLTRNL

SEQ ID NO: 2499 - protein, 735 aa, Artificial Sequence
  Description of Artificial Sequence: Synthetic polypeptide
MAADGYLPDWLEDTLSEGIRQWWKLKPGPPPPKPAERHKDDSRGLVLPGYKYLGPFNGLDKGEPVNEADAAALEHDKAYDRQLDSGDNPYLKYNHADAEFQERLKEDTSFGGNLGRAVFQAKKRVLEPLGLVEEPVKTAPGKKRPVEHSPVEPDSSSGTGKAGQQPARKRLNFGQTGDADSVPDPQPLGQPPAAPSGLGTNTMATGSGAPMADNNEGADGVGNSSGNWHCDSTWMGDRVITTSTRTWALPTYNNHLYKQISSQSGASNDNHYFGYSTPWGYFDFNRFHCHFSPRDWQRLINNNWGFRPKRLNFKLFNIQVKEVTQNDGTTTIANNLTSTVQVFTDSEYQLPYVLGSAHQGCLPPFPADVFMVPQYGYLTLNNGSQAVGRSSFYCLEYFPSQMLRTGNNFTFSYTFEDVPFHSSYAHSQSLDRLMNPLIDQYLYYLSRTNTPSGTTTQSRLQFSQAGASDIRDQSRNWLPGPCYRQQRVSKTSADNNNSEYSWTGATKYHLNGRDSLVNPGPAMASHKDDEEKFFPQSGVLIFGKQGSEKTNVDIEKVMITDEEEIRTTNPVATEQYGSVSTNLQRGNRQAATADVNTQGVLPGMVWQDRDVYLQGPIWAKIPHTDGHFHPSPLMGGFGLKHPPPQILIKNTPVPANPSTTFSAAKFASSITQYSTGQVSVEIEWELQKENSKRWNPEIQYTSNYNKSVNVDFTVDTNGVYSEPRPIGTRYLTRNL

SEQ ID NO: 2500 - protein, 735 aa, Artificial Sequence
  Description of Artificial Sequence: Synthetic polypeptide
MAADGYLPDWLEDTLSEGIRQWWKLKPGPPPPKPAERHKDDSRGLVLPGYKYLGPFNGLDKGEPVNEADAAALEHDKAYDRQLDSGDNPYLKYNHADAEFQERLKEDTSFGGNLGRAVFQAKKRVLEPLGLVEEPVKTAPGKKRPVEHSPVEPDSSSGTGKAGQQPARKRLNFGQTGDADSVPDPQPLGQPPAAPSGLGTNTMATGSGAPMADNNEGADGVGNSSGNWHCDSTWMGDRVITTSTRTWALPTYNNHLYKQISSQSGASNDNHYFGYSTPWGYFDLNRFHCHFSPRDWQRLINNNWGFRPKRLNFKLFNIQVKEVTQNDGTTTIANNLTSTVQVFTDSEYQLPYVLGSAHQGCLPPFPADVFMVPQYGYLTLNNGSQAVGRSSFYCLEYFPSQMLRTGNNFTFSYTFEDVPFHSSYAHSQSLDRLMNPLIDQYLYYLSRTNTPSGTTTQSRLQFSQAGASDIRDQSRNWLPGPCYRQQRVSKTSADNNNSEYSWTGATKYHLNGRDSLVNPGPAMASHKDDEEKFFPQSGVLIFGKQGSEKTNVDIEKVMITDEEEIRTTNPVATEQYGSVSTNLQRGNRQAATADVNTQGVLPGTVWQDRDVYLQGPIWAKIPHTDGHFHPSPLMGGFGLKHPPPQILIKNTPVPANPSTTFSAAKFASFITQYSTGQVSVEIEWELQKENSKRWNPEIQYTSNYNKSVNVDFTVDTNGVYSEPRPIGTRYLTRNL

SEQ ID NO: 2501 - protein, 735 aa, Artificial Sequence
  Description of Artificial Sequence: Synthetic polypeptide
MAADGYLPDWLEDTLSEGIRQWWKLKPGPPPPKPAERHKDDSRGLVLPGYKYLGPFNGLDKGEPVNEADAAALEHDKAYDRQLDSGDNPYLKYNHADAEFQERLKEDTSFGGNLGRAVFQAKKRVLEPLGLVEEPVKTAPGKKRPVEHSPVEPDSSSGTGKAGQQPARKRLNFGQTGDADSVPDPQPLGQPPAAPSGLGTNTMATGSGAPMADNNEGADGVGNSSGNWHCDSTWMGDRVITTSTRTWALPTYNNHLYKQISSQSGASNDNRYFGYSTPWGYFDFNRFHCHFSPRDWQRLINNNWGFRPKRLNFKLFNIQVKEVTQNDGTTTIANNLTSTVQVFTDSEYQLPYVLGSAHQGCLPPFPADVFMVPQYGYLTLNNGSQAVGRSSFYCLEYFPSQMLRTGNNFTFSYTFEDVPFHSSYAHSQSLDRLMNPLIDQYLYYLSRTNTPSGTTTQSRLQFSQAGASDIRDQSRNWLPGPCYRQQRVSKTSADNNNSEYSWTGATKYHLNGRDSLVNPGPAMASHKDDEEKFFPQSGVLIFGKQGSEKTNVDIEKVMITDEEEIRTTNPVATEQYGSVSTNLQRGNRQAATADVNTQGVLPGTVWQDRDVYLQGPIWAKIPHTDGHFHPSPLMGGFGLKHPPPQILIKNTPVPANPSTTFSAAKFASFITQYSTGQVSVEIEWELQKENSKRWNPEIQYTSNYNKSVNVDFTVDTNGVYSEPRPIGTRYLTRNL

SEQ ID NO: 2502 - protein, 735 aa, Artificial Sequence
  Description of Artificial Sequence: Synthetic polypeptide
MAADGYLPDWLEDTLSEGIRQWWKLKPGPPPPKPAERHKDDSRGLVLPGYKYLGPFNGLDKGEPVNEADAAALEHDKAYDRQLDSGDNPYLKYNHADAEFQERLKEDTSFGGNLGRAVFQAKKRVLEPLGLVEEPVKTAPGKKRPVEHSPVEPDSSSGTGKAGQQPARKRLNFGQTGDADSVPDPQPLGQPPAAPSGLGTNTMATGSGAPMADNNEGADGVGNSSGNWHCDSTWMGDRVITTSTRTWALPTYNNHLYKQISSQSGASNDNHYFGYSTPWGYFDFNRFHCHFSPRDWQRLINNNWGFRPKRLNFKLFNIQVKEVTQNDGTTTIANNLTSTVQVFTDSEYQLPYVLGSAHQGCLPPFPADVFMVPQYGYLTLNNGSQAVGRSSFYCLEYFPSQMLRTGNNFTFSYTFEDVPFHSSYAHSQSLDRLMNPLIDQYLYYLSRTNTPSGTTTQSRLQFSQAGASDIRDQSRNWLPGPCYRQQRVSKTSADNNNSEYSWTGATKYHLNGRDSLVNPGPAMASHKDDEEKFFPQSGVLIFGKQGSEKTNVDIEKVMITDEEEIRTTNPVATEQYGSVSTNLQRGNRQAATADVNTQGVLPGTVWQDRDVYLQGPIWAKIPHTDGHFHPSPLMGGFGLKHPPPQILIKNTPVPANPSTTFSAAKFASFITQYSTGQVSVEIEWELQKENSKRWNPEIQYTSNYNKSANVDFTVDTNGVYSEPRPIGTRYLTRNL

SEQ ID NO: 2503 - protein, 735 aa, Artificial Sequence
  Description of Artificial Sequence: Synthetic polypeptide
MAADGYLPDWLEDTLSEGIRQWWKLKPGPPPPKPAERHKDDSRGLVLPGYKYLGPFNGLDKGEPVNEADAAALEHDKAYDRQLDSGDNPYLKYNHADAEFQERLKEDTSFGGNLGRAVFQAKKRVLEPLGLVEEPVKTAPGKKRPVEHSPVEPDSSSGTGKAGQQPARKRLNFGQTGDADSVPDPQPLGQPPAAPSGLGTNTMATGSGAPMAGNNEGADGVGNSSGNWHCDSTWMGDRVITTSTRTWALPTYNNHLYKQISSQSGASNDNHYFGYSTPWGYFDFNRFHCHFSPRDWQRLINNNWGFRPKRLNFKLFNIQVKEVTQNDGTTTIANNLTSTVQVFTDSEYQLPYVLGSAHQGCLPPFPADVFMVPQYGYLTLNNGSQAVGRSSFYCLEYFPSQMLRTGNNFTFSYTFEDVPFHSSYAHSQSLDRLMNPLIDQYLYYLSRTNTPSGTTTQSRLQFSQAGASDIRDQSRNWLPGPCYRQQRVSKTSADNNNSEYSWTGATKYHLNGRDSLVNPGPAMASHKDDEEKFFPQSGVLIFGKQGSEKTNVDIEKVMITDEEEIRTTNPVATEQYGSVSTNLQRGNRQAATADVNTQGVLPGTVWQDRDVYLQGPIWAKIPHTDGHFHPSPLMGGFGLKHPPPQILIKNTPVPANPSTTFSAAKFASFITQYSTGQVSVEIEWELQKENSKRWNPEIQYTSNYNKSVNVDFTVDTNGVYSEPRPIGTRYLTRNL

SEQ ID NO: 2504 - protein, 735 aa, Artificial Sequence
  Description of Artificial Sequence: Synthetic polypeptide
MAADGYLPDWLEDTLSEGIRQWWKLKPGPPPPKPAERHKDDSRGLVLPGYKYLGPFNGLDKGEPVNEADAAALEHDKAYNRQLDSGDNPYLKYNHADAEFQERLKEDTSFGGNLGRAVFQAKKRVLEPLGLVEEPVKTAPGKKRPVEHSPVEPDSSSGTGKAGQQPARKRLNFGQTGDADSVPDPQPLGQPPAAPSGLGTNTMATGSGAPMADNNEGADGVGNSSGNWHCDSTWMGDRVITTSTRTWALPTYNNHLYKQISSQSGASNDNHYFGYSTPWGYFDFNRFHCHFSPRDWQRLINNNWGFRPKRLNFKLFNIQVKEVTQNDGTTTIANNLTSTVQVFTDSEYQLPYVLGSAHQGCLPPLPADVFMVPQYGYLTLNNGSQAVGRSSFYCLEYFPSQMLRTGNNFTFSYTFEDVPFHSSYAHSQSLDRLMNPLIDQYLYYLSRTNTPSGTTTQSRLQFSQAGASDIRDQSRNWLPGPCYRQQRVSKTSADNNNSEYSWTGATKYHLNGRDSLVNPGPAMASHKDDEEKFFPQSGVLIFGKQGSEKTNVDIEKVMITDEEEIRTTNPVATEQYGSVSTNLQRGNRQAATADVNTQGVLPGMVWQDRDVYLQGPIWAKIPHTDGHFHPSPLMGGFGLKHPPPQILIKNTPVPANPSTTFSAAKFASFITQYSTGQVSVEIEWELQKENSKRWNPEIQYTSNYNKSVNVDFTVDTNGVYSEPRPIGTRYLTRNL

SEQ ID NO: 2505 - protein, 735 aa, Artificial Sequence
  Description of Artificial Sequence: Synthetic polypeptide
MAADGYLPDWLEDTLSEGIRQWWKLKPGPPPPKPAERHKDDSRGLVLPGYKYLGPFNGLDKGEPVNEADAAALEHDKAYDRQLDSGDNPYLKYNHADAEFQERLKEDTSFGGNLARAVFQAKKRVLEPLGLVEEPVKTAPGKKRPVEHSPAEPDSSSGTGKAGQQPARKRLNFGQTGDADSVPDPQPLGQPPAAPSGLGTNTMATGSGAPMADNNEGADGVGNSSGNWHCDSTWMGDRVITTSTRTWALPTYNNHLYKQISSQSGASNDNHYFGYSTPWGYFDFNRFHCHFSPRDWQRLINNNWGFRPKRLSFKLFNIQVKEVTQNDGATTIANNLTSTVQVFTDSEYQLPYVLGSAHQGCLPPFPADVFMVPQYGYLTLNNGSQAVGRSSFYCLEYFPSQMLRTGNNFTFSYTFEDVPFHSSYAHSQSLDRLMNPLIDQYLYYLSKTNAPSGTTTMSRLQFSQAGASDIRDQSRNWLPGPCYRQQRVSKTAADNNNSDYSWTGATKYHLNGRDSLVNPGPAMASHKDDEEKYFPQSGVLIFGKQGSNKTNVDIEKVMITDEEEIRTTNPVATEQYGSVSTNLQSGNTQAATSDVNTQGVLPGMVWQDRDVYLQGPIWAKIPHTDGHFHPSPLMGGFGLKHPPPQILIKNTPVPANPSTTFSAAKFASFITQYSTGQVSVEIEWELQKENSKRWNPEIQYTSNYNKSVNVDFTVDTNGVYSEPRPIGTRYLTRNL

SEQ ID NO: 2506 - protein, 734 aa, Artificial Sequence
  Description of Artificial Sequence: Synthetic polypeptide
MAADGYLPDWLEDTLSEGIRQWWKLKPGPPPKPAERHKDDSRGLVLPGYKYLGPFNGLDKGEPVNEADAAALEHDKAYDRQLDSGDNPYLKYNHADAEFQERLKEDTSFGGNLGRAVFQAKKRALEPLGLVEEPVKTAPGKKRPVEHSPVEPDSSSGTGKAGQQPARKRLNFGQTGDADSVPDPQPLGQPPAAPSGLGTNTMATGSGAPMADNNEGADGVGNSSGNWHCDSTWMGDRVITTSTRTWALPTYNNHLYKQISSQSGASNDNHYFGYSTPWGYFDFNRFHCHFSPRDWQRLINNNWGFRPKRLNFKLFNIQVKEVTQNDGTTTIANNLTSTVQVFTDSEYQLPYVLGSAHQGCLPPFPADVFMVPQYGYLTLNNGSQAVGRSSFYCLEYFPSQMLRTGNNFTFSYTFEDVPFHSSYAHSQSLDRLMNPLIDQYLYYLSRTNTPSGTTTQSRLQFSQAGASDIRDQSRNWLPGPCYRQQRVSKTSADNNNSEYSWTGATKYHLNGRDSLVNPGPAMASHKDDEEKFFPQSGVLIFGKQGSEKTNVDIEKVMITDEEEIRTTNPVATEQYGSVSTNLQRGNRQAATADVNTQGVLPGMVWQDRDVYLQGPIWAKIPHTDGHFHPSPLMGGFGLKHPPPQILIKNTPVPANPSTTFSAAKFASFITQYSTGQVSVEIEWELQKENSKRWNPEIQYTSNYNKSVNVDFTVDTNGVYSEPRPIGTRYLTRNL

SEQ ID NO: 2507 - protein, 735 aa, Artificial Sequence
  Description of Artificial Sequence: Synthetic polypeptide
MAADGYLPDWLEDTLSEGIRQWWKLKPGPPPPKPAERHKDDSRGLVLPGYKYLGPFNGLDKGEPVNEADAAALEHDKAYDRQLDSGDNPYLKYNHADAEFQERLKEDTSFGGNLARAVFQAKKRVLEPLGLVEEPVKTAPGKKRPVEHSPAEPDSSSGTGKAGQQPARKRLNFGQTGDADSVPDPQPLGQPPAAPSGLGTNTMATGSGAPMADNNEGADGVGNSSGNWHCDSTWMGDRVITTSTRTWALPTYNNHLYKQISSQSGASNDNHYFGYSTPWGYFDFNRFHCHFSPRDWQRLINNNWGFRPKRLSFKLFNIQVKEVTQNDGTTTIANNLTSTVQVFTDSEYQLPYVLGSAHQGCLPPFPADVFMVPQYGYLTLNNGSQAVGRSSFYCLEYFPSQMLRTGNNFTFSYTFEDVPFHSSYAHSQSLDRLMNPLIDQYLYYLSKTNAPSGTTTMSRLQFSQAGASDIRDQSRNWLPGPCYRQQRVSKTAADNNNSDYSWTGATKYHLNGRDSLVNPGPAMASHKDDEEKYFPQSGVLIFGKQGSNKTNVDIEKVMITDEEEIRTTNPVATEQYGSVSTNLQSGNTQAATSDVNTQGVLPGMVWQDRDVYLQGPIWAKIPHTDGHFHPSPLMGGFGLKHPPPQILIKNTPVPANPSTTFSAAKFASFITQYSTGQVSVEIEWELQKENGKRWNPEIQYTSNYNKSVNVDFTVDTNGVYSEPRPIGTRYLTRNL

SEQ ID NO: 2508 - protein, 735 aa, Artificial Sequence
  Description of Artificial Sequence: Synthetic polypeptide
MAADGYLPDWLEDTLSEGIRQWWKLKPGPPPPKPAERHKDDSRGLVLPGYKYLGPFNGLDKGEPVNEADAAALEHDKAYDRQLDSGDNPYLKYNHADAEFQERLKEDTSFGGNLGRAVFQAKKRVLEPLGLVEEPVKTAPGKKRPVEHSPVEPDSSSGTGKAGQQPARKRLNFGQTGDADSVPDPQPLGQPPAAPSGLGTNTMATGSGAPMADNNEGADGVGNSSGNWHCDSTWMGDRVITTSTRTWALPTYNNHLYKQISSQSGASNDNHYFGYSTPWGYFDFNRFHCHFSPRDWQRLINNNWGFRPKRLNFKLFNIQVKEVTQNDGTTTIANNLTSTVQVFTDSEYQLPYVLGSAHQGCLPPFPADVFMVPQYGYLTLNNGSQAVGRSSFYCLEYFPSQMLRTGNNFTFSYTFEDVPFHSSYAHSQSLDRLMNPLIDQYLYYLSRTNTPSGTTTQSRLQFSQAGASDIRDQSRNWLPRPCYRQQRVSKTSADNNNSEYSWTGATKYHLNGRDSLVNPGPAMASHKDDEEKFFPQSGVLIFGKQGSEKTNVDIEKVMITDEEEIRTTNPVATEQYGSVSTNLQRGNRQAATADVNTQGVLPGTVWQDRDVYLQGPIWAKIPHTDGHFHPSPLMGGFGLKHPPPQILIKNTPVPANPSTTFSAAKFASFITQYSTGQVSVEIEWELQKENSKRWNPEIQYTSNYNKSVNVDFTVDTNGVYSEPRPIGTRYLTRNL

SEQ ID NO: 2509 - protein, 735 aa, Artificial Sequence
  Description of Artificial Sequence: Synthetic polypeptide
MAADGYLPDWLEDTLSEGIRQWWKLKPGPPPPKPAERHKDDSRGLVLPGYKYLGPFNGLDKGEPVNEADAAALEHDKAYDRQLDSGDNPYLKYNHADAEFQERLKEDTSFGGNLGRAVFQAKKRALEPLGLVEEPVKTAPGKKRPVEHSPVEPDSSSGTGKAGQQPARKRLNFGQTGDADSVPDPQPLGQPPAAPSGLGTNTMATGSGAPMADNNEGADGVGNSSGNWHCDSTWMGDRVITTSTRTWALPTYNNHLYKQISSQSGASNDNHYFGYSTPWGYFDFNRFHCHFSPRDWQRLINNNWGFRPKRLNFKLFNIQVKEVTQNDGTTTIANNLTSTVQVFTDSEYQLPYVLGSAHQGCLPPFPADVFMVPQYGYLTLNNGSQAVGRSSFYCLEYFPSQMLRTGNNFTFSYTFEDVPFHSSYAHSQSLDRLMNPLIDQYLYYLSRTNTPSGTTTQSRLQFSQAGASDIRDQSRNWLPGPCYRQQRVSKTSADNNNSEYSWTGATKYHLNGRDSLVNPGPAMASHKDDEEKFFPQSGVLIFGKQGSEETNVDIEKVMITDEEEIRTTNPVATEQYGSVSTNLQRGNRQAATADVNTQGVLPGMVWQDRDVYLQGPIWAKIPHTDGHFHPSPLMGGFGLKHPPPQILIKNTPVPANPSTTFSAAKFASFITQYSTGQVSVEIEWELQKENSKRWNPEIQYTSNYNKSVNVDFTVDTNGVYSEPRPIGTRYLTRNL

SEQ ID NO: 2510 - protein, 735 aa, Artificial Sequence
  Description of Artificial Sequence: Synthetic polypeptide
MAADGYLPDWLEDTLSEGIRQWWKLKPGPPPPKPAERHKDDSRGLVLPGYKYLGPFNGLDKGEPANEADAAALEHDKAYDRQLDSGDNPYLKYNHADAEFQERLKEDTSFGGNLGRAVFQAKKRVLEPLGLVEEPVKTAPGKKRPVEHSPVEPDSSSGTGKAGQQPARKRLNFGQTGDADSVPDPQPLGQPPAAPSGLGTNTMATGSGAPMADNNEGADGVGNSSGNWHCDSTWMGDRVITTSTRTWALPTYNNHLYKQISSQSGASNDNHYFGYSTPWGYFDFNRFHCHFSPRDWQRLINNNWGFRPKRLNFKLFNIQVKEVTQNDGTTTIANNLTSTVQVFTDSEYQLPYVLGSAHQGCLPPFPADVFMVPQYGYLTLNNGSQAVGRSSFYCLEYFPSQMLRTGNNFTFSYTFEDVPFHSSYAHSQSLDRLMNPLIDQYLYYLSRTNTPSGTTTQSRLQFSQAGASDIRDQSRNWLPGPCYRQQRVSKTSADNNNSEYSWTGATKYHLNGRDSLVNPGPAMASHKDDEEKFFPQSGVLIFGKQGSEKTNVDIEKVMITDEEEIRTTNPVATEQYGSVSTNLQRGNRQAATADVNTQGVLPGTVWQDRDVYLQGPIWAKIPHTDGHFHPSPLMGGFGLKHPPPQILIKNTPVPANPSTTFSAAKFASFITQYSTGQVSVEIEWELQKENSKRWNPEIQYTSNYNKSVNVDFTVDTNGVYSEPRPIGTRYLTRNL

SEQ ID NO: 2511 - protein, 735 aa, Artificial Sequence
  Description of Artificial Sequence: Synthetic polypeptide
MAADGYLPDWLEDTLSEGIRQWWKLKPGPPPPKPAERHKDDSRGLVLPGYKYLGPFNGLDKGEPVNEADAAALEHDKAYDRQLDSGDNPYLKYNHADAEFQERLKEDTSFGGNLGRAVFQAKKRVLEPLGLVEEPVKTAPGKKRPVEHSPVEPDSSSGTGKAGQQPARKRLNFGQTGDADSVPDPQPLGQPPAAPSGLGTNTMATGSGAPMADNNEGADGVGNSSGNWHCDSTWMGDRVITTSTRTWALPTYNNHLYKQISSQSGASNDNHYFGYSTPWGYFDFNRFHCHFSPRDWQRLINNNWGFRPKRLNFKLFNIQVKEVTQNDGTTTIANNLTSTVQVFTDSEYQLPYVLGSAHQGCLPPFPADVFMVPQYGYLTLNNGSQAVGRSSFYCLEYFPSQMLRTGNNFTFSYTFEDVPFHSSYAHSQSLDRLMNPLIDQYLYYLSRTNTPSGTTTQSRLQFSQAGASDIRDQSRNWLPGPCYRQQRVSKTSADNNNSEYSWTGATKYHLNGRDSLVNPGPAMASHKDDEEKFFPQSGVLIFGKQGSEKTNVDIEKVMVTDEEEIRTTNPVATEQYGSVSTNLQRGNRQAATADVNTQGVLPGTVWQDRDVYLQGPIWAKIPHTDGHFHPSPLMGGFGLKHPPPQILIKNTPVPANPSTTFSAAKFASFITQYSTGQVSVEIEWELQKENSKRWNPEIQYTSNYNKSVNVDFTVDTNGVYSEPRPIGTRYLTRNL

SEQ ID NO: 2512 - protein, 735 aa, Artificial Sequence
  Description of Artificial Sequence: Synthetic polypeptide
MAADGYLPDWLEDTLSEGIRQWWKLKPGPPPPKPAERHKDDSRGLVLPGYKYLGPFNGLDKGEPVNEADAAALEHDKAYDRQLDSGDNPYLKYNHADAEFQERLKEDTSFGGNLGRAVFQAKKRVLEPLGLVEEPVKTAPGKKRPVEHSPVEPDSSSGTGKAGQQPARKRLNFGQTGDADSVPDPQPLGQPPAAPSGLGTNTMATGSGAPMADNNEGADGVGNSSGNWHCDSTWMGDRVITTSTRTWALPTYNNHLYKQISSQSGASNDNHYFGYSTPWGYFDFNRFHCHFSPRDWQRLINNNWGFRPKRLNFKLFNIQVKEVTQNDGTTTIANNLTSTVQVFTDSEYQLPYVLGSAHQGCLPPFPADVFMAPQYGYLTLNNGSQAVGRSSFYCLEYFPSQMLRTGNNFTFSYTFEDVPFHSSYAHSQSLDRLMNPLIDQYLYYLSRTNTPSGTTTQSRLQFSQAGASDIRDQSRNWLPGPCYRQQRVSKTSADNNNSEYSWTGATKYHLNGRDSLVNPGPAMASHKDDEEKFFPQSGVLIFGKQGSEKTNVDIEKVMITDEEEIRTTNPVATEQYGSVSTNLQRGNRQAATADVNTQGVLPGTVWQDRDVYLQGPIWAKIPHTDGHFHPSPLMGGFGLKHPPPQILIKNTPVPANPSTTFSAAKFASFITQYSTGQVSVEIEWELQKENSKRWNPEIQYTSNYNKSVNVDFTVDTNGVYSEPRPIGTRYLTRNL

SEQ ID NO: 2513 - protein, 735 aa, Artificial Sequence
  Description of Artificial Sequence: Synthetic polypeptide
MAADGYLPDWLEDTLSEGIRQWWKLKPGPPPPKPAERHKDDSRGLVLPGYKYLGPFNGLDKGEPVNEADAAALEHDKAYDRQLDSGDNPYLKYNHADAEFQERLKEDTSFGGNLGRAVFQAKKRVLEPLGLVEEPVKTAPGKKRPVEHSPVEPDSSSGTGKTGQQPARKRLNFGQTGDADSVPDPQPLGQPPAAPSGLGTNTMATGSGAPMADNNEGADGVGNSSGNWHCDSTWMGDRVITTSTRTWALPTYNNHLYKQISSQSGASNDNHYFGYSTPWGYFDFNRFHCHFSPRDWQRLINNNWGFRPKRLNFKLFNIQVKEVTQNDGTTTIANNLTSTVQVFTDSEYQLPYVLGSAHQGCLPPFPADVFMVPQYGYLTLNNGSQAVGRSSFYCLEYFPSQMLRTGNNFTFSYTFEDVPFHSSYAHSQSLDRLMNPLIDQYLYYLSRTNTPSGTTTQSRLQFSQAGASDIRDQSRNWLPGPCYRQQRVSKTSADNNNSEYSWTGATKYHLNGRDSLVNPGPAMASHKDDEEKFFPQSGVLIFGKQGSEKTNVDIEKVMITDEEEIRTTNPVATEQYGSVSTNLQRGNRQAATADVNTQGVLPGMVWQDRDVYLQGPIWAKIPHTDGHFHPSPLMGGFGLKHPPPQILIKNTPVSANPSTTFSAAKFASFITQYSTGQVSVEIEWELQKENSKRWDPEIQYTSNYNKSVNVDFTVDTNGVYSEPRPIGTRYLTRNL

SEQ ID NO: 2514 - protein, 734 aa, Artificial Sequence
  Description of Artificial Sequence: Synthetic polypeptide
MAADGYLPDWLEDTLSEGIRQWWKLKPGPPPPKPAERHKDDSRGLVLPGYKYLGPFNGLDKGEPVNEADAAALEHDKAYDRQLDSGDNPYLKYNHADAEFQERLKEDTSFGGNLGRAVFQAKKRVLEPLGLVEEPVKTAPGKKRPVEHSPVEPDSSSGTGKAGQQPARKRLNFGQTGDADSVPDPQPLGQPPAAPSGLGTNTMATGSGAPMADNNEGADGVGNSSGNWHCDSTWMGDRVITTSTRTWALPTYNNHLYKQISSQSGASNDNHYFGYSTPWGYFDFNRFHCHFSPRDWQRLINNWGFRPKRLNFKLFNIQVKEVTQNDGTTTIANNLTSTVQVFTDSEYQLPYVLGSAHQGCLPPFPADVFMVPQYGYLTLNNGSQAVGRSSFYCLEYFPSQMLRTGNNFTFSYTFEDVPFHSSYAHSQSLDRLMNPLIDQYLYYLSRTNTPSGTTTQSRLQFSQAGASDIRDQSRNWLPGPCYRQQRVSKTSADNNNSEYSWTGATKYHLNGRDSLVNPGPAMASHKDDEEKFFPQSGVLIFGKQGSEKTNVDIEKVMITDEEEIRTTNPVATEQYGSVSTNLQRGNRQAATADVNTQGVLPGTVWQDRDVYLQGPIWAKIPHTDGHFHPSPLMGGFGLKHPPPQILIKNTPVPANPSTTFSAAKFASFITQYSTGQVSVEIEWELQKENSKRWNPEIQYTSNYNKSVNVDFTVDTNGVYSEPRPIGTRYLTRNL

SEQ ID NO: 2515 - protein, 735 aa, Artificial Sequence
  Description of Artificial Sequence: Synthetic polypeptide
MAADGYLPDWLEDTLSEGIRQWWKLKPGPPPPKPAERHKDDSRGLVLPGYKYLGPFNGLDKGEPVNEADAAALEHDKAYDRQLDSGDNPYLKYNHADAEFQERLKEDTSFGGNLGRAVFQAKKRVLEPLGLVEEPVKTAPGKKRPVEHSPVEPDSSSGTGKAGQQPARKRLNFGQTGDADSVPDPQPLGQPPAAPSGLGTNTMATGSGAPMADNNEGADGVGNSSGNWHCDSTWMGDRVITTSTRTWALPTYNNHLYKQISSQSGASNDNHYFGYSTPWGYFDFNRFHCHFSPRDWQRLINNNWGFRPKRLNFKLFNIQVKEVTQNDGTTTIANNLTSTVQVFTDSEYQLPYVLGSAHQGCLPPFPADVFMVPQYGYLTLNNGSQAVGRSSFYCLEYFPSQMLRTGNNFTFSYTFEDVPFHSSYAHSQSLDRLMNPLIDQYLYYLSRTNTPSGTTTQSRLQFSQAGASDIRDQSRNWLPGPCYRQQRVSKTSADNNNSEYSWTGATKYHLNGRDSLVNPGPAMASHKDDEEKFFPQSGVLIFGKQGSEKTNVDIEKVMITDEEEIRTTNPVATEQYGSVSTNLQRGNRQAATADVNTQGVLPGTVWQDRDVYLQGPIWAKIPHTDGHFHPSPLMGGFGLKHPPPQILIKNTPVPANPSTTFSAAKFASFITQYSTGQVSVEIEWELQKENGKRWNPEIQYTSNYNKSVNVDFTVDTNGVYSEPRPIGTRYLTRNL

SEQ ID NO: 2516 - protein, 735 aa, Artificial Sequence
  Description of Artificial Sequence: Synthetic polypeptide
MAADGYLPDWLEDTLSEGIRQWWKLKPGPPPPKPAERHKDDSRGLVLPGYKYLGPFNGLDKGEPVNEADAAALEHDKAYDRQLDSGDNPYLKYNHADAEFQERPKEDTSFGGNLGRAVFQAKKRVLEPLGLVEEPVKTAPGKKRPVEHSPVEPDSSSGTGKAGQQPARKRLNFGQTGDADSVPDPQPLGQPPAAPSGLGTNTMATGSGAPMADNNEGADGVGNSSGNWHCDSTWMGDRVITTSTRTWALPTYNNHLYKQISSQSGASNDNHYFGYSTPWGYFDFNRFHCHFSPRDWQRLINNNWGFRPKRLNFKLFNIQVKEVTQNDGTTTIANNLTSTVQVFTDSEYQLPYVLGSAHQGCLPPFPADVFMVPQYGYLTLNNGSQAVGRSSFYCLEYFPSQMLRTGNNFTFSYTFEDVPFHSSYAHSQSLDRLMNPLIDQYLYYLSRTNTPSGTTTQSRLQFSQAGASDIRDQSRNWLPGPCYRQQRVSKTSADNNNSEYLWTGATKYHLNGRDSLVNPGPAMASHKDDEEKFFPQSGVLIFGKQGSEKTNVDIEKVMITDEEEIRTTNPVATEQYGSVSTNLQRGNRQAATADVNTQGVLPGTVWQDRDVYLQGPIWAKIPHTDGHFHPSPLMGGFGLKHPPPQILIKNTPVPANPSTTFSAAKFASFITQYSTGQVSVEIEWELQKENSKRWNPEIQYTSNYNKSVNVDFTVDTNGVYSEPRPIGTRYLTRNL

SEQ ID NO: 2517 - protein, 735 aa, Artificial Sequence
  Description of Artificial Sequence: Synthetic polypeptide
MAADGYLPDWLEDTLSEGIRQWWKLKPGPPPPKPAERHKDDSRGLVLPGYKYLGPFNGLDKGEPVNEADAAALEHDKAYDRQLDSGDNPYLKYNHADAEFQERLKEDTSFGGNLGRAVFQAKKRALEPLGLVEEPVKTAPGKKRPVEHSPVEPDSSSGTGKAGQQPARKRLDFGQTGDADSVPDPQPLGQPPAAPSGLGTNTMATGSGAPMADNNEGADGVGNSSGNWHCDSTWMGDRVITTSTRTWALPTYNNHLYKQISSQSGASNDNHYFGYSTPWGYFDFNRFHCHFSPRDWQRLINNNWGFRPKRLNFKLFNIQVKEVTQNDGTTTIANNLTSTVQVFTDSEYQLPYVLGSAHQGCLPPFPADVFMVPQYGYLTLNNGSQAVGRSSFYCLEYFPSQMLRTGNNFTFSYTFEDVPFHSSYAHSQSLDRLMNPLIDQYLYYLSRTNTPSGTTTQSRLQFSQAGASDIRDQSRNWLPGPCYRQQRVSKTSADNNNSEYSWTGATKYHLNGRDSLVNPGPAMASHKDDEEKFFPQSGVLIFGKQGSEKTNVDIEKVMITDEEEIRTTNPVATEQYGSVSTNLQRGNRQAATADVNTQGVLPGMVWQDRDVYLQGPIWAKIPHTDGHFHPSPLMGGFGLKHPPPQILIKNTPVPANPSTTFSAAKFASFITQYSTGQVSVEIEWELQKENSKRWNPEIQYTSNYNKSVNVDFTVDTNGVYSEPRPIGTRYLTRNL

SEQ ID NO: 2518 - protein, 735 aa, Artificial Sequence
  Description of Artificial Sequence: Synthetic polypeptide
MAADGYLPDWLEDTLSEGIRQWWKLKPGPPPPKPAERHKDDSRGLVLPGYKYLGPFNGLDKGEPVNEADAAALEHDKAYDRQLDSGDNPYLKYNHADAEFQERLKEDTSFGGNLARAVFQAKKRVLEPLGLVEEPVKTAPGKKRPVEHSPAEPDSSSGTGKAGQQPARKRLNFGQTGDADSVPDPQPLGQPPAAPSGLGTNTMATGSGAPMADNNEGADGVGNSSGNWHCDSTWMGDRVITTSTRTWALPTYNNHLYKQISSQSGASNDNHYFGYSTPWGYFDFNRFHCHFSPRDWQRLINNNWGFRPKRLSFKLFNIQVKEVTQNDGTTTIANNLTSTVQVFTDSEYQLPYVLGSAHQGCLPPFPADVFMVPQYGYLTLNNGSQAVGRSSFYCLEYFPSQMLRTGNNFTFSYTFEDVPFHSSYAHSQSLDRLMNPLIDQYLYYLSKTNAPSGTTTMSRLQFSQAGASDIRDQSRNWLPGPCYRQQRVSKTAADNNNSDYSWTGATKYHLNGRDSLVNPGPAMASHKDDEEKYFPQSGVLIFGKQGSNKTNVDIEKVMITDEEEIRTTNPVATEQYGSVSTNLQSGNTQAATSDVNTQGVLPGMVWQDRDVYLQGPIWAKIPHTDGHFHPSPLMGGFGLKHPPPQILIKNTPVPANPSTTFSAAKFASFITQYSTGQVSVEIEWELQKENSKRWNPEIQYTSNYNKSVNVDFTVDTNGVYSEPRPIGTRYLTRNL

SEQ ID NO: 2519 - protein, 735 aa, Artificial Sequence
  Description of Artificial Sequence: Synthetic polypeptide
MAADGYLPDWLEDTLSEGIRQWWKLKPGPPPPKPAERHKDDSRGLVLPGYKYLGPFNGLDKGEPVNEADAAALEHDKAYDRQLDSGDNPYLKYNHADAEFQERLKEDTSFGGNLGRAVFQAKKRVLEPLGLVEEPVKTAPGKKRPVEHSPVEPDSSSGTGKAGQQPARKRLNFGQTGDADSVPDPQPLGQPPAAPSGLGTNTMATGSGAPMADNNEGADGVGNSSGNWHCDSTWMGDRVITTSTRTWALPTYNNHLYKQISSQSGASNDNHYFGYSTPWGYFDFNRFHCHFSPRDWQRLINNNWGFRPKRLNFKLFNIQVKEVTQNDGTTTIANNLTSTVQVFTDSEYQLPYVLGSAHQGCLPPFPADVSMVPQYGYLTLNNGSQAVGRSSFYCLEYFPSQMLRTGNNFTFSYTFEDVPFHSSYAHSQSLDRLMNPLIDQYLYYLSRTNTPSGTTTQSRLQFSQAGASDIRDQSRNWLPGPCYRQQRVSKTSADNNNSEYSWTGATKYHLNGRDSLVNPGPAMASHKDDEEKFFPQSGVLIFGKQGSEKTNVDIEKVMITDEEEIRTTNPVATEQYGSVSTNLQRGNRQAATADVNTQGVLPGTVWQDRDVYLQGPIWAKIPHTDGHFHPSPLMGGFGLKHPPPQILIKNTPVPANPSTTFSAAKFASFITQYSTGQVSVEIEWELQKENSKRWNPEIQYTSNYNKSVNVDFTVDTNGVYSEPRPIGTRYLTRNL

SEQ ID NO: 2520 - protein, 735 aa, Artificial Sequence
  Description of Artificial Sequence: Synthetic polypeptide
MAADGYLPDWLEDTLSEGIRQWWKLKPGPPPPKPAERHKDDSRGLTLPGYKYLGPFNGLDKGEPVNEADAAALEHDKAYDRQLDSGDNPYLKYNHADAEFQERLKEDTSFGGNLARAVFQAKKRVLEPLGLVEEPVKTAPGKKRPVEHSPAELDSSSGTGKSGQQPARKRLNFGQTGDADSVPDPQPLGQPPAAPSGLGTNTMASGSGAPMADNNEGADGVGNSSGNWHCDSTWMGDRVITTSTRTWALPTYNNHLYKQISSQSGASNDNHYFGYSTPWGYFDFNRFHCHFSPRDWQRLINNNWGFRPKRLNFKLFNIQVKEVTQNDGTTTIANNLTSTVQVFTDSEYQLPYVLGSAHQGCLPPFPADVFMVPQYGYLTLNNGSQAVGRSSFYCLEYFPSQMLRTGNNFTFSYTFEDVPFHSSYAHSQSLDRLMNPLIDQYLYYLSRTNTPSGTTTQSRLQFSQAGASDIRDQSRNWLPGPCYRQQRVSKTAADNNNSDYSWTGATKYHLNGRDSLVNPGTAMASHKDDEEKYFPQSGVLIFGKQDSGKTNVDIEKVMITDEEEIRTTNPVATEQYGSVSTNLQSGNTQAATSDVNTQGVLPGMVWQDRDVYLQGPIWAKIPHTDGHFHPSPLMGGFGPKHPPPQILIKNTPVPANPSTTFSAAKFASFITQYSTGQVSVEIEWELQKENSKRWNPEIQYTSNYNKSVNVDFTVDTNGVYSEPRPIGTRYLTRNL

SEQ ID NO: 2521 - protein, 735 aa, Artificial Sequence
  Description of Artificial Sequence: Synthetic polypeptide
MAADGYLPDWLEDTLSEGIRQWWKLKPGPPPPKPAERHKDDSRGLVLPGYKYLGPFNGLDKGEPVNEADAAALEHDKAYDRQLDSGDNPYLKYNHADAEFQERLKEDTSFGGNLARAVFQAKKRVLEPLGLVEEPVKTAPGKKRPVEHSPAEPDSSSGTGESGQQPARKRLNFGQTGDADSVPDPQPLGQPPAAPSGLGTNTMASGSGAPMADNNEGADGVGNSSGNWHCDSTWMGDRVITTSTRTWALPTYNNHLYKQISSQSGASNDNHYFGYSTPWGYFDFNRFHCHFSPRDWQRLINNNWGFRPKRLNFKLFNIQVKEVTQNDGTTTIANNLTSTVQVFTDSEYQLPYVLGSAHQGCLPPFPADVFMVPQYGYLTLNNGSQAVGRSSFYCLEYFPSQMLRTGNNFTFSYTFEDVPFHSSYAHSQSLDRLMNPLIDQYLYYLSRTNTPSGTTTQSRLQFSQAGASDIRDQSRNWLPGPCYRQQRVSKTAADNNNSDYSWTGATKYHLNGRDSLVNPGTAMASHKDDEEKYFPQSGVLIFGKQDSGKTNVDIEKVMITDEEEIRTTNPVATEQYGSVSTNLQSGNTQAATSDVNTQGVLPGMVRQDRDVYLQGPIWAKIPHTDGHFHPSPLMGGFGLKHPPPQILIKNTPVPANPSTTFSAAKFASFITQYSTGQVSVEIEWEPQKENSKRWNPEIQYTSNYNKSVNVDFTVDTNGVYSEPRPIGTRYLTRNL

SEQ ID NO: 2522 - protein, 735 aa, Artificial Sequence
  Description of Artificial Sequence: Synthetic polypeptide
MAADGYLPDWLEDTLSEGIRQWWKLKPGPPPPKPAERHKDDSRGLALPGYKYLGPFNGLDKGEPVNEADAAALEHDKAYDRQLDSGDNPYLKYNHADAEFQERLKEDTSFGGNLARAVFQAKKRVLEPLGLVEEPVKTAPGKKRPVEHSPAELDSSSGTGKSGQQPARKRLNFGQTGDADSVPDPQPLGQPPAAPSGLGTNTMASGSGAPMADNNEGADGVGNSSGNWHCDSTWMGDRVITTSTRTWALPTYNNHLYKQISSQSGASNDNHYFGYSTPWGYFDFNRFHCHFSPRDWQRLINNNWGFRPKRLNFKLFNIQVKEVTQNDGTTTIANNLTSTVQVFTDSEYQLPYVLGSAHQGCLPPFPADVFMVPQYGYLTLNNGSQAVGRSSFYCLEYFPSQMLRTGNNFTFSYTFEDVPFHSSYAHSQSLDRLMNPLIDQYLYYLSRTNTPSGTTTQSGLQFSQAGASDIRDQSRNWLPGPCYRQQRVSKTAADNNNSDYSWTGATKYHLNGRDSLVNPGTAMASHKDDEEKYFPQSGVLIFGKQDSGKTNVDIEKVMITDEEEIRTTNPVATEQYGSVSTNLQSGNTQAATSDVNTQGVLPGMVWQDRDVYLQGPIWAKIPHTDGHFHPSPLMGGFGPKHPPPQILIKNTPVPANPSTTFSAAKFASFITQYSTGQVSVEIEWELQKENSKRWNPEIQYTSNYNKSVNVDFTVDTNGVYSEPRPIGTRYLTRNL

SEQ ID NO: 2523 - protein, 735 aa, Artificial Sequence
  Description of Artificial Sequence: Synthetic polypeptide
MAADGYLPDWLEDTLSEGIRQWWKLKPGPPPPKPAERHKDDSRGLVLPGYKYLGPFNGLDKGEPVNEADAAALEHDKAYDRQLDSGDNPYLKYNHADAEFQERLKEDTSFGGNLARAVFQAKKRVLEPLGLVEEPVKTAPGKKRPVEHSPAEPDSSSGTGKSGQQPARKRLNFGQTGDADSVPDPQPLGQPPAAPSGLGTNTMASGSGAPMADNNEGADGVGNSSGNWHCDSTWMGDRVITTSTRTWALPTYNNHLYKQISSQSGASNDNHYFGYSTPWGYFDFNRFHCHFSPRDWQRLINNNWGFRPKRLNFKLFNIQVKEVTQNDGTTTVANNLTSTVQVFTDSEYQLPYVLGSAHQGCLPPFPADVFMVPQYGYLTLNNGSQAVGRSSFYCLEYFPSQMLRTGNNFTFSYTFEDVPFHSSYAHSQSLDRLMNPLIDQYLYYLSRTNTPSGTTTQSRLQFSQAGASDIRDQSRNWLPGPCYRQQRVSKTAADNNNSDYSWTGATKYHLNGRDSLVNPGTAMASHKDDEEKYFPQSGVLIFGKQDSGKTNVDIEKVMITDEEEIRTTNPVATEQYGSVSTNLQSGNTQAATSDVNTQGVLPGMVRQDRDVYLQGPIWAKIPHTDGHFHPSPLMGGFGLKHPPPQILIKNTPVPANPSTTFSAAKFASFITQYSTGQVSVEIEWEPQKENSKRWNPEIQYTSNYNKSVNVDFTVDTNGVYSEPRPIGTRYLTRNL

SEQ ID NO: 2524 - protein, 735 aa, Artificial Sequence
  Description of Artificial Sequence: Synthetic polypeptide
MAADGYLPDWLEDTLSEGIRQWWKLKPGPPPPKPAERHKDDSRGLVLPGYKYLGPFNGLDKGEPVNEADAAALEHDKAYDRQLDSGDNPYLKYNHADAEFQERLKEDTSFGGNLARAVFQAKKRVLEPLGLVEEPVKTAPGKKRPVEHSPAEPDSSSGTGKSGQQPARKRLNFGQTGDADSVPDPQPLGQPPAAPSGLGTNTMASGSGAPMADNNEGADGVGNSSGNWHCDSTWMGDRVITTSTRTWALPTYNNHLYKQISSQSGASNDNHYFGYSTPWGYFDFNRFHCHFSPRDWQRLINNNWGFRPKRLNFKLFNIQVKEVTQNDGTTTIANNLTSTVQVFTDSEYQLPYVLGSAHQGCLPPFPADVFMVPQYGYLTLNNGSQAVGRSSFYCLEYFPSQMLRTGNNFTFSYTFEDVPFHSSYAHSQSLDRLMNPLIDQYLYYLSRTNTPSGTTTQSRLQFSQAGASDIRDQSRNWLPGPCYRQQRVSKTAADNNNSDYSWTGATKYHLNGRDSLVNPGTAMASHKDDEEKYFPQGGVLIFGKQDSGKTNVDIEKVMITDEEEIRTTNPVATEQYGSVSTNLQSGNTQAATSDVNTQGVLPGMVRQDRDVYLQGPIWAKIPHTDGHFHPSPLMGGFGLKHPPPQILIKNTPVPANPSTTFSAAKFASFITQYSTGQVSVEIEWEPQKENSKRWNPEIQYTSNYNKSVNVDFTVDTNGVYSEPRPIGTRYLTRNL

SEQ ID NO: 2525 - protein, 735 aa, Artificial Sequence
  Description of Artificial Sequence: Synthetic polypeptide
MAADGYLPDWLEDTLSEGIRQWWKLKPGPPPPKPAERHKDDSRGLALPGYKYLGPFNGLDKGEPVNEADAAALEHDKAYDRQLDSGDNPYLKYNHADAEFQERLKEDTSFGGNLARAVFQAKKRVLEPLGLVEEPVKTAPGKKRPVEHSPAELDSSSGTGKSGQQPARKRLNFGQTGDADSVPDPQPLGQPPAAPSGLGTNTMASGSGAPMADNNEGADGVGNSSGNWHCDSTWMGDRVITTSTRTWALPTYNNHLYKQISSQSGASNDNHYFGYSTPWGYFDFNRFHCHFSPRDWQRLINNNWGFRPKRLNFKLFNIQVKEVTQNDGTTTIANNLTSTVQVFTDSEYQLPYVLGSAHQGCLPPFPADVFMVPQYGYLTLNNGSQAVGRSSFYCLEYFPSQMLRTGNNFTFSYTFEDVPFHSSYAHSQSLDRLMNPLIDQYLYYLSRTNTPSGTTTQSRLQFSQAGASDIRDQSRNWLPGPCYRQQRVSKTAADNNNSDYSWTGATKYHLNGRDSLVNPGTAMAGHKDDEEKYFPQSGVLIFGKQDSGKTNVDIEKVMITDEEEIRTTNPVATEQYGSVSTNLQSGNTQAATSDVNTQGVLPGMVWQDRDVYLQGPIWAKIPHTDGHFHPSPLMGGFGPKHPPPQILIKNTPVPANPSTTFSAAKFASFITQYSTGQVSVEIEWELQKENSKRWNPEIQYTSNYNKSVNVDFTVDTNGVYSEPRPIGTRYLTRNL

SEQ ID NO: 2526 - protein, 735 aa, Artificial Sequence
  Description of Artificial Sequence: Synthetic polypeptide
MAADGYLPDWLEDTLSEGIRQWWKLKPGPPPPKPAERHKDDSRGLALPGYKYLGPFNGLDKGEPVNEADAAALEHDKAYDRQLDSGDNPYLKYNHADAEFQERLKEDTSFGGNLARAVFQAKKRVLEPLGLVEEPVKTAPGKKRPVEHSPAELDSSSGTGKSGQQPARKRLNFGQTGDADSVPDPQPLGQPPAAPSGLGTNTMASGSGAPMADNNEGADGVGNSSGNWHCDSTWMGDRVITTSTRTWALPTYNNHLYKQISSQSGASNDNHYFGYSTPWGYFDFNRFHCHFSPRDWQRLINNNWGFRPKRLNFKLFNIQVKEVTQNDGTTTIANNLTSTVQVFTDSEYQLPYVLGSAHQGCLPPFPADVFMVPQYGYLTLNNGSQAVGRSSFYCLEYFPSQMLRTGNNFTFSYTFEDVPFHSSYAHSQSLDRLMNPLIDQYLYYLSRTNTPSGTTTQSRLQFSQAGASDIRDQSRNWLPGPCYRQQRVSKTAADNNNSDYSWTGATKYHLNGRDSLVNPGTAMASHKDDEEKYFPQSGVLIFGKQDSGKTNVDIEKVMITDEEEIRTTNPVATEQYGSVSTNLQSGNTQAATSDVNTQGVLPGMVWQDRDVYLQGPIWAKIPHTDGHFHPSPLMGGFGPKHPPPQILIKNTPVPANPSTTFSAAKFASFITQYSTGQVSVEIEWELQKENSKRWNPEIQYTSNYNKSVNVDFTVDTNGVYSEPRPIGTRYLTRNL

SEQ ID NO: 2527 - protein, 735 aa, Artificial Sequence
  Description of Artificial Sequence: Synthetic polypeptide
MAADGYLPDWLEDTLSEGIRQWWKLKPGPPPPKPAERHKDDSRGLVLPGYKYLGPFNGLDKGEPVNEADAAALEHDKAYDRQLDSGDNPYLKYNHADAEFQERLKEDTSFGGNLARAVFQAKKRVLEPLGLVEEPVKTAPGKKRPVEHSPAEPDSSSGTGKSGQQPARKRLNFGQTGDADSVPGPQPLGQPPAAPSGLGTNTMASGSGAPMADNNEGADGVGNSSGNWHCDSTWMGDRVITTSTRTWALPTYNNHLYKQISSQSGASNDNHYFGYSTPWGYFDFNRFHCHFSPRDWQRLINNNWGFRPKRLNFKLFNIQVKEVTQNDGTTTVANNLTSTVQVFTDSEYQLPYVLGSAHQGCLPPFPADVFMVPQYGYLTLNNGSQAVGRSSFYCLEYFPSQMLRTGNNFTFSYTFEDVPFHSSYAHSQSLDRLMNPLIDQYLYYLSRTNTPSGTTTQSRLQFSQAGASDIRDQSRNWLPGPCYRQQRVSKTAADNNNSDYSWTGATKYHLNGRDSLVNPGTAMASHKDDEEKYFPQSGVLIFGKQDSGKTNVDIEKVMITDEEEIRTTNPVATEQYGSVSTNLQSGNTQAATSDVNTQGVLPGMVRQDRDVYLQGPIWAKIPHTDGHFHPSPLMGGFGLKHPPPQILIKNTPVPANPSTTFSAAKFASFITQYSTGQVSVEIEWEPQKENSKRWNPEIQYTSNYNKSVNVDFTVDTNGVYSEPRPIGTRYLTRNL

SEQ ID NO: 2528 - protein, 735 aa, Artificial Sequence
  Description of Artificial Sequence: Synthetic polypeptide
MAADGYLPDWLEDTLSEGIRQWWKLKPGPPPPKPAERHKDDSRGLVLPGYKYLGPFNGLDKGEPVNEADAAALEHDKAYDRQLDSGDNPYLKYNHADAEFQERLKEDTSFGGNLARAVFQAKKRVLEPLGLVEEPVKTAPGKKRPVEHSPAEPDSSSGTGKSGQQPARKRLNFGQTGDADSVPDPQPLGQPPAAPSGLGTNTMASGSGAPMADNNEGADGVGNSSGNWHCDSTWMGDRVITTSTRTWALPTYNNHLYKQISSQSGASNDNHYFGYSTPWGYFDFNRFHCHFSPRDWQRLINNNWGFRPKRLNFKLFNIQVKEVTQNDGTTTIANNLTSTVQVFTDSEYQLPYVLGSAHQGCLPPFPADVFMVPQYGYLTLNNGSQAVGRSSFYCLEYFPSQMLRTGNNFTFSYTFEDAPFHSSYAHSQSLDRLMNPLIDQYLYYLSRTNTPSGTTTQSRLQFSQAGASDIRDQSRNWLPGPCYRQQRVSKTAADNNNSDYSWTGATKYHLNGRDSLVNPGTAMASHKDDEEKYFPQSGVLIFGKQDSGKTNVDIEKVMITDEEEIRTTNPVATEQYGSVSTNLQSGNTQAATSDVNTQGVLPGMVRQDRDVYLQGPIWAKIPHTDGHFHPSPLMGGFGLKHPPPQILIKNTPVPANPSTTFSAAKFASFITQYSTGQVSVEIEWEPQKENSKRWNPEIQYTSNYNKSVNVDFTVDTNGVYSEPRPIGTRYLTRNL

SEQ ID NO: 2529 - protein, 735 aa, Artificial Sequence
  Description of Artificial Sequence: Synthetic polypeptide
MAADGYLPDWLEDTLSEGIRQWWKLKPGPPPPKPAERHKDDSRGLVLPGYKYLGPFNGLDKGEPVNEADAAALEHDKAYDRQLDSGDNPYLKYNHADAEFQERLKEDTSFGGNLARAVFQAKKRVLEPLGLVEEPVKTAPGKKRPVEHSPAEPDSSSGTGKSGQQPARKRLNFGQTGDADSVPDPQPLGQPPAAPSGLGTNTMASGSGAPMADNNEGADGVGNSSGNWHCDSTWMGDRVIPTSTRTWALPTYNNHLYKQISSQSGASNDNHYFGYSTPWGYFDFNRFHCHFSPRDWQRLINNNWGFRPKRLNFKLFNIQVKEVTQNDGTTTIANNLTSTVQVFTDSEYQLPYVLGSAHQGCLPPFPADVFMVPQYGYLTLNNGSQAVGRSSFYCLEYFPSQMLRTGNNFTFSYTFEDVPFHSSYAHSQSLDRLMNPLIDQYLYYLSRTNTPSGTTTQSRLQFSQAGASDIRDQSRNWLPGPCYRQQRVSKTAADNNNSDYSWTGATKYHLNGRDSLVNPGTAMASHKDDEEKYFPQSGVLIFGKQDSGKTNVDIEKVMITDEEEIRTTNPVATEQYGSVSTNLQSGNTQAATSDVNTQGVLPGMVRQDRDVYLQGPIWAKIPHTDGHFHPSPLMGGFGLKHPPPQILIKNTPVPANPSTTFSAAKFASFITQYSTGQVSVEIEWEPQKENSKRWNPEIQYTSNYNKSVNVDFTVDTNGVYSEPRPIGTRYLTRNL

SEQ ID NO: 2530 - protein, 735 aa, Artificial Sequence
  Description of Artificial Sequence: Synthetic polypeptide
MAADGYLPDWLEDTLSEGIRQWWKLKPGPPPPKPAERHKDDSRGLVLPGYKYLGPFNGLDKGEPVNEADAAALEHDKAYDRQLDSGDNPYLKYNHADAEFQERLKEDTSFGGNLARAVFQAKKRVLEPLGLVEEPVKTAPGKKRPAEHSPAEPDSSSGTGKSGQQPARKRLNFGQTGDADSVPDPQPLGQPPAAPSGLGTNTMASGSGAPMADNNEGADGVGNSSGNWHCDSTWMGDRVITTSTRTWALPTYNNHLYKQISSQSGASNDNHYFGYSTPWGYFDFNRFHCHFSPRDWQRLINNNWGFRPKRLNFKLFNIQVKEVTQNDGTTTIANNLTSTVQVFTDSEYQLPYVLGSAHQGCLPPFPADVFMVPQYGYLTLNNGSQAVGRSSFYCLEYFPSQMLRTGNNFTFSYTFEDVPFHSSYAHSQSLDRLMNPLIDQYLYYLSRTNTPSGTTTQSRLQFSQAGASDIRDQSRNWLPGPCYRQQRVSKTAADNNNSDYSWTGATKYHLNGRDSLVNPGTAMASHKDDEEKYFPQSGVLIFGKQDSGKTNVDIEKVMITDEEEIRTTNPVATEQYGSVSTNLQSGNTQAATSDVNTQGVLPGMVRQDRDVYLQGPIWAKIPHTDGHFHPSPLMGGFGLKHPPPQILIKNTPVPANPSTTFSAAKFASFITQYSTGQVSVEIEWEPQKENSKRWNPEIQYTSNYNKSVNVDFTVDTNGVYSEPRPIGTRYLTRNL

SEQ ID NO: 2531 - protein, 735 aa, Artificial Sequence
  Description of Artificial Sequence: Synthetic polypeptide
MAADGYLPDWLEDTLSEGIRQWWKLKPGPPPPKPAERHKDDSRGLVLPGYKYLGPFNGLDKGEPVNEADAAALEHDKAYDRQLDSGDNPYLKYNHADAEFQERLKEDTSFGGNLARAVFQAKKRVLEPLGLVEEPVKTAPGKKRPVEHSPAEPDSSSGTGKSGQQPARKRLNFGQTGDADSVPDPQPLGQPPAAPSGLGTNTMASGSGAPMADNNEGADGVGNSSGNWHCDSTWMGDRVITTSTRTWALPTYNNHLYKQISSQSGASNDNHYFGYSTPWGYFDFNRFHCHFSPRDWQRLINNNWGFRPKRLNFKLFNIQVKEVTQNDGTTTIANNLTSTVQVFTDSEYQLPYVLGSAHQGCLPPFPADVFMVPQYGYLTLNNGSQAVGRSSFYCLEYFPSQMLRTGNNFTFSYTFEDVPFHSSYAHSQSLDRLMNPLIDQYLYYLSRTNTPSGTTTQSRLQFSQAGASDIRDQSRNWLPGPCYRQQRVSRTAADNNNSDYSWTGATKYHLNGRDSLVNPGTAMASHKDDEEKYFPQSGVLIFGKQDSGKTNVDIEKVMITDEEEIRTTNPVATEQYGSVSTNLQSGNTQAATSDVNTQGVLPGMVRQDRDVYLQGPIWAKIPHTDGHFHPSPLMGGFGLKHPPPQILIKNTPVPANPSTTFSAAKFASFITQYSTGQVSVEIEWEPQKENSKRWNPEIQYTSNYNKSVNVDFTVDTNGVYSEPRPIGTRYLTRNL

SEQ ID NO: 2532 - protein, 735 aa, Artificial Sequence
  Description of Artificial Sequence: Synthetic polypeptide
MAADGYLPDWLEDTLSEGIRQWWKLKPGPPPPKPAERHKDDSRGLVLPGYKYLGPFNGLDKGEPVNEADAAALEHDKAYDRQLDSGDNPYLKYNHADAEFQERLKEDTSFGGNLARAVFQAKKRVLEPLGLVEEPVKTAPGKKRPVEHSPAGPDSSSGTGKSGQQPARKRLNFGQTGDADSVPDPQPLGQPPAAPSGLGTNTMASGSGAPMADNNEGADGVGNSSGNWHCDSTWMGDRVITTSTRTWALPTYNNHLYKQISSQSGASNDNHYFGYSTPWGYFDFNRFHCHFSPRDWQRLINNNWGFRAKRLNFELFNIQVKEVTQNDGTTTIANNLTSTVQVFTDSEYQLPYVLGSAHQGCLPPFPADVFMVPQYGYLTLNNGSQAVGRSSFYCLEYFPSQMLRTGNNFTFSYTFEDVPFHSSYAHSQSLDRLMNPLIDQYLYYLSRTNTPSGTTTQSRLQFSQAGASDIRDQSRNWLPGPCYRQQRVSKTAADNNNSDYSWTGATKYHLNGRDSLVNPGTAMASHKDDEEKYFPQSGVLIFGKQDSGKTNVDIEKVMITDEEEIRTTNPVATEQYGSVSTNLQSGNTQAATSDVNTQGVLPGMVWQDRDVYLQGPIWAKIPHTDGHFHPSPLMGGFGLKHPPPQILIKSTPVPANPSTTFSAAKFASFITQYSTGQVSVEIEWELQKENSKRWNPEIQYTSNYNKSVNVDFTVDTNGVYSEPRPIGTRYLTRNL

SEQ ID NO: 2533 - protein, 735 aa, Artificial Sequence
  Description of Artificial Sequence: Synthetic polypeptide
MAADGYLPDWLEDTLSEGIRQWWKLKPGPPPPKPAERHKDDSRGLVLPGYKYLGPFNGLDKGEPVNEADAAALEHDKAYDRQLDSGDNPYLKYNHADAEFQERLKEDTSFGGNLARAVFQAKKRVLEPLGLVEEPVKTAPGKKRPVEHSPAEPDSSSGTGKSGQQPARKRLNFGQTGDADSVPDPQPLGQPPAAPSGLGTNTMASGSGAPMADNNEGADGVGNSSGNWHCDSTWMGDRVITTSTRTWALPTYNNHLYKQISSQSGASNDNHYFGYSTPWGYFDFNRFHCHFSPRDWQRLINNNWGFRPKRLNFKLFNIQVKEVTQNDGTTTIANNLTSTVQVFTDSEYQLPYVLGSAHQGCLPPFPADVFMVPQYGYLTLNNGSQAVGRSSFYCLEYFPSQMLRTGNNFTFSYTFEDVPFHSSYAHSQSLDRLMNPLIDQYLYYLSRTNTPSGTTTQSRLRFSQAGASDIRDQSRNWLPGPCYRQQRVSKTAADNNNSDYSWTGATKYHLNGRDSLVNPGTAMASHKDDEEKYFPQSGVLIFRKQDSGKTNVDIERVMITDEEEIRTTNPVATEQYGSVSTNLQSGNTQAATSDVNTQGVLPGMVWQDRDVYLQGPIWAKIPHTDGHFHPSPLMGGFGLKHPPPQILIKNTPVPANPSTTFSAAKFASFITQYSTGQVSVEIEWELQKENSKRWNPEIQYTSNYNKSVNVDFTVDTNGVYSEPRPIGTRYLTRNL

SEQ ID NO: 2534 - protein, 735 aa, Artificial Sequence
  Description of Artificial Sequence: Synthetic polypeptide
MAADGYLPDWLEDTLSEGIRQWWKLKPGPPPPKPAERHKDDSRGLVLPGYKYLGPFNGLDKGEPVNEADAAALEHDKAYDRQLDSGDNPYLKYNHADAEFQERLKEDTSFGGNLARAVFQAKKRVLEPLGLVEEPVKTAPGKKRPVEHSPAEPDSSSGTGKSGQQPARKRLNFGQTGDADSVPDPQPLGQPPAAPSGLGTNTMASGSGAPMADNNEGADGVGNSSGNWHCDSTWMGDRVITTSTRTWALPTYNNHLYKQISSQSGASNDNHYFGYSTPWGYFDFNRFHCHFSPRDWQRLINNNWGFRAKRLNFKLFNIQVKEVTQNDGTTTIANNLTSTVQVFTDSEYQLPYVLGSAHQGCLPPFPADVFMVPQYGYLTLNNGSQAVGRSSFYCLEYFPSQMLRTGNNFTFSYTFEDVPFHSSYAHSQSLDRLMNPLIDQYLYYLSRTNTPSGTTTQSRLRFSQAGASDIRDQSRNWLPGPCYRQQRVSKTAADNNNSDYSWTGATKYHLNGRDSLVNPGTAMASHKDDEEKYFPQSGVLIFGKQDSGKTNVDIERVMITDEEEIRTTNPVATEQYGSVSTNLQSGNTQAATSDVNTQGVLPGMVWQDRDVYLQGPIWAKIPHTDGHFHPSPLMGGFGLKHPPPQILIKNTPVPANPSTTFSAAKFASFITQYSTGQVSVEIEWELQKENSKRWNPEIQYTSNYNKSVNVDFTVDTNGVYSEPRPIGTRYLTRNL

SEQ ID NO: 2535 - protein, 735 aa, Artificial Sequence
  Description of Artificial Sequence: Synthetic polypeptide
MAADGYLPDWLEDTLSEGIRQWWKLKPGPPPPRPAERHQDDSRGLVLPGYKYLGPFNGLDKGEPVNEADAAALEHDKAYDRQLDSGDNPYLKYNHADAEFQERLKEDTSFGGNLGRAVFQAKKRVLEPLGLVEEPVKTAPGKKRPVEHSPAEPDSSSGTGKAGQQPARKRLNFGQTGDADSVPDPQPLGQPPAAPTSLGSTTMATGSGAPMADNNEGADGVGNSSGNWHCDSQWLGDRVITTSTRTWALPTYNNHLYKQISSQSGASNDNHYFGYSTPWGYFDFNRFHCHFSPRDWQRLINNNWGFRPKRLNFELFNIQVKEVTQNDGTTTIANNLTSTVQVFTDSEYQLPYVLGSAHQGCLPPFPADVFMVPQYGYLTLNNGSQAVGRSSFYCLEYFPSQMLRTGNNFTFSYTFEDVPFHSSYAHSQSLDRLMNPLIDQYLYYLSRTNTPSGTTTQSRLQFSQAGASDIRDQSRNWLPGPCYRQQRVSKTAADNNNSDYSWTGATKYHLNGRDSLVNPGTAMASHKDDEEKYFPQSGVLIFGKQDSGKTNVDIEKVMITDEEEIRTTNPVATEQYGSVSTNLQSGNTQAATSDVNTQGVLPGMVWQDRDVYLQGPIWAKIPHTDGHFHPSPLMGGFGLKHPPPQILIKSTPVPANPSTTFSAAKFASFITQYSTGQVSVEIEWELQKENSKRWNPEIQYTSNYNKSVNVDFTVDTNGVYSEPRPIGTRYLTRNL

SEQ ID NO: 2536 - protein, 735 aa, Artificial Sequence
  Description of Artificial Sequence: Synthetic polypeptide
MAADGYLPDWLEDTLSEGIRQWWKLKPGPPPPKPAERHKDDSRGLVLPGYKYLGPFNGLDKGEPVNEADAAALEHDKAYDRQLDSGDNPYLKYNHADAEFQERLKEDTSFGGNLARAVFQAKKRVLEPLGLVEEPVKTAPGKKRPVEHSPAGPDSSSGTGKSGQQPARKRLNFGQTGDADSVPDPQPLGQPPAAPSGLGTNTMASGSGAPMADNNEGADGVGNSSGNWHCDSTWMGDRVITTSTRTWALPTYNNHLYKQISSQSGASNDNHYFGYSTPWGYFDFNRFHCHFSPRDWHRLINNNWGFRPKRLNFELFNIQVKEVTQNDGTTTIANNLTSTVQVFTDSEYQLPYVLGSAHQGCLPPFPADVFMVPQYGYLTLNNGSQAVGRSSFYCLEYFPSQMLRTGNNFTFSYTFEDVPFHSSYARSQSLDRLMNPLIDQYLYYLSRTNTPSGTTTQSRLQFSQAGASDIRDQSRNWLPGPCYRQQRVSKTAADNNNSDYSWTGATKYHLNGRDSLVNPGTAMASHKDDEEKYFPQSGVLIFGKQDSGKTNVDIEKVMITDEEEIRTTNPVATEQYGSVSTNLQSGNTQAATSDVNTQGVLPGMVWQDRDVYLQGPIWAKIPHTDGHFHPSPLMGGFGLKHPPPQILIKSTPVPANPSTTFSAAKFASFITQYSTGQVSVEIEWELQKENSKRWNPEIQYTSNYNKSVNVDFTVDTNGVYSEPRPIGTRYLTRNL

SEQ ID NO: 2537 - protein, 735 aa, Artificial Sequence
  Description of Artificial Sequence: Synthetic polypeptide
MAADGYLPDWLEDTLSEGIRQWWKLKPGPPPPKPAERHKDDSRGLVLPGYKYLGPFNGLDKGEPVNEADAAALEHDKAYDRQLDSGDNPYLKYNHADAEFQERLKEDTSFGGNLARAVFQAKKRVLEPLGLVEEPVKTAPGKKRPVEHSPAGPDSSSGTGKSGQQPARKRLNFGQTGDADSVPDPQPLGQPPAAPSGLGTNTMASGSGAPMADNNEGADGVGNSSGNWHCDSTWMGDRVITTSTRTWALPTYNNHLYKQISSQSGASNDNHYFGYSTPWGYFDFNRFHCHFSPRDWQRLINNNWGFRPKRLNFELFNIQVKEVTQNDGTTTIANNLTSTVQVFTDSEYQLPYVLGSAHQGCLPPFPADVFMVPQYGYLTLNNGSQAVGRSSFYCLEYFPSQMLRTGNNFTFSYTFEDVPFHSSYAHSQSLDRLMNPLIDQYLYYLSRTNTPSGTTTQSRLQFSQAGASDIRDQSRNWLPGPCYRQQRVSKTAADNNNSDYSWTGATKYHLNGRDSLVNPGTAMASHKDDEEKYFPQSGVLIFGKQDSGKTNVDIEKVMITDEEEIRTTNPVATEQYGSVSTNLQSGNTQAATSDVNTQGVLPGMVWQDRDVYLQGPIWAKIPHTDGHFHPSPLMGGFGLKHPPPQILIKSTPVPANPSTTFSAAKFASFITQYSTGQVSVEIEWELQKENSKRWNPEIQYTSNYNKSVNVDFTVDANGVYSEPRPIGTRYLTRNL

SEQ ID NO: 2538 - protein, 735 aa, Artificial Sequence
  Description of Artificial Sequence: Synthetic polypeptide
MAADGYLPDWLEDTLSEGIRQWWKLKPGPPPPKPAERHKDDSRGLVLPGYKYLGPFNGLDKGEPVNEADAAALEHDKAYDRQLDSGDNPYLKYNHADAEFQERLKEDTSFGGNLARAVFQAKKRVLEPLGLVEEPVKTAPGKKRPVEHSPAGPDSSSGTGKSGQQPARKRLNFGQTGDADSVPDPQPLGQPPAAPSGLGTNTMASGSGAPMADNNEGADGVGNSSGNWHCDSTWMGDRVITTSTRTWALPTYNNHLYKQISSQSGASNDNHYFGYSTPWGYFDFNRFHCHFSPRDWQRLINNNLGFRAKRLNFELFNIQVKEVTQNDGTTTIANNLTSTVQVFTDSEYQLPYVLGSAHQGCLPPFPADVFMVPQYGYLTLNNGSQAVGRSSFYCLEYFPSQMLRTGNNFTFSYTFEDVPFHSSYAHSQSLDRLMNPLIDQYLYYLSRTNTPSGTTTQSRLQFSQAGASDIRDQSRNWLPGPCYRQQRVSKTAADNNNSDYSWTGATKYHLNGRDSLVNPGTAMASHKDDEEKYFPQSGVLIFGKQDSGKTNVDIEKVMITDEEEIRTTNPVATEQYGSVSTNLQSGNTQAATSDVNTQGVLPGMVWQDRDVYLQGPIWAKIPHTDGHFHPSPLMGGFGLKHPPPQILIKSTPVPANPSTTFSAAKFASFITQYSTGQVSVEIEWELQKENSKRWNPEIQYTSNYNKSVNVDFTVDTNGVYSEPRPIGTRYLTRNL

SEQ ID NO: 2539 - protein, 735 aa, Artificial Sequence
  Description of Artificial Sequence: Synthetic polypeptide
MAADGYLPDWLEDTLSEGIRQWWKLKPGPPPPKPAERHKDDSRGLVLPGYKYLGPFNGLDKGEPVNEADAAALEHDKAYDRQLDSGDNPYLKYNHADAEFQERLKEDTSFGGNLARAVFQAKKRVLEPLGLVEEPVKTAPGKKRPVEHSPAEPDSSSGTGKSGQQPARKRLNFGQTGDADSVPDPQPLGQPPAAPSGLGTNTMASGSGAPMADNNEGADGVGNSSGNWHCDSTWMGDRVITTSTRTWALPTYNNHLYKQISSQSGASNDNHYFGYSTPWGYFDFNRFHCHFSPRDWQRLINNNWGFRPKRLNFELFNIQVKEVTQNDGTTTIANNLTSTVQVFTDSEYQLPYVLGSAHQGCLPPFPADVFMVPQYGYLTLNNGSQAVGRSSFYCLEYFPSQMLRTGNNFTFSYTFEDVPFHSSYAHSQSLDRLMNPLIDQYLYYLSRTNTPSGTTTQSRLQFSQAGASDIRDQSRNWLPGPCYRQQRVSKTAADNNNSDYSWTGATKYHLNGRDSLVNPGTAMASHKDDEEKYFPQSGVLIFRKQDSGKTNVDIEKVMITDEEEIRTTNPVATEQYGSVSTNLQSGNTQAATSDVNTQGVLPGMVWQDRDVYLQGPIWAKIPHTDGHFHPSPLMGGFGLKHPPPQILIKSTPVPANPSTTFSAAKFASFITQYSTGQVSVEIEWELQKENSKRWNPEIQYTSNYNKSVNVDFTVDTNGVYSEPRPIGTRYLTRNL

SEQ ID NO: 2540 - protein, 735 aa, Artificial Sequence
  Description of Artificial Sequence: Synthetic polypeptide
MAADGYLPDWLEDTLSEGIRQWWKLKPGPPPPKPAERHQDDSRGLVLPGHKYLGPFNGLDKGEPVNEADAAALEHDKAYDRQLDSGDNPYLKYNHADAEFQERLKEDTSFGGNLGRAVFQAKKRVLEPLGLVEEPVKTAPGKKRPVEHSPAGPDSSSGTGKSGQQPARKRLNFGQTGDADSVPDPQPLGQPPAAPSGLGTNTMASGSGAPMADNNEGADGVGNSSGNWHCDSTWMGDRVITTSTRTWALPTYNNHLYKQISSQSGASNDNHYFGYSTPWGYFDFNRFHCHFSPRDWQRLINNNWGFRPKRLNFELFNIQVKEVTQNDGTTTIANNLTSTVQVFTDSEYQLPYVLGSAHQGCLPPFPADVFMVPQYGYLTLNNGSQAVGRSSFYCLEYFPSQMLRTGNNFTFSYTFEDVPFHSSYAHSQSLDRLMNPLIDQYLYYLSRTNTPSGTTTQSRLQFSQAGASDIRDQSRNWLPGPCYRQQRVSKTAADNNNSDYSWTGATKYHLNGRDSLVNPGTAMASHKDDEEKYFPQSGVLIFGKQDSGKTNVDIEKVMITDEEEIRTTNPVATEQYGSVSTNLQSGNTQAATSDVNTQGVLPGMVWQDRDVYLQGPIWAKIPHTDGHFHPSPLMGGFGLKHPPPQILIKSTPVPANPSTTFSAAKFASFITQYSTGQVSVEIEWELQKENSKRWNPEIQYTSNYNKSVNVDFTVDTNGVYSEPRPIGTRYLTRNL

SEQ ID NO: 2541 - protein, 735 aa, Artificial Sequence
  Description of Artificial Sequence: Synthetic polypeptide
MAADGYLPDWLEDTLSEGIRQWWKLKPGPPPPKPAERHKDDSRGLVLPGYKYLGPFNGLDKGEPVNEADAAALEHDKAYDRQLDSGDNPYLKYNHADAEFQERLKEDTSFGGNLARAVFQAKKRVLEPLGLVEEPVKTAPGKKRPVEHSPAGPDSSSGTGKSGQQPARKRLNFGQTGDADSVPDPQPLGQPPAAPSGLGTNTMASGSGAPMADNNEGADGVGNSSGNWHCDSTWMGDRVITTSTRTWALPTYNNHLYKQISSQSGASNDNHYFGYSTPWGYFDFNRFHCHFSPRDWHRLINNNWGFRPKRLNFELFNIQVKEVTQNDGTTTIANNLTSTVQVFTDSEYQLPYVLGSAHQGCLPPFPADVFMVPQYGYLTLNNGSQAVGRSSFYCLEYFPSQMLRTGNNFTFSYTFEDVPFHSSYAHSQSLDRLMNPLIDQYLYYLSRTNTPSGTTTQSRLQFSQAGASDIRDQSRNWLPGPCYRQQRVSKTAADNNNSDYSWTGATKYHLNGRDSLVNPGTAMASHKDDEEKYFPQSGVLIFGKQDSGKTNVDIEKVMITDEEEIRTTNPVATEQYGSVSTNLQSGNTQAATSDVNTQGVLPGMVWQDRDVYLQGPIWAKIPHTDGHFHPSPLMGGFGLKHPPPQILIKSTPVPANPSTTFSAAKFASFITQYSTGQVSVEIEWELQKENSKRWNPEIQYTSNYNKSVNVDFTVDTNGVYSEPRPIGTRYLTRNL

SEQ ID NO: 2542 - protein, 735 aa, Artificial Sequence
  Description of Artificial Sequence: Synthetic polypeptide
MAADGYLPDWLEDTLSEGIRQWWKLKPGPPPPKPAERHKDDSRGLVLPGYKYLGPFNGLDKGEPVNEADAAALEHDKAYDRQLDSGDNPYLKYNHADAEFQERLKEDTSFGGNLGRAVFQAKKRVLEPLGLVEEPVKTAPGKKRPVEHSPVEPDSSSGTGKAGQQPARKRLNFGQTGDADSVPDPQPLGQPPAAPSGLGTNTMATGSGAPMADNNEGADGVGNSSGNWHCDSTWMGDRVITTSTRTWALPTYNNHLYKQISSQSGASNDNHYFGYSTPWGYFDFNRFHCHFSPRDWQRLINNNWGFRPKRLSFKLFNIQVKEVTQNDGTTTIANNLTSTVQVFTDSEYQLPYVLGSAHQGCLPPFPADVFMVPQYGYLTLNNGSQAVGRSSFYCLEYFPSQMLRTGNNFTFSYTFEDVPFHSGYAHSQSLDRLMNPLIDQYLYYLSKTNAPSGTTTMSRLQFSQAGASDIRDQSRNWLPGPCYRQQRVSKTAADNNNSDYSWTGATKYHLNGRDSLVNPGPAMASHKDDEEKYFPQSGVLIFGKQGSNKTNVDIEKVMITDEEEIRTTNPVATEQYGSVSTNLQSGNTQAATSDVNTQGVLPGMVWQDRDVYLQGPIWAKIPHTDGHFHPSPLMGGFGLKHPPPQILIKNTPVPANPSTTFSAAKFASFITQYSTGQVSVEIEWELQKENSKRWNPEIQYTSNYNKSVNVDFTVDTNGVYSEPRPIGTRYLTRNL

SEQ ID NO: 2543 - protein, 735 aa, Artificial Sequence
  Description of Artificial Sequence: Synthetic polypeptide
MAADGYLPDWLEDTLSEGIRQWWKLKPGPPPPRPAERHQDDSRGLVLPGYKYLGPFNGLDKGEPVNEADAAALEHDKAYDRQLDSGDNPYLKYNHADAEFQERLKEDTSFGGNLGRAVFQAKKRVLEPLGLVEEPVKTAPGKKRPVEHSPAEPDSSSGTGKAGQQPARKRLNFGQTGDADSVPDPQPLGQPPAAPTSLGSTTMATGSGAPMADNNEGADGVGNSSGNWHCDSTWMGDRVITTSTRTWALPTYNNHLYKQISSQSGASNDNHYFGYSTPWGYFDFNRFHCHFSPRDWQRLINNNWGFRPKRLNFELFNIQVKEVTQNDGTTTIANNLTSTVQVFTDSEYQLPYVLGSAHQGCLPPFPADVFMVPQYGYLTLNNGSQAVGRSSFYCLEYFPSQMLRTGNNFTFSYTFEDVPFHSSYAHSQSLDRLMNPLIDQYLYYLSRTNTPSGTTTQSRLQFSQAGASDIRDQSRNWLPGPCYRQQRVSKTAADNNNSDYSWTGATKYHLNGRDSLVNPGTAMASHKDDEEKYFPQSGVLIFGKQDSGKTNVDIEKVMITDEEEIRTTNPVATEQYGSVSTNLQSGNTQAATSDVNTQGVLPGMVWQDRDVYLQGPIWAKIPHTDGHFHPSPLMGGFGLKHPPPQILIKSTPVPANPSTTFSAAKFASFITQYSTGQVSVEIEWELQKENSKRWNPEIQYTSNYNKSVNVDFTVDTNGVYSEPRPIGTRYLTRNL

SEQ ID NO: 2544 - protein, 735 aa, Artificial Sequence
  Description of Artificial Sequence: Synthetic polypeptide
MAADGYLPDWLEDTLSEGIRQWWKLKPGPPPPKPAERHQDDSRGLVLPGHKYLGPFNGLDKGEPVNEADAAALEHDKAYDRQLDSGDNPYLKYNHADAEFQERLKEDTSFGGNLGRAVFQAKKRVLEPLGLVEEPVKTAPGKKRPVEHSPAEPDSSSGTGKAGQQPARKRLNFGQTGDADSVPDPQPLGQPPAAPSGLGTNTMASGSGAPMADNNEGADGVGNSSGNWHCDSTWMGDRVITTSTRTWALPTYNNHLYKQISSQSGASNDNHYFGYSTPWGYFDFNRFHCHFSPRDWQRLINNNWGFRPKRLNFELFNIQVKEVTQNDGTTTIANNLTSTVQVFTDSEYQLPYVLGSAHQGCLPPFPADVFMVPQYGYLTLNNGSQAVGRSSFYCLEYFPSQMLRTGNNFTFSYTFEDVPFHSSYAHSQSLDRLMNPLIDQYLYYLSRTNTPSGTTTQSRLQFSQAGASDIRDQSRNWLPGPCYRQQRVSKTAADNNNSDYSWTGATKYHLNGRDSLVNPGTAMASHKDDEEKYFPQSGVLIFGKQDSGKTNVDIEKVMITDEEEIRTTNPVATEQYGSVSTNLQSGNTQAATSDVNTQGVLPGMVWQDRDVYLQGPIWAKIPHTDGHFHPSPLMGGFGLKHPPPQILIKSTPVPANPSTTFSAAKFASFITQYSTGQVSVEIEWELQKENSKRWNPEIQYTSNYNKSVNVDFTVDTNGVYSEPRPIGTRYLTRNL

SEQ ID NO: 2545 - protein, 735 aa, Artificial Sequence
  Description of Artificial Sequence: Synthetic polypeptide
MAADGYLPDWLEDTLSEGIRQWWKLKPGPPPPKPAERHKDDSRGLVLPGYKYLGPFNGLDKGEPVNEADAAALEHDKAYDRQLDSGDNPYLKYNHADAEFQERLKEDTSFGGNLARAVFQAKKRVLEPLGLVEEPVKTAPGKKRPVEHSPAEPDSSSGTGKSGQQPARKRLNFGQTGDADSVPDPQPLGQPPAAPSGLGTNTMASGSGAPMADNNEGADGVGNSSGNWHCDSTWMGDRVITTSTRTWALPTYNNHLYKQISSQSGASNDNHYFGYSTPWGYFDFNRFHCHFSPRDWQRLINNNWGFRPKRLNFKLFNIQVKEVTQNDGTTTIANNLTSTVQVFTDSEYQLPYVLGSAHQGCLPPFPADVFMVPQYGYLTLNNGSQAVGRSSFYCLEYFPSQMLRTGNNFTFSYTFEDVPFHSSYAHSQSLDRLMNPLIDQYLYYLSRTNTPSGTTTQSRLRFSQAGASDIRDQSRNWLPGPCYRQQRVSKTAADNNNSDYSWTGATKYHLNGRDSLVNPGTAMASHKDDEEKYFPQSGVLIFGKQDSEKTNVDIERVMITDEEEIRTTNPVATEQYGSVSTNLQSGNTQAATSDVNTQGVLPGMVWQDRDVYLQGPIWAKIPHTDGHFHPSPLMGGFGLKHPPPQILIKNTPVPANPSTTFSAAKFASFITQYSTGQVSVEIEWELQKENSKRWNPEIQYTSNYNKSVNVDFTVDTNGVYSEPRPIGTRYLTRNL

SEQ ID NO: 2546 - protein, 735 aa, Artificial Sequence
  Description of Artificial Sequence: Synthetic polypeptide
MAADGYLPDWLEDTLSEGIRQWWKLKPGPPPPKPAERHQDDSRGLVLPGYKYLGPFNGLDKGEPVNEADAAALEHDKAYDRQLDSGDNPYLKYNHADAEFQERLKEDTSFGGNLGRAVFQAKKRVLEPLGLVEEPVKTAPGKKRPVEHSPVEPDSSSGTGKAGQQPARKRLNFGQTGDADSVPDPQPLGQPPAAPSGLGTNTMATGSGAPMADNNEGADGVGNSSGNWHCDSTWMGDRVITTSTRTWALPTYNNHLYKQISSQSGASNDNHYFGYSTPWGYFDFNRFHCHFSPRDWQRLINNNWGFRPKRLSFKLFNIQVKEVTQNDGTTTIANNLTSTVQVFTDSEYQLPYVLGSAHQGCLPPFPADVFMVPQYGYLTLNNGSQAVGRSSFYCLEYFPSQMLRTGNNFTFSYTFEDVPFHSSYAHSQSLDRLMNPLIDQYLYYLSKTNAPSGTTTMSRLQFSQAGASDIRDQSRNWLPGPCYRQQRVSKTAADNNNSDYSWTGATKYHLNGRDSLVNPGPAMASHKDDEEKYFPQSGVLIFGKQGSNKTNVDIEKVMITDEEEIRTTNPVATEQYGSVSTNLQSGNTQAATSDVNTQGVLPGMVWQDRDVYLQGPIWAKIPHTDGHFHPSPLMGGFGLKHPPPQILIKNTPVPANPSTTFSAAKFASFITQYSTGQVSVEIEWELQKENSKRWNPEIQYTSNYNKSVNVDFTVDTNGVYSEPRPIGTRYLTRNL

SEQ ID NO: 2547 - protein, 735 aa, Artificial Sequence
  Description of Artificial Sequence: Synthetic polypeptide
MAADGYLPDWLEDTLSEGIRQWWKLKPGPPPPRPAERHQDDSRGLVLPGYKYLGPFNGLDKGEPVNEADAAALEHDKAYDRQLDSGDNPYLKYNHADAEFQERLKEDTSFGGNLGRAVFQAKKRVLEPLGLVEEPVKTAPGKKRPVEHSPAGPDSSSGTGKSGQQPARKRLNFGQTGDADSVPDPQPLGQPPAAPSGLGTNTMASGSGAPMADNNEGADGVGNSSGNWHCDSTWMGDRVITTSTRTWALPTYNNHLYKQISSQSGASNDNHYFGYSTPWGYFDFNRFHCHFSPRDWQRLINNNWGFRAKRLNFELFNIQVKEVTQNDGTTTIANNLTSTVQVFTDSEYQLPYVLGSAHQGCLPPFPADVFMVPQYGYLTLNNGSQAVGRSSFYCLEYFPSQMLRTGNNFTFSYTFEDVPFHSSYAHSQSLDRLMNPLIDQYLYYLSRTNTPSGTTTQSRLQFSQAGASDIRDQSRNWLPGPCYRQQRVSKTAADNNNSDYSWTGATKYHLNGRDSLVNPGTAMASHKDDEEKYFPQSGVLIFGKQDSGKTNVDIEKVMITDEEEIRTTNPVATEQYGSVSTNLQSGNTQAATSDVNTQGVLPGMVWQDRDVYLQGPIWAKIPHTDGHFHPSPLMGGFGLKHPPPQILIKSTPVPANPSTTFSAAKFASFITQYSTGQVSVEIEWELQKENSKRWNPEIQYTSNYNKSVNVDFTVDTNGVYSEPRPIGTRYLTRNL

SEQ ID NO: 2548 - protein, 735 aa, Artificial Sequence
  Description of Artificial Sequence: Synthetic polypeptide
MAADGYLPDWLEDTLSEGIRQWWKLKPGPPPPKPAERHKDDSRGLVLPGYKYLGPFNGLDKGEPVNEADAAALEHDKAYDRQLDSGDNPYLKYNHADAEFQERLKEDTSFGGNLARAVFQAKKRVLEPLGLVEEPVKTAPGKKRPVEHSPAGPDSSSGTGKSGQQPARKRLNFGQTGDADSVPDPQPLGQPPAAPSGLGTNTMASGSGAPTADNNEGADGVGNSSGNWHCDSTWMGDRVITTSTRTWALPTYNNHLYKQISSQSGASNDNHYFGYSTPWGYFDFNRFHCHFSPRDWQRLINNNWGFRPKRLNFELFNIQVKEVTQNDGTTTIANNLTSTVQVFTDSEYQLPYVLGSAHQGCLPPFPADVFMVPQYGYLTLNNGSQAVGRSSFYCLEYFPSQMLRTGNNFTFSYTFEDVPFHSSYAHSQSLDRLMNPLIDQYLYYLSRTNTPSGTTTQSRLQFSQAGASDIRDQSRNWLPGPCYRQQRVSKTAADNNNSDYSWTGATKYHLNGRDSLVNPGTAMASHKDDEEKYFPQSGVLIFGKQDSGKTNVDIEKVMITDEEEIRTTNPVATEQYGSVSTNLQSGNTQAATSDVNTQGVLPGMVWQDRDVYLQGPIWAKIPHTDGHFHPSPLMGGFGLKHPPPQILIKSTPVPANPSTTFSAAKFASFITQYSTGQVSVEIEWELQKENSKRWNPEIQYTSNYNKSVNVDFTVDTNGVYSEPRPIGTRYLTRNL

SEQ ID NO: 2549 - protein, 735 aa, Artificial Sequence
  Description of Artificial Sequence: Synthetic polypeptide
MAADGYLPDWLEDTLSEGIRQWWKLKPGPPPPKPAERHKDDSRGLVLPGYKYLGPFNGLDKGEPVNEADAAALEHDKAYDRQLDSGDNPYLKYNHADAEFQERLKEDTSFGGNLARAVFQAKKRVLEPLGLVEEPVKTAPGKKRPVEHSPAGPDSSSGTGKSGQQPARKRLNFGQTGDADSVPDPQPLGQPPAAPSGLGTNTMASGSGAPMADNNEGADGVGNSSGNWHCDSTWMGDRVITTSTRTWALPTYNNHLYKQISSQSGASNDNHYFGYSTPWGYFDFNRFHCHFSPRDWQRLINNNWGFRPKRLNFELFNIQVKEVTQNDGTTTIANNLTSTVQVFTDSEYQLPYVLGSAHQGCLPPFPADVFMVPQYGYLTLNNGSQAVGRSSFYCLEYFPSQMLRTGNNFTFSYTFEDVPFHSSYAHSQSLDRLMNPLIDQYLYYLSRTNTPSGTTTQSRLQFSQAGASDIRDQSRNWLPGPCYRQQRVSKTAADNNNSDYSWTGATKYHLNGRDSLVNPGTAMASHKDDEEKYFPQSGVLIFRKQDSGKTNVDIEKVMITDEEEIRTTNPVATEQYGSVSTNLQSGNTQAATSDVNTQGVLPGMVWQDRDVYLQGPIWAKIPHTDGHFHPSPLMGGFGLKHPPPQILIKSTPVPANPSTTFSAAKFASFITQYSTGQVSVEIEWELQKENSKRWNPEIQYTSNYNKSVNVDFTVDTNGVYSEPRPIGTRYLTRNL

SEQ ID NO: 2550 - protein, 735 aa, Artificial Sequence
  Description of Artificial Sequence: Synthetic polypeptide
MAADGYLPDWLEDTLSEGIRQWWKLKPGPPPPKPAERHKDDSRGLVLPGYKYLGPFNGLDKGEPVNEADAAALEHDKAYDRQLDSGDNPYLKYNHADAEFQERLKEDTSFGGNLARAVFQAKKRVLEPLGLVEEPVKTAPGKKRPVEHSPAEPDSSSGTGKSGQQPARKRLNFGQTGDADSVPDPQPLGQPPAAPSGLGTNTMASGSGAPMADNNEGADGVGNSSGNWHCDSTWMGDRVITTSTRTWALPTYNNHLYKQISSQSGASNDNHYFGYSTPWGYFDFNRFHCHFSPRDWQRLINNNWGFRPKRLNFKLFNIQVKEVTQNDGTTTIANNLTSTVQVFTDSEYQLPYVLGSAHQGCLPPFPADVFMVPQYGYLTLNNGSQAVGRSSFYCLEYFPSQMLRTGNNFTFSYTFEDVPFHSSYAHSQSLDRLMNPLIDQYLYYLSRTNTPSGTTTQSRLQFSQAGASDIRDQSRNWLPGPCYRQQRVSKTAADNNNSDYSWTGATKYHLNGRDSLVNPGTAMASHKDDEEKYFPQSGALIFGKQDSGKTNVDIEKVMITDEEEIRTTNPVATEQYGSVSTNLQSGNTQAATSDVNTQGVLPGMVWQDRDVYLQGPIWAKIPHTDGHFHPSPLMGGFGLKHPPPQILIKNTPVPANPSTTFSAAKFASFITQYSTGQVSVEIEWELQKENSKRWNPEIQYTSNYNKSVNVDFTVDTNGVYSEPRPIGTRYLTRNL

SEQ ID NO: 2551 - protein, 735 aa, Artificial Sequence
  Description of Artificial Sequence: Synthetic polypeptide
MAADGYLPDWLEDTLSEGIRQWWKLKPGPPPPKPAERHKDDSRGLVLPGYKYLGPFNGLDKGEPVNEADAAALEHDKAYDRQLDSGDNPYLKYNHADAEFQERLKEDTSFGGNLARAVFQAKKRVLEPLGLVEEPVKTAPGKKRPVEHSPAEPGSSSGTGKSGQQPARKRLNFGQTGDADSVPDPQPLGQPPAAPSGLGTNTMASGSGAPMADNNEGADGVGNSSGNWHCDSTWMGDRVITTSTRTWALPTYNNHLYKQISSQSGASNDNHYFGYSTPWGYFDFNRFHCHFSPRDWQRLINNNWGFRPKRLNFKLFNIQVKEVTQNDGTTTIANNLTSTVQVFTDSEYQLPYVLGSAHQGCLPPFPADVFMVPQYGYLTLNNGSQAVGRSSFYCLEYFPSQMLRTGNNFTFSYTFEDVPFHSSYARSQSLDRLMNPLIDQYLYYLSRTNTPSGTTTQSRLRFSQAGASDIRDQSRNWLPGPCYRQQRVSKTAADNNNSDYSWTGATKYHLNGRDSLVNPGTAMASHKDDEEKYFPQSGVLIFGKQDSGKTNVDIERVMITDEEEIRTTNPVATEQYGSVSTNLQSGNTQAATSDVNTQGVLPGMVWQDRDVYLQGPIWAKIPHTDGHFHPSPLMGGFGLKHPPPQILIKNTPVPANPSTTFSAAKFASFITQYSTGQVSVEIEWELQKENSKRWNPEIQYTSNYNKSVNVDFTVDTKGVYSEPRPIGTRYLTRNL

SEQ ID NO: 2552 - protein, 735 aa, Artificial Sequence
  Description of Artificial Sequence: Synthetic polypeptide
MAADGYLPDWLEDTLSEGIRQWWKLKPGPPPPKPAERHKDDSRGLVLPGYKYLGPFNGLDKGEPVNEADAAALEHDKAYDRQLDSGDNPYLKYNHADAEFQERLKEDTSFGGNLARAVFQAKKRVLEPLGLVEEPVKTAPGKKRPVEHSPAEPDSSSGTGKSGQQPARKRLNFGQTGDADSVPDPQPLGQPPAAPSGLGTNTMASGSGAPMADNNEGADGVGNSSGNWHCDSTWMGDRVITTSTRTWALPTYNNHLYKQISSQSGASNDNHYFGYSTPWGYFDFNRFHCHFSPRDWQRLINNNWGFRPKRLNFKLFNIQVKEVTQNDGTTTIANNLTSTVQVFTDSEYQLPYVLGSAHQGCLPPFPADVFMVPQYGYLTLNNGSQAVGRSSFYCLEYFPSQMLRTGNNFTFSYTFEDVPFHSSYAHSQSLDRLMNPLIDQYLYYLSRTNTPSGTTTQSRLQFSQAGASDIRDQSRNWLPGPCYRQQRVSKTAADNNNSDYSWTGATKYHLNGRDSLVNPGTAMASHKDDEEKYFPQSGVLIFGKQDSGKTNVDIEKVMITDEEEIRTTNPVATEQYGSVSTNLQSGNTQAATSDVNTQGVLPGMVWQDRDVYLQGPIWAKIPHTDGHFHPSPLMGGFGLKHPPPQILIKSTPVPANPSTTFSAAKFASFITQYSTGQVSVEIEWELQKENSKRWNPEIQYTSNYNKSVNVDFTVDTNGVYSEPRPIGTRYLTRNL

SEQ ID NO: 2553 - protein, 735 aa, Artificial Sequence
  Description of Artificial Sequence: Synthetic polypeptide
MAADGYLPDWLEDTLSEGIRQWWKLKPGPPPPKPAERHKDDSRGLVLPGYKYLGPFNGLDKGEPVNEADAAALEHDKAYDRQLDSGDNPYLKYNHADAEFQERLKEDTSFGGNLARAVFQAKKRVLEPLGLVEEPVKTAPGKKRPVEHSPAELDSSSGTGKSGQQPARKRLNFGQTGDADSVPDPQPLGQPPAAPSGLGTNTMASGSGAPMADNNEGADGVGNSSGNWHCDSTWMGDRVITTSTRTWALPTYNNHLYKQISSQSGASNDNHYFGYSTPWGYFDFNRFHCHFSPRDWQRLINNNWGFRPKRLNFKLFNIQVKEVTQNDGTTTIANNLTSTVQVFTDSEYQLPYVLGSAHQGCLPPFPADVFMVPQYGYLTLNNGSQAVGRSSFYCLEYFPSQMLRTGNNFTFSYTFEDVPFHSSYAHSQSLDRLMNPLIDQYLYYLSRTNTPSGTTTQSRLQFSQAGASDIRDQSRNWLPGPCYRQQRVSKTAADNNNSDYSWTGATKYHLNGRDSLVNPGTAMASHKDDEEKYFPQSGVLIFGKQDSGKTNVDIEKVMITDEEEIRTTNPVATEQYGSVSTNLQSGNTQAATSDVNTQGVLPGMVWQDRDVYLQGPIWAKIPHTDGHFHPSPLMGGFGPKHPPPQILIKNTPVPANPSTTFSAAKFASFITQYSTGQVSVEIEWELQKENSKRWNPEIQYTSNYNKSVNVDFTVDANGVYSEPRPIGTRYLTRNL

SEQ ID NO: 2554 - protein, 735 aa, Artificial Sequence
  Description of Artificial Sequence: Synthetic polypeptide
MAADGYLPDWLEDTLSEGIRQWWKLKPGPPPPKPAERHKDDSRGLVLPGYKYLGPFNGLDKGEPVNEADAAALEHDKAYDRQLDSGDNPYLKYNHADAEFQERLKEDTSFGGNLARAVFQAKKRVLEPLGLVEEPVKTAPGKKRPVEHSPAELDSSSGTGKSGQQPARKRLNFGQTGDADSVPDPQPLGQPPAAPSGLGTNTMASGSGAPMADNNEGADGVGNSSGNWHCDSTWMGDRVITTSTRTWALPTYNNHLYKQISSQSGASNDNHYFGYSTPWGYFDFNRFHCHFSPRDWQRLINNNWGFRPKRLNFKLFNIQVKEVTQNDGTTTIANNLTSTVQVFTDSEYQLPYVLGSAHQGCLPPFPADVFMVPQYGYLTLNNGSQAVGRSSFYCLEYFPSQMLRTGNNFTFSYTFEDVPFHSSYAHSQSLDRLMNPLIDQYLYYLSRTNTPSGTTTQSRLQFSQAGASDIRDQSRNWLPGPCYRQQRVSKTAADNNNSDYSWTGATKYHLNGRDSLVNPGTAMASHKDDEEKYFPQSGVLIFGKQDSGKTNVDIEKVMITDEEEIRTTNPVATEQYGSVSTNLRSGNTQAATSDVNTQGVLPGMVWQDRDVYLQGPIWAKIPHTDGHFHPSPLMGGFGPKHPPPQILIKNTPVPANPSTTFSAAKFASFITQYSTGQVSVEIEWELQKENSKRWNPEIQYTSNYNKSVNVDFTVDTNGVYSEPRPIGTRYLTRNL

SEQ ID NO: 2555 - protein, 735 aa, Artificial Sequence
  Description of Artificial Sequence: Synthetic polypeptide
MAADGYLPDWLEDTLSEGIRQWWKLKPGPPPPKPAERHKDDSRGLVLPGYKYLGPFNGLDKGEPVNEADAAALEHDKAYDRQLDSGDNPYLKYNHADAEFQERLKEDTPFGGNLARAVFQAKKRVLEPLGLVEEPVKTAPGKKRPVEHSPAELDSSSGTGKSGQQPARKRLNFGQTGDADSVPDPQPLGQPPAAPSGLGTNTMASGSGAPMADNNEGADGVGNSSGNWHCDSTWMGDRVITTSTRTWALPTYNNHLYKQISSQSGASNDNHYFGYSTPWGYFDFNRFHCHFSPRDWQRLINNNWGFRPKGLNFKLFNIQVKEVTQNDGTTTIANNLTSTVQVFTDSEYQLPYVLGSAHQGCLPPFPADVFMVPQYGYLTLNNGSQAVGRSSFYCLEYFPSQMLRTGNNFTFSYTFEDVPFHSSYAHSQSLDRLMNPLIDQYLYYLSRTNTPSGTTTQSRLQFSQAGASDIRDQSRNWLPGPCYRQQRVSKTAADNNNSDYSWTGATKYHLNGRDSLVNPGTAMASHKDDEEKYFPQSGVLIFGKQDSGKTNVDIEKVMITDEEEIRTTNPVATEQYGSVSTNLQSGNTQAATSDVNTQGVLPGMVWQDRDVYLQGPIWAKIPHTDGHFHPSPLMGGFGPKHPPPQILIKNTPVPANPSTTFSAAKFASFITQYSTGQVSVEIEWELQKENSKRWNPEIQYTSNYNKSVNVDFTVDTNGVYSEPRPIGTRYLTRNL

SEQ ID NO: 2556 - protein, 735 aa, Artificial Sequence
  Description of Artificial Sequence: Synthetic polypeptide
MAADGYLPDWLEDTLSEGIRQWWKLKPGPPPPKPAERHKDDSRGLVLPGYKYLGPFNGLDKGEPVNEADAAALEHDKAYDRQLDSGDNPYLKYNHADAEFQERLKEDTSFGGNLARAVFQAKKRVLEPLGLVEEPVKTAPGKKRPVEHSPAELDSSSGTGKSGQQPARKRLNFGQTGDADSVPDPQPLGQPPAAPSGLGTNTMASGSGAPMADNNEGADGVGNSSGNWHCDSTWMGDRVITTSTRTWALPTYNNHLYKQISSQSGASNDNHYLGYSTPWGYFDFNRFHCHFSPRDWQRLINNNWGFRPKRLNFKLFNIQVKEVTQNDGTTTIANNLTSTVQVFTDSEYQLPYVLGSAHQGCLPPFPADVFMVPQYGYLTLNNGSQAVGRSSFYCLEYFPSQMLRTGNNFTFSYTFEDVPFHSSYAHSQSLDRLMNPLIDQYLYYLSRTNTPSGTTTQSRLQFSQAGASGIRDQSRNWLPGPCYRQQRVSKTAADNNNSDYSWTGATKYHLNGRDSLVNPGTAMASHKDDEEKYFPQSGVLIFGKQDSGKTNVDIEKVMITDEEEIRTTNPVATEQYGSVSTNLQSGNTQAATSDVNTQGVLPGMVWQDRDVYLQGPIWAKIPHTDGHFHPSPLMGGFGPKHPPPQILIKNTPVPANPSTTFSAAKFASFITQYSTGQVSVEIEWELQKGNSKRWNPEIQYTSNYNKSVNVDFTVDTNGVYSEPRPIGTRYLTRNL

SEQ ID NO: 2557 - protein, 735 aa, Artificial Sequence
  Description of Artificial Sequence: Synthetic polypeptide
MAADGYLPDWLEDTLSEGIRQWWKLKPGPPPPKPAERHKDDSRGLVLPGYKYLGPFNGLDKGEPVNEADAAALEHDKAYDRQLDSGDNPYLKYNHADAEFQERLKEDTSFGGNLARAVFQAKKRVLEPLGLVEEPVKTAPGKKRPVEHSPAELDSSSGTGKSGQQPARKRLNFGQTGDADSVPDPQPLGQPPAAPSGLGTNTMASGSGAPMADNNEGADGVGNSSGNWHCDSTWMGDRVITTSTRTWALPTYNNHLYKQISSQSGASNDNHYFGYSTPWGYFDFNRFHCHFSPRDWQRLINNNWGFRPKRLNFKLFNIQVKEVTQNDGTTTIANNLTSTVQVFTDSEYQLPYVLGSAHQGCLPPFPADVFMVPQYGYLTLNNGSQAVGRSSFYCLEYFPSQMLRTGNNFTFSYTFEDVPFHSSYAHSQSLDRLMNPLIDQYLYYLSRTNTPSGTTTQSRLQFSQAGASDIRDQSRNWLPGPCYRQQRVSKTAADNNNSDYSWTGATKYHLNGRDSLVNPGTAMASHKDDEEKYFPQSGVLIFGKQDSGKTNVDIEKVMITDEEEIRTTNPVATEQYGSVSTNLQSGNTQAATSDVNTQGVLPGMVWQDRDVYLQGPIWAKIPHTDGHFHPSPLMGGFGPKHPPPQILIKNTPVPANPSTTFSAAKFASFITQYSTGQVSVEIEWELQKENSKRWNPEIQYTSNYNKSVNVDFTVDTNGVYSEPRPIGTRYPTRNL

SEQ ID NO: 2558 - protein, 735 aa, Artificial Sequence
  Description of Artificial Sequence: Synthetic polypeptide
MAADGYLPDWLEDTLSEGIRQWWKLKPGPPPPKPAERHKDDSRGLVLPGYKYLGPFNGLDKGEPVNEADAAALEHDKAYDRQLDSGDNPYLKYNHADAEFQERLKEDTSFGGNLARAVFQAKKRVLEPLGLVEEPVKTAPGKKRPVEHSPAELDSSSGTGKSGQQPARKRLNFGQTGDADSVPDPQPLGQPPAAPSGLGTNTMASGSGAPMADNNEGADGVGNSSGNWHCDSTWMGDRVITTSTRTWALPTYNNHLYKQISSQSGASNDNHYFGYSTPWGYFDFNRFHCHFSPRDWQRLINNNWGFRPKRLNFKLFNIQVKEVTQNDGTTTIANNLTSTVQVFTDSEYQLPYVLGSAHQGCLPPFPADVFMVPQYGYLTLNNGSQAVGRSSFYCLEYFPSQMLRTGNNFTFSYTFEDVPFHSSYAHSQSLDRLMNPLIDQYLYYLSRTNTPSGTTTQSRLQFSQAGASDIRDQSRNWLPGPCYRQQRVSKTAADNNNSDYSWTGATKYHLNGRDSLVNPGTAMASHKDDEEKYFPQSGVLIFGKQDSGKTNVDIEKVMITDEEEIRTTNPVATEQYGSVSTNLQSGNTQAATSDVNTQGVLPGMVWQDRDVYLQGPIWAKIPHTDGHFHPSPLMGGFGPKHPPPQILIKNTPVPANPSTTFSAAKLASFITQYSTGQVSVEIEWELQKENSKRWNPEIQYTSNYNKSVNVDFTVDTNGVYSEPRPIGTRYLTRNL

SEQ ID NO: 2559 - protein, 735 aa, Artificial Sequence
  Description of Artificial Sequence: Synthetic polypeptide
MAADGYLPDWLEDTLSEGIRQWWKLKPGPPPPKPAERHKDDSRGLVLPGYKYLGPFNGLDKGEPVNEADAAALEHDKAYDRQLDSGDNPYLKYNHADAEFQERLKEDTSFGGNLARAVFQAKKRVLEPLGLVEEPVKTAPGKKRPVEHSPAELDSSSGTGKSGQQPARKRLNFGQTGDADSVPDPQPLGQPPAAPSGLGTNTMASGSGAPMADNNEGADGVGNSSGNWHCDSTWMGDRVITTSTRTWALPTYNNHLYKQISSQSGASNDNHYFGYSTPWGYFDFNRFHCHFSPRDWQRLINNNWGFRPKRLNFKLFNIQVKEVTQNDGTTTIANNLTSTVQVFTDSEYQLPYVLGSAHQGCLPPFPADVFMVPQYGYLTLNNGSQAVGRSSFYCLEYFPSQMLRTGNNFTFSYTFEDVPFHSSYAHSQSLDRLMNPLIDQYLYYLSRTNTPSGTTTQSRLQFSQAGASDIRDQSRNWLPGPCYRQQRVSKTAADNNNSDYSWTGATKYHLNGRDSLVNPGTAMASHKDDEEKYFPQSGVLIFGKQDSGKTNVDIEKVMITDEEEIRTTNPVATEQYGSVSTNLQSGNTQAATSDVNTQGVLPGMVWQDRDVYLQGPIWAKIPHTDGHFHPSPLMGGFGPKHPPPQILIKNTPVPANPSTTFSAAKFASFTTQYSTGQVSVEIEWELQKENSKRWNPEIQYTSNYNKSVNVDFTVDTNGVYSEPRPIGTRYLTRNL

SEQ ID NO: 2560 - protein, 735 aa, Artificial Sequence
  Description of Artificial Sequence: Synthetic polypeptide
MAADGYLPDWLEDTLSEGIRQWWKLKPGPPPPKPAERHKDDSRGLVLPGYKYLGPFNGLDKGEPVNEADAAALEHDKAYDRQLDSGDNPYLKYNHADAEFQERLKEDTSFGGNLARAVFQAKKRVLEPLGLVEEPVKTAPGKKRPVEHSPAELDSSSGTGKSGQQPARKRLNFGQTGDADSVPDPQPLGQPPAAPSGLGTNTMASGSGAPMADNNEGADGVGNSSGNWHCDSTWMGDRVITTSTRTWALPTYNNHLYKQISSQSGASNDNHYFGYSTPWGYFDFNRFHCHFSPRDWQRLINNNWGFRPKRLNFKLFNIQVKEVTQNDGTTTIANNLTSTVQVFTDSEYQLPYVLGSAHQGCLPPFPADVFMVPQYGYLTLNNGSQAVGRSSFYCLEYFPSQMLRTGNNFTFSYTFEDVPFHSSYAHSQSLDRLMNPLIDQYLYYLSRTNTPSGTTTQSRLQFSQAGASDIRDQSRNWLPGPCYRQQRVSKTAADNNNSDYSWTGATKYHLNGRDSLVNPGTAMASHKDDEEKYFPRSGVLIFGKQDSGKTNVDIEKVMITDEEEIRTTNPVATEQYGSVSTNLQSGNTQAATSDVNTQGVLPGMVWQDRDVYLQGPIWAKIPHTDGHFHPSPLMGGFGPKHPPPQILIKNTPVPANPSTTFSAAKFASFITQYSTGQVSVEIEWELQKENSKRWNPEIQYTSNYNKSVNVDFTVDTNGVYSEPRPIGTRYLTRNL

SEQ ID NO: 2561 - protein, 735 aa, Artificial Sequence
  Description of Artificial Sequence: Synthetic polypeptide
MAADGYLPDWLEDTLSEGIRQWWKLKPGPPPPKPAERHKDDSRGLVLPGYKYLGPFNGLDKGEPVNEADAAALEHDKAYDRQLDSGDNPYLKYNHADAEFQERLKEDTSFGGNLARAVFQAKKRVLEPLGLVEEPVKTAPGKKRPVEHSPAELDSSSGTGKSGQQPARKRLNFGQTGDADSVPDPQPLGQPPAAPSGLGTNTMASGSGAPMADNNEGADGVGNSSGNWHCDSTWMGDRVITTSTRTWALPTYNNHLYKQISSQSGASNDNHYFGYSTPWGYFDFNRFHCHFSPRDWQRLINNNWGFRPKRLNFKLFNIQVKEVTQNDGTATIANNLTSTVQVFTDSEYQLPYVLGSAHQGCLPPFPADVFMVPQYGYLTLNNGSQAVGRSSFYCLEYFPSQMLRTGNNFTFSYTFEDVPFHSSYAHSQSLDRLMNPLIDQYLYYLSRTNTPSGTTTQSRLQFSQAGASDIRDQSRNWLPGPCYRQQRVSKTAADNNNSDYSWTGATKYHLNGRDSLVNPGTAMASHKDDEEKYFPQSGVLIFGKQDSGKTNVDIEKVMITDEEEIRTTNPVATEQYGSVSTNLQSGNTQAATSDVNTQGVLPGMVWQDRDVYLQGPIWAKIPHTDGHFHPSPLMGGFGPKHPPPQILIKNTPVPANPSTTFSAAKFASFITQYSTGQVSVEIEWELQKENSKRWNPEIQYTSNYNKSVNVDFTVDTNGVYSEPRPIGTRYLTRNL

SEQ ID NO: 2562 - protein, 735 aa, Artificial Sequence
  Description of Artificial Sequence: Synthetic polypeptide
MAADGYLPDWLEDTLSEGIRQWWKLKPGPPPPKPAERHKDDSRGLVLPGYKYLGPFNGLDKGEPVNEADAAALEHDKAYDRQPDSGDNPYLKYNHADAEFQERLKEDTSFGGNLARAVFQAKKRVLEPLGLVEEPVKTAPGKKRPVEHSPAELDSSSGTGKSGQQPARKRLNFGQTGDADSVPDPQPLGQPPAAPSGLGTNTMASGSGAPMADNNEGADGVGNSSGNWHCDSTWMGDRVITTSTRTWALPTYNNHLYKQISSQSGASNDNHYFGYSTPWGYFDFNRFHCHFSPRDWQRLINNNWGFRPKRLNFKLFNIQVKEVTQNDGTTTIANNLTSTVQVFTDSEYQLPYVLGSAHQGCLPPFPADVFMVPQYGYLTLNNGSQAVGRSSFYCLEYFPSQMLRTGNNFTFSYTFEDVPFHSSYAHSQSLDRLMNPLIDQYLYYLSRTNTPSGTTTQSRLQFSQAGASDIRDQSRNWLPGPCYRQQRVSKTAADNNNSDYSWTGATKYHLNGRDSLVNPGTAMASHKDDEEKYFPQSGVLIFGKQDSGKTNVDIEKVMITDEEEIRTTNPVATEQYGSVSTNLQSGNTQAATSDVNTQGVLPGMVWQDRDVYLQGPIWAKIPHTDGHFHPSPLMGGFGPKHPPPQILIKNTPVPANPSTTFSAAKFASFITQYSTGQVSVEIEWELQKENSKRWNPEIQYTSNYNKSVNVDFTVDTNGVYSEPRPIGTRYLTRNL

SEQ ID NO: 2563 - protein, 735 aa, Artificial Sequence
  Description of Artificial Sequence: Synthetic polypeptide
MAADGYLPDWLEDTLSEGIRQWWKLEPGPPPPKPAERHKDDSRGLVLPGYKYLGPFNGLDKGEPVNEADAAALEHDKAYDRQLDSGDNPYLKYNHADAEFQERLKEDTPFGGNLARAVFQAKKRVLEPLGLVEEPVKTAPGKKRPVEHSPAELDSSSGTGKSGQQPARKRLNFGQTGDADSVPDPQPLGQPPAAPSGLGTNTMASGSGAPMADNNEGADGVGNSSGNWHCDSTWMGDRVITTSTRTWALPTYNNHLYKQISSQSGASNDNHYFGYSTPWGYFDFNRFHCHFSPRDWQRLINNNWGFRPKRLNFKLFNIQVKEVTQNDGTTTIANNLTSTVQVFTDSEYQLPYVLGSAHQGCLPPFPADVFMVPQYGYLTLNNGSQAVGRSSFYCLEYFPSQMLRTGNNFTFSYTFEDVPFHSSYAHSQSLDRLMNPLIDQYLYYLSRTNTPSGTTTQSRLQFSQAGASDIRDQSRNWLPGPCYRQQRVSKTAADNNNSDYSWTGATKYHLNGRDSLVNPGTAMASHEDDEEKYFPQSGVLIFGKQDSGKTNVDIEKVMITDEEEIRTTNPVATEQYGSVSTNLQSGNTQAATSDVNTQGVLPGMVWQDRDVYLQGPIWAKIPHTDGHFHPSPLMGGFGPKHPPPQILIKNTPVPANPSTTFSAAKFASFITQYSTGQVSVEIEWELQKENSKRWNPEIQYTSNYNKSVNVDFTVDTNGVYSEPRPIGTRYLTRNL

SEQ ID NO: 2564 - protein, 734 aa, Artificial Sequence
  Description of Artificial Sequence: Synthetic polypeptide
MAADGYLPDWLEDTLSEGIRQWWKLKPGPPPPKPAERHKDDSRGLVLPGYKYLGPFNGLDKGEPVNEADAAALEHDKAYDRQLDSGDNPYLKYNHADAEFQERLKEDTSFGGNLARAVFQAKKRVLEPLGLVEEPVKTAPGKKRPVEHSPAELDSSSGTGKSGQQPARKRLNFGQTGDADSVPDPQPLGQPPAAPSGLGTNTMASGSGAPMADNNEGADGVGNSSGNWHCDSTWMGDRVITTSTRTWALPTYNNHLYKQISSQSGASNDNHYFGYSTPWGYFDFNRFHCHFSPRDWQRLINNNWGFRPKRLNFKLFNIQVKEVTQNDGTTTIANNLTSTVQVFTDSEYQLPYVLGSAHQGCLPPFPADVFMVPQYGYLTLNNGSQAVGRSSFYCLEYFPSQMLRTGNNFTFSYTFEDVPFHSSYAHSQSLDRLMNPLIDQYLYYLSRTNTPSGTTTQSRLQFSQAGASDIRDQSRNWLPGPCYRQQRVSKTAADNNSDYSWTGATKYHLNGRDSLVNPGTAMASHKDDEEKYFPQSGVLIFGKQDSGKTNVDIEKVMITDEEEIRTTNPVATEQYGSVSTNLQSGNTQAATSDVNTQGVLPGMVWQDRDVYLQGPIWAKIPHTDGHFHPSPLMGGFGPKHPPPQILIKNTPVPANPSTTFSAAKFASFITQYSTGQVSVEIEWELQKENSKRWNPEIQYTSNYNKSVNVDFTVDTNGVYSEPRPIGTRYLTRNL

SEQ ID NO: 2565 - protein, 735 aa, Artificial Sequence
  Description of Artificial Sequence: Synthetic polypeptide
MAADGYLPDWLEDTLSEGIRQWWKLKPGPPPPKPAERHKDDSRGLVLPGYKYLGPFNGLDKGEPVNEADAAALEHDKAYDRQLDSGDNPYLKYNHADAEFQERLKEDTPFGGNLARAVFQAKKRVLEPLGLVEEPVKTAPGKKRPVEHSPAELDSSSGTGKSGQQPARKRLNFGQTGDADSVPDPQPLGQPPAAPSGLGTNTMASGSGAPMADNNEGADGVGNSSGNWHCDSTWMGDRVITTSTRTWALPTYNNHLYKQISSQSGASNDNHYFGYSTPWGYFDFNRFHCHFSPRDWQRLINNNWGFRPKRLNFKLFNIQVKEVTQNGGTTTIANNLTSTVQVFTDSEYQLPYVLGSAHQGCLPPFPADVFMVPQYGYLTLNNGSQAVGRSSFYCLEYFPSQMLRTGNNFTFSYTFEDVPFHSSYAHSQSLDRLMNPLIDQYLYYLSRTNTPSGTTTQSRLQFSQAGASDIRDQSRNWLPGPCYRQQRVSKTAADNNNSDYSWTGATKYHLNGRDSLVNPGTAMASHKDDEEKYFPQSGVLIFGKQDSGKTNVDIEKVMITDEEEIRTTNPVATEQYGSVSTNLQSGNTQAATSDVNTQGVLPGMVWQDRDVYLQGPIWAKIPHTDGHFHPSPLMGGFGPKHPPPQILIKNTPVPANPSTTFSAAKFASFITQYSTGQVSVEIEWELQKENSKRWNPEIQYTSNYNKSVNVDFTVDTNGVYSEPRPIGTRYLTRNL

SEQ ID NO: 2566 - protein, 735 aa, Artificial Sequence
  Description of Artificial Sequence: Synthetic polypeptide
MAADGYLPDWLEDTLSEGIRQWWKLKPGPPPPKPAERHKDDSRGLVLPGYKYLGPFNGLDKGEPVNEADAAALEHDKAYDRQLDSGDNPYLKYNHADAEFQERLKEDTSFGGNLARAVFQAKKGVLEPLGLVEEPVKTAPGKKRPVEHSPAELDSSSGTGKSGQQPARKRLNFGQTGDADSVPDPQPLGQPPAAPSGLGTNTMASGSGAPMADNNEGADGVGNSSGNWHCDSTWMGDRVITTSTRTWALPTYNNHLYKQISSQSGASNDNHYFGYSTPWGYFDFNRFHCHFSPRDWQRLINNNWGFRPKRLNFKLFNIQVKEVTQNDGTTTIANNLTSTVQVFTDSEYQLPYVLGSAHQGCLPPFPADVFMVPQYGYLTLNNGSQAVGRSSFYCLEYFPSQMLRTGNNFTFSYTFEDVPFHSSYAHSQSLDRLMNPLIDQYLYYLSRTNTPSGTTTQSRLQFSQAGASDIRDQSRNWLPGPCYRQQRVSKTAADNNNSDYSWTGATKYHLNGRDSLVNPGTAMASHKDDEEKYFPQSGVLIFGKQDSGKTNVDIEKVMITDEEEIRTTNPVATEQYGSVSTNLQSGNTQAATSDVNTQGVLPGMVWQDRDVYLQGPIWAKIPHTDGHFHPSPLMGGFGPKHPPPQILIKNTPVPANPSTTFSAAKFASFITQYSTGQVSVEIEWELQKENSKRWNPEIQYTSNYNKSVNVDFTVDTNGVYSEPRPIGTRYLTRNL

SEQ ID NO: 2567 - protein, 735 aa, Artificial Sequence
  Description of Artificial Sequence: Synthetic polypeptide
MAADGYLPDWLEDTLSEGIRQWWKLKPGPPPPKPAERHKDDSRGLVLPGYKYLGPFNGLDKGEPVNEADAAALEHDKAYDRQLDSGDNPYLKYNHADAEFQERLKEDTSFGGNLARAVFQAKKRVLEPLGLVEEPVKTAPGKKRPVEHSPAELDSSSGTGKSGQQPARKRLNFGQTGDADSVPDPQPLGQPPAAPSGLGTNTMASGSGAPMADNNEGADGVGNSSGNWHCDSTWMGDRVITTSTRTWALPTYNNHLYKQISSQSGASNDNHYFGYSTPWGYFDFNRFHCHFSPRDWQRLINNNWGFRPKRLNFKLFNIQVKEVTQNDGTTTIANNLTSTVQVFTDSEYQLPYVLGSAHQGCLPPFPADVFMVPQYGYLTLNNGSQAVGRSSFYCLEYFPSQMLRTGNNFTFSYTFEDVPFHSSYAHSQSLDRLMNPLIDQYLYYLSRTNTPSGTTTQSRLQFSQAGASDIRDQSRNWLPGPCYRQQRVSKTAADNNNSDYSWTGATKYHLNGRDSLVNPGTAMASHKDDEEKYFPQSGVLIFGKQDSGKTNVDIEKVMITDEEEIRTTNPVATEQYGSVSTNLQSGNTQAATSDVNTQGVLPGMVWQDRDVYLQGPIWARIPHTDGHFHPSPLMGGFGPKHPPPQILIKNTPVPANPSTTFSAAKFASFITQYSTGQVSVEIEWELQKENSKRWNPEIQYTSNYNKSVNVDFTVDTNGVYSEPRPIGTRYLTRNL

SEQ ID NO: 2568 - protein, 735 aa, Artificial Sequence
  Description of Artificial Sequence: Synthetic polypeptide
MAADGYLPDWLEDTLSEGIRQWWKLKPGPPPPKPAERHKDDSRGLVLPGYKYLGPFNGLDKGEPVNEADAAALEHDKAYDRQLDSGDNPYLKYNHADAEFQERLKEDTSFGGNLARAVFQAKKRVLEPLGLVEEPVKTAPGKKRPVGHSPAELDSSSGTGKSGQQPARKRLNFGQTGDADSVPDPQPLGQPPAAPSGLGTNTMASGSGAPMADNNEGADGVGNSSGNWHCDSTWMGDRVITTSTRTWALPTYNNHLYKQISSQSGASNDNHYFGYSTPWGYFDFNRFHCHFSPRDWQRLINNNWGFRPKRLNFKLFNIQVKEVTQNDGTTTIANNLTSTVQVFTDSEYQLPYVLGSAHQGCLPPFPADVFMVPQYGYLTLNNGSQAVGRSSFYCLEYFPSQMLRTGNNFTFSYTFEDVPFHSSYAHSQSLDRLMNPLIDQYLYYLSRTNTPSGTTTQSRLQFSQAGASDIRDQSRNWLPGPCYRQQRVSKTAADNNNSDYSWTGATKYHLNGRDSLVNPGTAMASHKDDEEKYFPQSGVLIFGKQDSGKTNVDIEKVMITDEEEIRTTNPVATEQYGSVSTNLQSGNTQAATSDVNTQGVLPGMVWQDRDVYLQGPIWAKIPHTDGHFHPSPLMGGFGPKHPPPQILIKNTPVPANPSTTFSAAKFASFITQYSTGQVSVEIEWELQKENSKRWNPEIQYTSNYNKSVNVDFTVDTNGVYSEPRPIGTRYLTRNL

SEQ ID NO: 2569 - protein, 735 aa, Artificial Sequence
  Description of Artificial Sequence: Synthetic polypeptide
MAADGYLPDWLEDTLSEGIRQWWKLKPGPPPPKPAERHKDDSRGLVLPGYKYLGPFNGLDKGEPVNEADAAALEHDKAYDRQLDSGDNPYLKYNHADAEFQERLKEDTSFGGNLARAVFQAKKRVLEPLGLVEEPVKTAPGKKRPVEHSPAELDSSSGTGKSGQQPARKRLNFGQTGDADSVPDPQPLGQPPAAPSGLGTNTMASGSGAPMADNNEGADGVGNSSGNWHCDSTWMGDRVITTSTRTWALPTYNNHLYKQISSQSGASNDNHYFGYSTPWGYFDFNRFHCHFSPRDWQRLINNNWGFRPKRLNFKLFNIQVKEVTQNDGTTTIANNLTSTVQVFTDSEYQLPYVLGSAHQGCLPPFPADVFMVPQYGYLTLNNGSQAVGRSSFYCLEYFPSQMLRTGNNFTFSYTFEDVPFHSSYAHSQSLDRLMNPLIDQYLYYLSRTNTPSGTTTQSRLQFSQAGASDIRDQSRNWLPGPCYRQQRVSKTAADNNNSDYSWTGATKYHLNGRDSLVNPGTAMASHKDDEEKYFPQSGVLIFGKQDSGKTNVDIEKVMITDEEEIRTTNPVATEQYGSVSTNLQSGNTQAATSDVNTQGVLPGMVWQDRDVYLQGPIWAKIPHTDGHFHPSPLMGGFGPKHPPPQILIKNTPVPANPSTTFSAAKFASFITQYSTGQVSVEIEWELQKGNSKRWNPEIQYTSNYNKSVNVDFTVDTNGVYSEPRPIGTRYLTRNL

SEQ ID NO: 2570 - protein, 735 aa, Artificial Sequence
  Description of Artificial Sequence: Synthetic polypeptide
MAADGYLPDWLEDTLSEGIRQWWKLKPGPPPPKPAERHKDDSRGLVLPGYKYLGPFNGLDKGEPVNEADAAALEHDKAYDRQLDSGDNPYLKYNHADAEFQERLKEDTPFGGNLARAVFQAKKRVLEPLGLVEEPVKTAPGKKGPVEHSPAELDSSSGTGKSGQQPARKRLNFGQTGDADSVPDPQPLGQPPAAPSGLGTNTMASGSGAPMADNNEGADGVGNSSGNWHCDSTWMGDRVITTSTRTWALPTYNNHLYKQISSQSGASNDNHYFGYSTPWGYFDFNRFHCHFSPRDWQRLINNNWGFRPKRLNFKLFNIQVKEVTQNDGTTTIANNLTSTVQVFTDSEYQLPYVLGSAHQGCLPPFPADVFMVPQYGYLTLNNGSQAVGRSSFYCLEYFPSQMLRTGNNFTFSYTFEDVPFHSSYAHSQSLDRLMNPLIDQYLYYLSRTNTPSGTTTQSRLQFSQAGASDIRDQSRSWLPGPCYRQQRVSKTAADNNNSDYSWTGATKYHLNGRDSLVNPGTAMASHKDDEEKYFPQSGVLIFGKQDSGKTNVDIEKVMITDEEEIRTTNPVATEQYGSVSTNLQSGNTQAATSDVNTQGVLPGMVWQDRDVYLQGPIWAKIPHTDGHFHPSPLMGGFGPKHPPPQILIKNTPVPANPSTTFSAAKFASFITQYSTGQVSVEIEWELQKENSKRWNPEIQYTSNYNKSVNVDFTMDTNGVYSEPRPIGTRYLTRNL

SEQ ID NO: 2571 - protein, 735 aa, Artificial Sequence
  Description of Artificial Sequence: Synthetic polypeptide
MAADGYLPDWLEDTLSEGIRQWWKLKPGPPPPKPAERHKDDSRGLVLPGYKYLGPFNGLDKGEPVNEADAAALEHDKAYDRQLDSGDNPYLKYNHADAEFQERLKEDTSFGGNLARAVFQAKKRVLEPLGLVEEPVKTAPGKKRPVEHSPAELDSSSGTGKSGQQPARKRLNFGQTGDADSVPDPQPLGQPPAAPSGLGTNTMASGSGAPMADNNEGADGVGNSSGNWHCDSTWMGDRVITTSTRTWALPTYNNHLYKQISSQSGASNDNHYFGYSTPWGYFDFNRFHCHFSPRDWQRLINNNWGFRPKRLNFKLFNIQVKEVTQNDGTTTIANNLTSTVQVFTDSEYQLPYVLGSAHQGCLPPFPADVFMVPQYGYLTLNNGSQAVGRSSFYCLEYFPSQMLRTGNNFTFSYTFEDVPFHSSYAHSQSLDRLMNPLIDQYLYYLSRTNTPSGTTTQSRLQFSQAGASDIRDQSRNWLPGPCYRQQRVSKTAADNNNSDYSWTGATKYHLNGRDSLVNPGTAMASHKDDEEKYFPQSGVLIFGKQDSGKTNADIEKVMITDEEEIRTTNPVATEQYGSVSTNLQSGNTQAATSDVNTQGVLPGMVWQDRDVYLQGPIWAKIPHTDGHFHPSPLMGGFGPKHPPPQILIKNTPVPANPSTTFSAAKFASFITQYSTGQVSVEIEWELQKENSKRWNPEIQYTSNYNKSVNVDFTVDTNGVYSEPRPIGTRYLTRNL

SEQ ID NO: 2572 - protein, 735 aa, Artificial Sequence
  Description of Artificial Sequence: Synthetic polypeptide
MAADGYLPDWLEDTLSEGIRQWWKLKPGPPPPKPAERHKDDSRGLVLPGYKYLGPFNGLDKGEPVNEADAAALEHDKAYDRQLDSGDNPYLKYNHADAEFQERLKEDTSFGGNLARAVFQAKKRVLEPLGLVEEPVKTAPGKKRPVEHSPAELDSSSGTGKSGQQPARKRLNFGQTGDADSVPDPQPLGQPPAAPSGLGTNTMASGSGAPMADNNEGGDGVGNSSGNWHCDSTWMGDRVITTSTRTWALPTYNNHLYKQISSQSGASNDNHYFGYSTPWGYFDFNRFHCHFSPRDWQRLINNNWGFRPKRLNFKLFNIQVKEVTQNDGTTTIANNLTSTVQVFTDSEYQLPYVLGSAHQGCLPPFPADVFMVPQYGYLTLNNGSQAVGRSSFYCLEYFPSQMLRTGNNFTFSYTFEDVPFHSSYAHSQSLDRLMNPLIDQYLYYLSRTNTPSGTTTQSRLQFSQAGASDIRDQSRNWLPGPCYRQQRVSKTAADNNNSDYSWTGATKYHLNGRDSLVNPGTAMASHKDDEEKYFPQSGVLIFGKQDSGKTNVDIEKVMITDEEEIRTTNPVATEQYGSVSTNLQSGNTQAATSDVNTQGVLPGMVWQDRDVYLQGPIWAKIPHTDGHFHPSPLMGGFGPKHPPPQILIKNTPVPANPSTTFSAAKFASFITQYSTGQVSVEIEWELQKENSKRWNPEIQYTSNYNKSVNVDFTVDTNGVYSEPRPIGTRYLTRNL

SEQ ID NO: 2573 - protein, 735 aa, Artificial Sequence
  Description of Artificial Sequence: Synthetic polypeptide
MAADGYLPDWLEDTLSEGIRQWWKLKPGPPPPKPAERHKDDSRGLVLPGYKYLGPFNGLDKGEPVNEADAAALEHDKAYDRQLDSGDNPYLKYNHADAEFQERLKEDTSFGGNLARAVFQAKKRVLEPLGLVEEPVKTAPGKKRPVEHSPAELDSSSGTGKSGQQPARKRLNFGQTGDADSVPDPQPLGQPPAAPSGLGTNTMASGSGAPMADNNEGADGVGNSSGNWHCDSTWMGDRVITTSTRTWALPTYNNHLYKQISSQSGASNDNHYFGYSTPWGYFDFNRFHCHFPPRDWQRLINNNWGFRPKRLNFKLFNIQVKEVTQNDGTTTIANNLTSTVQVFTDSEYQLPYVLGSAHQGCLPPFPADVFMVPQYGYLTLNNGSQAVGRSSFYCLEYFPSQMLRTGNNFTFSYTFEDVPFHSSYAHSQSLDRLMNPLIDQYLYYLSRTNTPSGTTTQSRLQFSQAGASDIRDQSRNWLPGPCYRQQRVSKTAADNNNSDYSWTGATKYHLNGRDSLVNPGTAMASHKDDEEKYFPQSGVLIFGKQDSGKTNVDIEKVMITDEEEIRTTNPVATEQYGSVSTNLQSGNTQAATSDVNTQGVLPGMVWQDRDVYLQGPIWAKIPHTDGHFHPSPLMGGFGPKHPPPQILIKNTPVPANPSTTFSAAKFASFITQYSTGQVSVEIEWELQKENSKRWNPEIQYTSNYNKSVNVDFTVDTNGVYSEPRPIGTRYLTRNL

SEQ ID NO: 2574 - protein, 735 aa, Artificial Sequence
  Description of Artificial Sequence: Synthetic polypeptide
MAADGYLPDWLEDTLSEGIRQWWKLKPGPPPPKPAERHKDDSRGLVLPGYKYLGPFNGLDKGEPVNEADAAALEHDKAYDRQLDSGDNPYLKYNHADAEFQERLKEDTSFGGNLARAVFQAKKRVLEPLGLVEEPVKTAPGKKRPVEHSPAELDSSSGAGKSGQQPARKRLNFGQTGDADSVPDPQPLGQPPAAPSGLGTNTMASGSGAPMADNNEGADGVGNSSGNWHCDSTWMGDRVITTSTRTWALPTYNNHLYKQISSQSGASNDNHYLGYSTPWGYFDFNRFHCHFSPRDWQRLINNNWGFRPKRLNFKLFNIQVKEVTQNDGTTTIANNLTSTVQVFTDSEYQLPYVLGSAHQGCLPPFPADVFMVPQYGYLTLNNGSQAVGRSSFYCLEYFPSQMLRTGNNFTFSYTFEDVPFHSSYAHSQSLDRLMNPLIDQYLYYLSRTNTPSGTTTQSRLQFSQAGASDIRDQSRNWLPGPCYRQQRVSKTAADNNNSDYSWTGATKYHLNGRDSLVNPGTAMASHKDDEEKYFPQSGVLIFGKQDSGKTNVDIEKVMITDEEEIRTTNPVATEQYGSVSTNLQSGNTQAATSDVNTQGVLPGMVWQDRDVYLQGPIWAKIPHTDGHFHPSPLMGGFGPKHPPPQILIKNTPVPANPSTTFSAAKFASFITQYSTGQVSVEIEWELQKENSKRWNPEIQYTSNYNKSVNVDFTVDTNGVYSEPRPIGTRYLTRNL

SEQ ID NO: 2575 - protein, 735 aa, Artificial Sequence
  Description of Artificial Sequence: Synthetic polypeptide
MAADGYLPDWLEDTLSEGIRQWWKLKPGPPPPKPAERHKDDSRGLVLPGYKYLGPFNGLDKGEPVNEADAAALEHDKAYDRQLDSGDNPYLKYNHADAEFQERLKEDTPFGGNLARAVFQAKKRVLEPLGLVEEPVKTAPGKKRPVEHSPAELDSSSGTGKSGQQPARKRLNFGQTGDADSVPDPQPLGQPPAAPSGLGTNTMVSGSGAPMADNNEGADGVGNSSGNWHCDSTWMGDRVITTSTRTWALPTYNNHLYKQISSQSGASNDNHYFGYSTPWGYFDFNRFHCHFSPRDWQRLINNNWGFRPKRLNFKLFNIQVKEVTQNDGTTTIANNLTSTVQVFTDSEYQLPYVLGSAHQGCLPPFPADVFMVPQYGYLTLNNGSQAVGRSSFYCLEYFPSQMLRTGNNFTFSYTFEDVPFHSSYAHSQSLDRLMNPLIDQYLYYLSRTNTPSGTTTQSRLQFSQAGASDIRDQSRNWLPGPCYRQQRVSKTAADNNNSDYSWTGATKYHLNGRDSLVNPGTAMASHKDDEEKYFPQSGVLIFGKQDSGKTNVDIEKVMITDEEEIRTTNPVATEQYGSVSTNLQSGNTQAATSDVNTQGVLPGMVWQDRDVYLQGPIWAKIPHTDGHFHPSPLMGGFGPKHPPPQILIKNTPVPANPSTTFSAAKFASFITQYSTGQVSVEIEWELQKENSKRWNPEIQYTSNYNKSVNVDFTVDTNGVYSEPRPIGTRYLTRNL

SEQ ID NO: 2576 - protein, 735 aa, Artificial Sequence
  Description of Artificial Sequence: Synthetic polypeptide
MAADGYLPDWLEDTLSEGIRQWWELKPGPPPPKPAERHKDDSRGLVLPGYKYLGPFNGLDKGEPVNEADAAALEHDKAYDRQLDSGDNPYLKYNHADAEFQERLKEDTSFGGNLARAVFQAKKRVLEPLGLVEEPVKTAPGKKRPVEHSPAELDSSSGTGKSGQQPARKRLNFGQTGDADSVPDPQPLGQPPAAPSGLGTNTMASGSGAPMADNNEGADGVGNSSGNWHCDSTWMGDRVITTSTRTWALPTYNNHLYKQISSQSGASNDNHYFGYSTPWGYFDFNRFHCHFSPRDWQRLINNNWGFRPKRLNFKLFNIQVKEVTQNDGTTTIANNLTSTVQVFTDSEYQLPYVLGSAHQGCLPPFPADVFMVPQYGYLTLNNGSQAVGRSSFYCLEYFPSQMLRTGNNFTFSYTFEDVPFHSSYAHSQSLDRLMNPLIDQYLYYLSRTNTPSGTTTQSRLQFSQAGASDIRDQSRNWLPGPCYRQQRVSKTAADNNNSDYSWTGATKYHLNGRDSLVNPGTAMASHKDDEEKYFPQSGVLIFGKQDSGKTNVDIEKVMITDEEEIRTTNPVATEQYGSVSTNLQSGNTQAATSDVNTQGVLPGMVWQDRDVYLQGPIWAKIPHTDGHFHPSPLMGGFGPKHPPPQILIKNTPVPANPSTTFSAAKFASFITQYSTGQVSVEIEWELQKENSKRWNPEIQYTSNYNKSVNVDFTVDTNGVYSEPRPIGTRYLTRNL

SEQ ID NO: 2577 - protein, 735 aa, Artificial Sequence
  Description of Artificial Sequence: Synthetic polypeptide
MAADGYLPDWLEDTLSEGIRQWWKLKPGPPPPKPAERHKDDSRGLVLPGYKYLGPFNGLDKGEPVNEADAAALEHDKAYDRQLDSGDNPYLKYNHADAEFQERLKEDTPFGGNLARAVFQAKKRVLEPLGLVEEPVKTAPGKKRPVGHSPAELDSSSGTGKSGQQPARKRLNFGQTGDADSVPDPQPLGQPPAAPSGLGTNTMASGSGAPMADNNEGVDGVGNSSGNWHCDSTWMGDRVITTSTRTWALPTYNNHLYKQISSQSGASNDNHYFGYSTPWGYFDFNRFHCHFSPRDWQRLINNNWGFRPKRLNFKLFNIQVKEVTQNDGTTTIANNLTSTVQVFTDSEYQLPYVLGSAHQGCLPPFPADVFMVPQYGYLTLNNGSQAVGRSSFYCLEYFPSQMLRTGNNFTFSYTFEDVPFHSSYAHSQSLDRLMNPLIDQYLYYLSRTNTPSGTTTQSRLQFSQAGASDIRDQSRNWLPGPCYRQQRVSKTAADNNNSDYSWTGATKYHLNGRDSLVNPGTAMASHKDDEEKYFPQSGVLIFGKQDSGKTNVDIEKVMITDEEEIRTTNPVATEQYGSVSTNLQSGNTQAATSDVNTQGVLPGMVWQDRDVYLQGPIWAKIPHTDGHFHPSPLMGGFGPKHPPPQILIKNTPVPANPSTTFSAAKFASFITQYSTGQVSVEIEWELQKENSKRWNPEIQYTSNYNKSVNVDFTVDTNGVYSEPRPIGTRYLTRNL

SEQ ID NO: 2578 - protein, 735 aa, Artificial Sequence
  Description of Artificial Sequence: Synthetic polypeptide
MAADGYLPDWLEDTLSEGIRQWWELKPGPPPPKPAERHKDDSRGLVLPGYKYLGPFNGLDKGEPVNEADAAALEHDKAYDRQLDSGDNPYLKYNHADAEFQERLKEDTSFGGNLARAVFQAKKRVLEPLGLVEEPVKTAPGKKRPVEHSPAELDSSSGTGKSGQQPARKRLNFGQTGDADSVPDPQPLGQPPAAPSGLGTNTMASGSGAPMADNNEGADGVGNSSGNWHCDSTWMGDRVITTSTRTWALPTYNNHLYKQISSQSGASNDNHYFGYSTPWGYFDFNRFHCHFSPRDWQRLINNNWGFRPKRLNFKLFNIQVKEVTQNDGTTTIANNLTSTVQVFTDSEYQLPYVLGSAHQGCLPPFPADVFMVPQYGYLTLNNGSQAVGRSSFYCLEYFPSQMLRTGNNFTFSYTFEDVPFHSSYAHSQSLDRLMNPLIDQYLYYFSRTNTPSGTTTQSRLQFSQAGASDIRDQSRNWLPGPCYRQQRVSKTAADNNNSDYSWTGATKYHLNGRDSLVNPGTAMASHKDDEEKYFPQSGVLIFGKQDSGKTNVDIEKVMITDEEEIRTTNPVATEQYGSVSTNLQSGNTQAATSDVNTQGVLPGMVWQDRDVYLQGPIWAKIPHTDGHFHPSPLMGGFGPKHPPPQILIKNTPVPANPSTTFSAAKFASFITQYSTGQVSVEIEWELQKENSKRWNPEIQYTSNYNKSVNVDFTVDTNGVYSEPRPIGTRYLTRNL

SEQ ID NO: 2579 - protein, 735 aa, Artificial Sequence
  Description of Artificial Sequence: Synthetic polypeptide
MAADGYLPDWLEDTLSEGIRQWWKLKPGPPPPKPAERHKDDSRGLVLPGYKYLGPFNGLDKGEPVNEADAAALEHDKAYDRQLDSGDNPYLKYNHADAEFQERLKEDTSFGGNLARAVFQAKKRVLEPLGLVEEPVKTAPGKKRPVEHSPAELDSSSGTGKSGQQPARKRLNFGQTGDADSVPDPQPLGQPPAAPSGLGTNTMASGSGAPMADNNEGADGVGNSSGNWHCDSTWMGDRVITTSTRTWALPTYNNHLYKQISSQSGASNDNHYFGYSTPWGYFDFNRFHCHFSPRDWQRLINNNWGFRPKRLNFKLFNIQVKEVTQNDGTTTIANNLTSTVQVFTDSEYQLPYVLGSAHQGCLPPFPADVFMVPQYGYLTLNNGSQAVGRSSFYRLEYFPSQMLRTGNNFTFSYTFEDVPFHSSYAHSQSLDRLMNPLIDQYLYYLSRTNTPSGTTTQSRLQFSQAGASDIRDQSRNWLPGPCYRQQRVSKTAADNNNSDYSWTGATKYHLNGRDSLVNPGTAMASHKDDEEKYFPQSGVLIFGKQDSGKTNVDIEKVMITDEEEIRTTNPVATEQYGSVSTNLQSGNTQAATSDVNTQGVLPGMVWQDRDVYLQGPIWAKIPHTDGHFHPSPLMGGFGPKHPPPQILIKNTPVPANPSTTFSAAKFASFITQYSTGQVSVEIEWELQKENSKRWNPEIQYTSNYNKSVNVDFTVDTNGVYSEPRPIGTRYLTRNL

SEQ ID NO: 2580 - protein, 735 aa, Artificial Sequence
  Description of Artificial Sequence: Synthetic polypeptide
MAADGYLPDWLEDTLSEGIRQWWKLKPGPPPPKPAERHKDDSRGLVLPGYKYLGPFNGLDKGEPVNEADAAALEHDKAYDRQLDSGDNPYLKYNHADAEFQERLKEDTSFGGNLARAVFQAKKRVLEPLGLVEEPVKTAPGKKRPVEHSPAELDSSSGTGKSGQQPARKRLNFGQTGDADSVPDPQPLGQPPAAPSGLGTNTMASGSGAPMADNNEGADGVGNSSGNWHCDSTWMGDRVITTSTRTWALPTYNNHLYKQISSQSGASNDNHYLGYSTPWGYFDFNRFHCHFSPRDWQRLINNNWGFRPKRLNFKLFNIQVKEVTQNDGTTTIANNLTSTVQVFTDSEYQLPYVLGSAHQGCLPPFPADVFMVPQYGYLTLNNGSQAVGRSSFYCLEYFPSQMLRTGNNFTFSYTFEDVPFHSSYAHSQSLDRLMNPLIDQYLYYLSRTNTPSGTTTQSRLQFSQAGASDIRDQSRNWLPGPCYRQQRVSKTAADNNNSDYSWTGATKYHLNGRDSLVNPGTAMASHKDDEEKYFPQSGVLIFGKQDSGKTNVDIEKVMITDEEEIRTTNPVATEQYGSVSTNLQSGNTQAATSDVNTQGVLPGMVWQDGDVYLQGPIWAKIPHTDGHFHPSPLMGGFGPKHPPPQILIKNTPVPANPSTTFSAAKFASFITQYSTGQVSVEIEWELQKENSKRWNPEIQYTSNYNKSVNVDFTVDTNGVYSEPRPIGTRYLTRNL

SEQ ID NO: 2581 - protein, 735 aa, Artificial Sequence
  Description of Artificial Sequence: Synthetic polypeptide
MAADGYLPDWLEDTLSEGIRQWWKLKPGPPPPKPAERHKDDSRGLVLPGYKYLGPFNGLDKGEPVNEADAAALEHDKAYDRQLDSGDNPYLKYNHADAEFQERLKEDTSFGGNLARAVFQAKKRVLEPLGLVEEPVKTAPGKKRPVEHSPAELDSSSGTGKSGQQPARKRLNFGQTGDADSVPDPQPLGQPPAAPSGLGTNTMASGSGAPMADNNEGADGVGNSSGNWHCDSTWMGDRVITTSTRTWALPTYNNHLYKQISSQSGASNDNHYFGYSTPWGYFDFNRFHCHFSPRDWQRLINNNWGFRPKRLNFKLFNIQVKEVTQNDGTTTIANNLTSTVQVFTDSEYQLPYVLGSAHQGCLPPFPADVFMVPQYGYLTLNNGSQAVGRSSFYCLEYFPPQMLRTGNNFTFSYTFEDVPFHSSYAHSQSLDRLMNPLIDQYLYYLSRTNTPSGTTTQSRLQFSQAGASDIRDQSRNWLPGPCYRQQRVSKTAADNNNSDYSWTGATKYHLNGRDSLVNPGTAMASHKDDEEKYFPQSGVLIFGKQDSGKTNVDIEKVMITDEEEIRTTNPVATEQYGSVSTNLQSGNTQAATSDVNTQGVLPGMVWQDRDVYLQGPIWAKIPHTDGHFHPSPLMGGFGPKHPPPQILIKNTPVPANPSTTFSAAKFASFITQYSTGQVSVEIEWELQKENSKRWNPEIQYTSNYNKSVNVDFTVDTNGVYSEPRPIGTRYLTRNL

SEQ ID NO: 2582 - protein, 735 aa, Artificial Sequence
  Description of Artificial Sequence: Synthetic polypeptide
MAADGYLPDWLEDTLSEGIRQWWKLKPGPPPPKPAERHKDDSRGLVLPGYKYLGPFNGLDKGEPVNEADAAALEHDKAYDRQLDSGDNPYLKYNHADAEFQERLKEDTSFGGNLARAVFQAKKRVLEPLGLVEEPVKTAPGKKRPVEHSPAELDSSSGTGKSGQQPARKRLNFGQTGDADSVPDPQPLGQPPAAPSGLGTNTMASGSGAPMADNNEGADGVGNSSGNWHCDSTWMGDRVITTSTRAWALPTYNNHLYKQISSQSGASNDNHYLGYSTPWGYFDFNRFHCHFSPRDWQRLINNNWGFRPKRLNFKLFNIQVKEVTQNDGTTTIANNLTSTVQVFTDSEYQLPYVLGSAHQGCPPPFPADVFMVPQYGYLTLNNGSQAVGRSSFYCLEYFPSQMLRTGNNFTFSYTFEDVPFHSSYAHSQSLDRLMNPLIDQYLYYLSRTNTPSGTTTQSRLQFSQAGASDIRDQSRNWLPGPCYRQQRVSKTAADNNNSDYSWTGATKYHLNGRDSLVNPGTAMASHKDDEEKYFPQSGVLIFGKQDSGKTNVDIEKVMITDEEEIRTTNPVATEQYGSVSTNLQSGNTQAATSDVNTQGVLPGMVWQDRDVYLQGPIWAKIPHTDGHFHPSPLMGGFGPKHPPPQILIKNTPVPANPSTTFSAAKFASFITQYSTGQVSVEIEWELQKENSKRWNPEIQYTSNYNKSVNVDFTVDTNGVYSEPRPIGTRYLTRNL

SEQ ID NO: 2583 - protein, 735 aa, Artificial Sequence
  Description of Artificial Sequence: Synthetic polypeptide
MAADGYLPDWLEDTLSEGIRQWWKLKPGPPPPKPAERHKDDSRGLVLPGYKYLGPFNGLDKGEPVNEADAAALEHDKAYDRQLDSGDNPYLKYNHADAEFQERLKEDTSFGGNLARAVFQAKKRVLEPLGLVEEPVKTAPGKKRPVEHSPAELDSSSGTGKSGQQPARKRLNFGQTGDADSVPDPQPLGQPPAAPSGLGTNTMASGSGAPMADNNEGADGVGNSSGNWHCDSTWMGDRVITTSTRTWALPTYNNHLYKQISSQSGASNDNHYFGYSTPWGYFDFNRFHCHFSPRDWQRLINNNWGFRPKRLNFKLFNIQVKEVTQNDGTTTIANNLTSTVQVFTDSEYQLPYVLGSAHQGCLPPFPADVFMVPQYGYLTLNNGSQAVGRSSFYCLEYFPSQMLRTGNNFTFSYTFEDVPFHSSYAHSQSLDRLMNPLIDQYLYYLSRTNTPSGTTTQSRLQFSQAGASDIRDQSRNWLPGPCYRQQRVSKTAADNNNSDYSWTGATKYHLNGRDSLVNPGTAMASHKDDEEKYFPQSGVLIFGKQDSGKTNVDIEKVMITDEEEIRTTNPVATEQYGSVSTNLQSGNTQAATSDVNTQGVLPGMVWQDRDVYLQGPIWAKIPHTDGHFHPSPLMGGFGPKHPPPQILIKNTPVPANPSTTFSAAKFAFFITQYSTGQVSVEIEWELQKENSKRWNPEIQYTSNYNKSVNVDFTVDTNGVYSEPRPIGTRYLTRNL

SEQ ID NO: 2584 - protein, 735 aa, Artificial Sequence
  Description of Artificial Sequence: Synthetic polypeptide
MAADGYLPDWLEDTLSEGIRQWWKLKPGPPPPKPAERHKDDSRGLVLPGYKYLGPFNGLDKGEPVNEADAAALEHDKAYDRQLDSGDNPYLKYNHADAEFQERLKEDTSFGGNLARAVFQAKKRVLEPLGLVEEPVKTAPGKKRPVEHSPAELDSSSGTGKSGQQPARKRLNFGQTGDADSVPDPQPLGQPPAAPSGLGTNTMASGSGAPMADNNEGADGVGNSSGNWHCDSTWMGDRVITTSTRTWALPTYNNHLYKQISSQSGASNDNHYLGYSTPWGYFDFNRFHCHFSPRDWQRLINNNWGFRPKRLNFKLFNIQVKEVTQNDGTTTIANNLTSTVQVFTDSEYQLPYVLGSAHQGCLPPFPADVFMVPQYGYLTLNNGSQAVGRSSFYRLEYFPSQMLRTGNNFTFSYTFEDVPFHSSYAHSQSLDRLMNPLIDQYLYYLSRTNTPSGTTTQSRLQFSQAGASDIRDQSRNWLPGPCYRQQRVSKTAADNNNSDYSWTGATKYHLNGRDSLVNPGTAMASHKDDEEKYFPQSGVLIFGKQDSGKTNVDIEKVMITDEEEIRTTNPVATEQYGSVSTNLQSGNTQAATSDVNTQGVLPGMVWQDRDVYLQGPIWAKIPHTDGHFHPSPLMGGFGPKHPPPQILIKNTPVPANPSTTFSAAKFASFITQYSTGQVSVEIEWELQKENSKRWNPEIQYTSNYNKSVNVDFTVDTNGVYSEPRPIGTRYLTRNL

SEQ ID NO: 2585 - protein, 734 aa, Artificial Sequence
  Description of Artificial Sequence: Synthetic polypeptide
MAADGYLPDWLEDTLSEGIRQWWKLKPGPPPPKPAERHKDDSRGLVLPGYKYLGPFNGLDKGEPVNEADAAALEHDKAYDRQLDSGDNPYLKYNHADAEFQERLKEDTSFGGNLARAVFQAKKRVLEPLGLVEEPVKTAPGKKRPVEHSPAELDSSSGTGKSGQQPARKRLNFGQTGDADSVPDPQPLGQPPAAPSGLGTNTMASGSGAPMADNNEGADGVGNSSGNWHCDSTWMGDRVITTSTRTWALPTYNNHLYKQISSQSGASNDNHYLGYSTPWGYFDFNRFHCHFSPRDWQRLINNNWGFRPKRLNFKLFNIQVKEVTQNDGTTTIANNLTSTVQVFTDSEYQLPYVLGSAHQGCLPPFPADVFMVPQYGYLTLNNGSQAVGRSSFYCLEYFPSQMLRTGNNFTFSYTFEDVPFHSSYAHSQSLDRLMNPLIDQYLYYLSRTNTPSGTTTQSRLQFSQAGASDIRDQSRNWLPGPCYRQQRVSKTAADNNSDYSWTGATKYHLNGRDSLVNPGTAMASHKDDEEKYFPQSGVLIFGKQDSGKTNVDIEKVMITDEEEIRTTNPVATEQYGSVSTNLQSGNTQAATSDVNTQGVLPGMVWQDRDVYLQGPIWAKIPHTDGHFHPSPLMGGFGPKHPPPQILIKNTPVPANPSTTFSAAKFASFITQYSTGQVSVEIEWELQKENSKRWNPEIQYTSNYNKSVNVDFTVDTNGVYSEPRPIGTRYLTRNL

SEQ ID NO: 2586 - protein, 734 aa, Artificial Sequence
  Description of Artificial Sequence: Synthetic polypeptide
MAADGYLPDWLEDTLSEGIRQWWKLKPGPPPPKPAERHKDDSRGLVLPGYKYLGPFNGLDKGEPVNEADAAALEHDKAYDRQLDSGDNPYLKYNHADAEFQERLKEDTSLGNLARAVFQAKKRVLEPLGLVEEPVKTAPGKKRPVEHSPAELDSSSGTGKSGQQPARKRLNFGQTGDADSVPDPQPLGQPPAAPSGLGTNTMASGSGAPMADNNEGADGVGNSSGNWHCDSTWMGDRVITTSTRTWALPTYNNHLYKQISSQSGASNDNHYFGYSTPWGYFDFNRFHCHFSPRDWQRLINNNWGFRPKRLNFKLFNIQVKEVTQNDGTTTIANNLTSTVQVFTDSEYQLPYVLGSAHQGCLPPFPADVFMVPQYGYLTLNNGSQAVGRSSFYCLEYFPSQMLRTGNNFTFSYTFEDVPFHSSYAHSQSLDRLMNPLIDQYLYYLSRTNTPSGTTTQSRLQFSQAGASDIRDQSRNWLPGPCYRQQRVSKTAADNNNSDYSWTGATKYHLNGRDSLVNPGTAMASHKDDEEKYFPQSGVLIFGKQDSGKTNVDIEKVMITDEEEIRTTNPVATEQYGSVSTNLQSGNTQAATSDVNTQGVLPGMVWQDRDVYLQGPIWAKIPHTDGHFHPSPLMGGFGPKHPPPQILIKNTPVPANPSTTFSAAKFASFITQYSTGQVSVEIEWELQKENSKRWNPEIQYTSNYNKSVNVDFTVDTNGVYSEPRPIGTRYLTRNL

SEQ ID NO: 2587 - protein, 735 aa, Artificial Sequence
  Description of Artificial Sequence: Synthetic polypeptide
MAADGYLPDWLEDTLSEGIRQWWKLKPGPPPPKPAERHKDDSRGLVLPGYKYLGPFNGLDKGEPVNEADAAALEHDKAYDRQLDSGDNPYLKYNHADAEFQERLKEDTSFGGNLARAVFQAKKRVLEPLGLVEEPVKTAPGKKRPVEHSPAELDSSSGTGKSGQQPARKRLNFGQTGDADSVPDPQPLGQPPAAPSGLGTNTMASGSGAPMADNNEGADGVGNSSGNWHCDSTWMGDRVITTSTRTWALPTYNNHLYKQISSQSGASNDNHYFGYSTPWGYFDFNRFHCHFSPRDWQRLINNNWGFRPKRLNFKLFNIQVKEVTQNDGTTTIANNLTSTVQVFTDSEYQLPYVLGSAHQGCLPPFPADVFMVPQYGYLTLNNGSQAVGRSSFYCLEYFPSQMLRTGNNFTFSYTFEDVPFHSSYAHSQSLDRLMNPLIDQYLYYLSRTNTPSGTTTQSRLQFSQAGASDIRDQSRNWLPGPCYRQQRVSKTAADNNNSDYSWTGATKYHLNGRDSLVNPGTAMASHKDDEEKYFPQSGVLIFGKQDSGKTNVDIEKVMITDEEEIRTTNPVATEQYGSVSTNLQSGNTQAATSDVNTQGVLPGMVWQDRDVYLQGPIWAKIPHTDGHFHPSPLMGGFGPKHPPPQILIKNTPVPANPSTTFSAAKFASFITQYSTGQVGVEIEWELQKENSKRWNPEIQYTSNYNKSVNVDFTVDTNGVYSEPRPIGTRYLTRNL

SEQ ID NO: 2588 - protein, 735 aa, Artificial Sequence
  Description of Artificial Sequence: Synthetic polypeptide
MAADGYLPDWLEDTLSEGIRQWWKLKPGPPPPKPAERHKDDSRGLVLPGYKYLGPFNGLDKGEPVNEADAAALEHDKAYDRQLDSGDNPYLKYNHADAEFQERLKEDTSFGGNLARAVFQAKKRVLEPLGLVEEPVKTAPGKKRPVEHSPAELDSSSGTGKSGQQPARKRLNFGQTGDADSVPDPQPLGQPPAAPSGLGTNTMASGSGAPMADNNEGADGVGNSSGNWHCDSTWMGDRVITTSTRTWALPTYNNHLYKQISSQSGASNDNHYFGYSTPWGYFDFNRFHCHFSPRDWQRLINNNWGFRPKRLNFKLFNIQVKEVTQNDSTTTIANNLTSTVQVFTDSEYQLPYVLGSAHQGCLPPFPADVFMVPQYGYLTLNNGSQAVGRSSFYCLEYFPSQMLRTGNNFTFSYTFEDVPFHSSYAHSQSLDRLMNPLIDQYLYYLSRTNTPSGTTTQSRLQFSQAGASDIRDQSRNWLPGPCYRQQRVSKTAADNNNSDYSWTGATKYHLNGRDSLVNPGTAMASHKDDEEKYFPQSGVLIFGKQDSGKTNVDIEKVMITDEEEIRTTNPVATEQYGSVSTNLQSGNTQAATSDVNTQGVLPGMVWQDRDVYLQGPIWAKIPHTDGHFHPSPLMGGFGPKHPPPQILIKNTPVPANPSTTFSAAKFASFITQYSTGQVSVEIEWELQKENSKRWNPEIQYTSNYNKSVNVDFTVDTNGVYSEPRPIGTRYLTRNL

SEQ ID NO: 2589 - protein, 735 aa, Artificial Sequence
  Description of Artificial Sequence: Synthetic polypeptide
MAADGYLPDWLEDTLSEGIRQWWKLKPGPPPPKPAERHKDDSRGLVLPGYKYLGPFNGLDKGEPVNEADAAALEHDKAYDRQLDSGDNPYLKYNHADAEFQERLKEDTSFGGNLARAVFQAKKRVLEPLGLVEEPVKTAPGKKRPVEHSPAELDSSSGTGKSGQQPARKRLNFGQTGDADSVPDPQPLGQPPAAPSGLGTNTMASGSGAPMADNNEGADGVGNSSGNWHCDSTWMGDRVITTSTRTWALPTYNNHLYKQISSQSGASNDNHYFGYSTPWGYFDFNRFHCHFSPRDWQRLINNNWGFRPKRLNFKLFNIQVKEVTQNDGTTTIANNLTSTVQVFTDSEYQLPYVLGSAHQGCLPPFPADVFMVPQYGYLTLNNGSQAVGRSSFYCLEYFPSQMLRTGNNFTFSYTFEDVPFHSSYAHSQSLDRLMNPLIDQYLYYLSRTNTPSGTTTQSRLQFSQAGASDIRDQSRNWLPGPCYRQQRVSKTAADNNNSDYSWTGATKYHLNGRDSLVNPGTAMASHKDDEEKYFPQSGVLIFRKQDSGKTNVDIEKVMITDEEEIRTTNPVATEQYGSVSTNLQSGNTQAATSDVNTQGVLPGMVWQDRDVYLQGPIWAKIPHTDGHFHPSPLMGGFGPKHPPPQILIKNTPVPANPSTTFSAAKFAYFITQYSTGQVSVEIEWELQKENSKRWNPEIQYTSNYNKSVNVDFTVDTNGVYSEPRPIGTRYLTRNL

SEQ ID NO: 2590 - protein, 735 aa, Artificial Sequence
  Description of Artificial Sequence: Synthetic polypeptide
MAADGYLPDWLEDTLSEGIRQWWKLKPGPPPPKPAERHKDDSRGLVLPGYKYLGPFNGLDKGEPVNEADAAALEHDKAYDRQLDSGDNPYLKYNHADAEFQERLKEDTSFGGNLARAVFQAKKRVLEPLGLVEEPVKTAPGKKRPVEHSPAELDSSSGTGKSGQQPARKRLNFGQTGDADSVPDPQPLGQPPAAPSGLGTNTMASGSGAPMADNNEGADGVGNSSGNWHCDSTWMGDRVITTSTRTWALPTYNNHLYKQISSQSGASNDNHYFGYSTPWGYFDFNRFHCHFSPRDWQRLINNNWGFRPKRLDFKLFNIQVKEVTQNDGTTTIANNLTSTVQVFTDSEYQLPYVLGSAHQGCLPPFPADVFMVPQYGYLTLNNGSQAVGRSSFYCLEYFPSQMLRTGNNFTFSYTFEDVPFHSSYAHSQSLDRLMNPLIDQYLYYLSRTNTPSGTTTQSRLQFSQAGASDIRDQSRNWLPGPCYRQQRVSKTAADNNNSDYSWTGATKYHLNGRDSLVNPGTAMASHKDDEEKYFPQSGVLIFGKQDSGKTNVDIEKVMITDEEEIRTTNPVATEQYGSVSTNLQSGNTQAATSDVNTQGVLPGMVWQDRDVYLQGPIWAKIPHTDGHFHPSPLMGGFGPKHPPPQILIKNTPVPANPSTTFSAAKFASFITQYSTGQVSVEIEWELQKENSKRWNPEIQYTSNYNKSVNVDFTVDTNGVYSEPRPIGTRYLTRNL

SEQ ID NO: 2591 - protein, 735 aa, Artificial Sequence
  Description of Artificial Sequence: Synthetic polypeptide
MAADGYLPDWLEDTLSEGIRQWWKLKPGPPPPKPAERHKDDSRGLVLPGYKYLGPFNGLDKGEPVNEADAAALEHDKAYDRQLDSGDNPYLKYNHADAEFQERLKEDTSFGGNLARAVFQAKKRVLEPLGLVEEPVKTAPGKKRPVEHSPAELDSSSGTGKSGQQPARKRLNFGQTGGADSVPDPQPLGQPPAAPSGLGTNTMASGSGAPMADNNEGADGVGNSSGNWHCDSTWMGDRVITTSTRTWALPTYNNHLYKQISSQSGASNDNHYFGYSTPWGYFDFNRFHCHFSPRDWQRLINNNWGFRPKRLNFKLFNIQVKEVTQNDGTTTIANNLTSTVQVFTDSEYQLPYVLGSAHQGCLPPFPADVFMVPQYGYLTLNNGSQAVGRSSFYCLEYFPSQMLRTGNNFTFSYTFEDVPFHSSYAHSQSLDRLMNPLIDQYLYYLSRTNTPSGTTTQSRLQFSQAGASDIRDQSRNWLPGPCYRQQRVSKTAADNNNSDYSWTGATKYHLNGRDSLVNPGTAMASHKDDEEKYFPQSGVLIFGKQDSGKTNVDIEKVMITDEEEIRTTNPVATEQYGSVSTNLQSGNTQAATSDVNTQGVLPGMVWQDRDVYLQGPIWAKIPHTDGHFHPSPLMGGFGPKHPPPQILIKNTPVPANPSTTFSAAKFASFITQYSTGQVSVEIEWELQKENSKRWNPEIQYTSNYNKSVNVDFTVDTNGVYSEPRPIGTRYLTRNL

SEQ ID NO: 2592 - protein, 735 aa, Artificial Sequence
  Description of Artificial Sequence: Synthetic polypeptide
MAADGYLPDWLEDTLSEGIRQWWKLKPGPPPPKPAERHKDDSRGLVLPGYKYLGPFNGLDKGEPVNEADAAALEHDKAYDRQLDSGDNPYLKYNHADAEFQERLKEDTSFGGNLARAVFQAKKRVLEPLGLVEEPVKTAPGKKRPVEHSPAELDSSSGTGKSGQQPARKRLNFGQTGDADSVPDPQPLGQPPAAPSGLGTNTMASGSGAPMADNNEGADGVGNSSGNWHCDSTWMGDRVITTSTRTWALPTYNNHLYKQISSQSGASNDNHYFGYSTPWGYFDFNRFHCHFSPRDWQRLINNNWGFRPKRLNFKLFNIQVKEVTQNDGTTTIANNLTSTVQVFTDSEYQLPYVLGSAHQGCLPPFPADVFMVPQYGYLTLNNGSQAVGRSSFYCLEYFPSQMLRTGNNLTFSYTFEDVPFHSSYAHSQSLDRLMNPLIDQYLYYLSRTNTPSGTTTQSRLQFSQAGASDIRDQSRNWLPGPCYRQQRVSKTAADNNNSDYSWTGATKYHLNGRDSLVNPGTAMASHKDDEEKYFPQSGVLIFGKQDSGKTNVDIEKVMITDEEEIRTTNPVATEQYGSVSTNLQSGNTQAATSDVNTQGVLPGMVWQDRDVYLQGPIWAKIPHTDGHFHPSPLMGGFGPKHPPPQILIKNTPVPANPSTTFSAAKFASFITQYSTGQVSVEIEWELQKENSKRWNPEIQYTSNYNKSVNVDFTVDTNGVYSEPRPIGTRYLTRNL

SEQ ID NO: 2593 - protein, 735 aa, Artificial Sequence
  Description of Artificial Sequence: Synthetic polypeptide
MAADGYLPDWLEDTLSEGIRQWWKLKPGPPPPKPAERHKDDSRGLVLPGYKYLGPFNGLDKGEPVNEADAAALEHDKAYDRQLDSGDNPYLKYNHADAEFQERLKEDTSFGGNLARAVFQAKKRVLEPLGLVEEPVKTAPGKKRPVEHSPAELDSSSGTGKSGQQPARKRLNFGQTGDADSVPDPQPLGQPPAAPSGLGTNTMASGSGAPMADNNEGADGVGNSSGNWHCDSTWMGDRVITTSTRTWALPTYNNHLYKQISSQSGASNDNHYFGYSTPWGYFDFNRFHCHFSPRDWQRLINNNWGFRPKRLNFKLFNIQVKEVTQNDGTTTIANNLTSTVQVFTDSEYQLPYVLGSAHQGCLPPFPADVFMVPQYGYHTLNNGSQAVGRSSFYCLEYFPSQMLRTGNNFTFSYTFEDVPFHSSYAHSQSLDRLMNPLIDQYLYYLSRTNTPSGTTTQSRLQFSQAGASDIRDQSRNWLPGPCYRQQRVSKTAADNNNSDYSWTGATKYHLNGRDSLVNPGTAMASHKDDEEKYFPQSGVLIFGKQDSGKTNVDIEKVMITDEEEIRTTNPVATEQYGSVSTNLQSGNTQAATSDVNTQGVLPGMVWQDRDVYLQGPIWAKIPHTDGHFHPSPLMGGFGPKHPPPQILIKNTPVPANPSTTFSAAKFASFITQYSTGQVSVEIEWELQKENSKRWNPEIQYTSNYNKSVNVDFTVDTNGVYSEPRPIGTRYLTRNL

SEQ ID NO: 2594 - protein, 735 aa, Artificial Sequence
  Description of Artificial Sequence: Synthetic polypeptide
MAADGYLPDWLEDTLSEGIRQWWKLKPGPPPPKPAERHKDDSRGLVLPGYKYLGPFNGLDKGEPVNEADAAALEHDKAYDRQLDSGDNPYLKYNHADAEFQERLKEDTSFGGNLARAVFQAKKRVLEPLGLVEEPVKTAPGKKRPVEHSPAELDSSSGTGKSGQQPARKRLNFGQTGDADSVPDPQPLGQPPAAPSGLGTNTMASGSGAPMADNNEGADGVGNSSGNWHCDSTWMGDRVITTSTRTWALPTYNNHLYKQISSQSGASNDNHYFGYSTPWGYFDFNRFHCHFSPRDWQRLINNNWGFRPKRLNFKLFNIQVKEVTQNDGTTTIANNLTSTVQVFTDSEYQLPYVLGSAHQGCLPPFPADVFMVPQYGYLTLNNGSQAVGRSSFYCLEYFPSQMLRTGNNFTFSYTFEDVPFHSSYAHSQSLDRLMNPLIDQYPYYLSRTNTPSGTTTQSRLQFSQAGASDIRDQSRNWLPGPCYRQQRVSKTAADNNNSDYSWTGATKYHLNGRDSLVNPGTAMASHKDDEEKYFPQSGVLIFGKQDSGKTNVDIEKVMITDEEEIRTTNPVATEQYGSVSTNLQSGNTQAATSDVNTQGVLPGMVWQDRDVYLQGPIWAKIPHTDGHFHPSPLMGGFGPKHPPPQILIKNTPVPANPSTTFSAAKFASFITQYSTGQVSVEIEWELQKENSKRWNPEIQYTSNYNKSVNVDFTVDTNGVYSEPRPIGTRYLTRNL

SEQ ID NO: 2595 - protein, 735 aa, Artificial Sequence
  Description of Artificial Sequence: Synthetic polypeptide
MAADGYLPDWLEDTLSEGIRQWWKLKPGPPPPKPAERHKDDSRGLVLPGYKYLGPFNGLDKGEPVNEADAAALEHDKAYDRQLDSGDNPYLKYNHADAEFQERLKEDTSFGGNLARAVFQAKKRVLEPLGLVEEPVKTAPGKKRPVEHSPAELDSSSGTGKSGQQPARKRLNFGQTGDADSVPDPQPLGQPPAAPSGLGTNTMASGSGAPMADNNEGADGVGNSSGNWHCDSTWMGDRVITTSTRTWALPTYNNHLYKQISSQSGASNDNHYFGYSTPWGYFDFNRFHCHFSPRDWQRLINNNWGFRPKRLNFKLFNIQVKEVTQNDGTTTIANNLTSTVQVFTDSEYQLPYVLGSAHQGCLPPFPADVFMVPQYGYLTLNNGSQAVGRSSFYCLEYFPSQMLRTGNNFTFSYTFEDVPFHSSYAHSQSLDRLMNPLIDQYLYYLSRTNTPSGTTTQSRLQFSQAGASDIRDQSRNWLPGPCYRQQRVSKTAADNNNSDYSWTGATKYHLNGRDSLVNPGTAMASHKDDEEKYFPQSGVLIFGKQDSGKTNVDIEKVMITDEEEIRTTNPVATEQYGSVSTNLQSGNTQAATSDVNTQGVLPGMVWQDRDVYLQGPIWAKIPHTDGHFHPSPLMGGFGPKHPPPQILIKNTPVPANPPTTFSAAKFASFITQYSTGQVSVEIEWELQKENSKRWNPEIQYTSNYNKSVNVDFTVDTNGVYSEPRPIGTRYLTRNL

SEQ ID NO: 2596 - protein, 735 aa, Artificial Sequence
  Description of Artificial Sequence: Synthetic polypeptide
MAADGYLPDWLEDTLSEGIRQWWKLKPGPPPPKPAERHKDDSRGLVLPGYKYLGPFNGLDKGEPVNEADAAALEHDKAYDRQLDSGDNPYLKYNHADAEFQERLKEDTSFGGNLARAVFQAKKRVLEPLGLVEEPVKTAPGKKRPVEHSPAELDSSSGTGKSGQQPARKRLNFGQTGDADSVPDPQPLGQPPAAPSGLGTNTMASGSGAPMADNNEGADGVGNSSGNWHCDSTWMGDRVITTSTRTWALPTYNNHLYKQISSQSGASNDNHYFGYSTPWGYFDFNRFHCHFSPRDWQRLINNNWGFRPKRLNFKLFNIQVKEVTQNDGTTTIANNLTSTVQVFTDSEYQLPYVLGSAHQGCLPPFPADVFMVPQYGYLTLNNGSQAVGRSSFYCLEYFPSQMLRTGNNFTFSYTFEDVPFHSSYAHSQSLDRLMNPLIDQYLYYLSRTNTPSGTTTQSRLQFSQAGASDIRDQSRNWLPGPCYRQQRVPKTAADNNNSDYSWTGATKYHLNGRDSLVNPGTAMASHKDDEEKYFPQSGVLIFGKQDSGKTNVDIEKVMITDEEEIRTTNPVATEQYGSVSTNLQSGNTQAATSDVNTQGVLPGMVWQDRDVYLQGPIWAKIPHTDGHFHPSPLMGGFGPKHPPPQILIKNTPVPANPSTTFSAAKFASFITQYSTGQVSVEIEWELQKENSKRWNPEIQYTSNYNKSVNVDFTVDTNGVYSEPRPIGTRYLTRNL

SEQ ID NO: 2597 - protein, 735 aa, Artificial Sequence
  Description of Artificial Sequence: Synthetic polypeptide
MAADGYLPDWLEDTLSEGIRQWWKLKPGPPPPKPAERHKDDSRGLVLPGYKYLGPFNGLDKGEPVNEADAAALEHDKAYDRQLDSGDNPYLKYNHADAEFQERLKEDTSFGGNLARAVFQAKKRVLEPLGLVEEPVKTAPGKKRPVEHSPAELDSSSGTGKSGQQPARKRLNFGQTGDADSVPDPQPLGQPPAAPSGLGTNTMASGSGAPMADNNEGADGVGNSSGNWHCDSTWMGDRVITTSTRTWALPTYNNHLYKQISSQSGASNDNHYFGYSTPWGYFDFNRFHCHFSPRDWQRLINNNWGFRPKRLNFKLFNIQVKEVTQNDGTTTIANNLTSTVQVFTDSEYQLPYVLGSAHQGCLPPFPADVFMVPQYGYLTLNNGSQAVGRSSFYCLEYFPSQMLRTGNNFTFSYTFEDVPFHSSYAHSQSLDRLMNPLIDQYLYYLSRTNTPSGTTTQSRLQFSQAGASDIRDQSRNWLPGPCYRQQRVSKTAADNNNSDYSWTGATKYHLNGRDSLVNPGTAMASHKDDEEKYFPQSGVLIFGKQDSGKTNVDIEKVMITDEEEIRTTNPVATEQYGSVSTNLQSGNTQAATSDVNTQGVLPGMVWQDRDVYLQGPIWAKIPHTDGHFHPSPLMGGFGPKHPPPQILIKNTPVPANPSTTFSAAKFASFITQYSTGQVSVEIEWELQKENSKRWNPEIQYTSNYNKSVNVDFTVDTNGVYSEPRPIGTRYLTRNL

SEQ ID NO: 2598 - protein, 735 aa, Artificial Sequence
  Description of Artificial Sequence: Synthetic polypeptide
MAADGYLPDWLEDTLSEGIRQWWKLKPGPPPPKPAERHKDDSRGLVLPGYKYLGPFNGLDKGEPVNEADAAALEHDKAYDRQLDSGDNPYLKYNHADAEFQERLKEDTPFGGNLARAVFQAKKRVLEPLGLVEEPVKTAPGKKRPVEHSPAELDSSSGTGKSGQQPARKRLNFGQTGDADSVPDPQPLGQPPAAPSGLGTNTMASGSGAPMADNNEGADGVGNSSGNWHCDSTWMGDRVITTSTRTWALPTYNNHLYKQISSQSGASNDNHYFGYSTPWGYFDFNRFHCHFSPRDWQRLINNNWGFRPKRLNFKLFNIQVKEVTQNDGTTTIANNLTSTVQVFTDSEYQLPYVLGSAHQGCLPPFPADVFMVPQYGYLTLNNGSQAVGRSSFYCLEYFPSQMLRTGNNFTFSYTFEDVPFHSSYAHSQSLDRLMNPLIDQYLYYLSRTNTPSGTTTQSRLQFSQAGASDIRDQSRNWLPGPCYRQQRVSKTAADNNNSDYSWTGATKYHLNGRDSLVNPGTAMASHKDDEEKYFPQSGVLIFGKQDSGKTNVDIEKVMITDEEEIRTTNPVATEQYGSVSTNLQSGNTQAATSDVNTQGVLPGMVWQDRDVYLQGPIWAKIPHTDGHFHPSPLMGGFGPKHPPPQILIKNTPVPANPSTTFSAAKFASFITQYSTGQVSVEIEWELQKENSKRWNPEIQYTSNYNKSVNVDFTVDTNGVYSEPRPIGTRYLTRNL

SEQ ID NO: 2599 - protein, 735 aa, Artificial Sequence
  Description of Artificial Sequence: Synthetic polypeptide
MAADGYLPDWLEDTLSEGIRQWWKLKPGPPPPKPAERHKDDSRGLVLPGYKYLGPFNGLDKGEPVNEADAAALEHDKAYDRQLDSGDNPYLKYNHADAEFQERLKEDTSFGGNLARAVFQAKKRVLEPLGLVEEPVKTAPGKKRPVEHSPAELDSSSGTGKSGQQPARKRLNFGQTGDADSVPDPQPLGQPPAAPSGLGTNTMASGSGAPMADNNEGADGVGNSSGNWHCDSTWMGDRVITTSTRTWALPTYNNHLYKQISSQSGASNDNHYFGYSTPWGYFDFNRFHCHFSPRDWQRLINNNWGFRPKRLNSKLFNIQVKEVTQNDGTTTIANNLTSTVQVFTDSEYQLPYVLGSAHQGCLPPFPADVFMVPQYGYLTLNNGSQAVGRSSFYCLEYFPSQMLRTGNNFTFSYTFEDVPFHSSYAHSQSLDRLMNPLIDQYLYYLSRTNTPSGTTTQSRLQFSQAGASDIRDQSRNWLPGPCYRQQRVSKTAADNNNSDYSWTGATKYHLNGRDSLVNPGTAMASHKDDEEKYFPQSGVLIFGKQDSGKTNVDIEKVMITDEEEIRTTNPVATEQYGSVSTNLQSGNTQAATSDVNTQGVLPGMVWQDRDVYLQGPIWAKIPHTDGHFHPSPLMGGFGPKHPPPQILIKNTPVPANPSTTFSAAKFASFITQYSTGQVSVEIEWELQKENSKRWNPEIQYTSNYNKSVNVDFTVDTNGVYSEPRPIGTRYLTRNL

SEQ ID NO: 2600 - protein, 735 aa, Artificial Sequence
  Description of Artificial Sequence: Synthetic polypeptide
MAADGYLPDWLEDTLSEGIRQWWKLKPGPPPPKPAERHKDDSRGLVLPGYKYLGPFNGLDKGEPVNEADAAALEHDKAYDRQLDSGDNPYLKYNHADAEFQERLKEDTSFGGNLARAVFQAKKRVLEPLGLVEEPVKTAPGKKRPVEHSPAELDSSSGTGKSGQQPARKRLNFGQTGDADSVPDPQPLGQPPAAPSGLGTNTMASGSGAPMADNNEGADGVGNSSGNWHCDSTWMGDRVITTSTRTWALPTYNNHLYKQISSQSGASNDNHYFGYSTPWGYFDFNRFHCHFSPRDWQRLINNNWGFRPKRLNFKLFNIQVKEVTQNDGTTTIANNLTSTVQVFTDSEYQLPYVLGSAHQGCLPPFPADVFMVPQYGYLTLNNGSQAVGRSSFYCLEYFPSQMLRTGNNFTFSYTFEDVPFHSSYAHSQGLDRLMNPLIDQYLYYLSRTNTPSGTTTQSRLQFSQAGASDIRDQSRNWLPGPCYRQQRVSKTAADNNNSDYSWTGATKYHLNGRDSLVNPGTAMASHKDDEEKYFPQSGVLIFGKQDSGKTNVDIEKVMITDEEEIRTTNPVATEQYGSVSTNLQSGNTQAATSDVNTQGVLPGMVWQDRDVYLQGPIWAKIPHTDGHFHPSPLMGGFGPKHPPPQILIKNTPVPANPSTTFSAAKFASFITQYSTGQVSVEIEWELQKENSKRWNPEIQYTSNYNKSVNVDFTVDTNGVYSEPRPIGTRYLTRNL

SEQ ID NO: 2601 - protein, 735 aa, Artificial Sequence
  Description of Artificial Sequence: Synthetic polypeptide
MAADGYLPDWLEDTLSEGIRQWWKLKPGPPPPKPAERHKDDSRGLVLPGYKYLGPFNGLDKGEPVNEADAAALEHDKAYDRQLDSGDNPYLKYNHADAEFQERLKEDTSFGGNLARAVFQAKKRVLEPLGLVEEPVKTAPGKKRPVEHSPAELDSSSGTGKSGQQPARKRLNFGQTGDADSVPDPQPLGQPPAAPSGLGTNTMASGSGAPMADNNEGADGVGNSSGNWHCDSTWMGDRVITTSTRTWALPTYNNHLYKQISSQSGASNDNHYFGYSTPWGYFDFNRFHCHFSPRDWQRLINNNWGFRPKRLNFKLFNIQVKEVTQNDGTTTIANNLTSTVQVFTDSEYQLPYVLGSAHQGCLPPLPADVFMVPQYGYLTLNNGSQAVGRSSFYCLEYFPSQMLRTGNNFTFSYTFEDVPFHSSYAHSQSLDRLMNPLIDQYLYYLSRTNTPSGTTTQSRLQFSQAGASDIRDQSRNWLPGPCYRQQRVSKTAADNNNSDYSWTGATKYHLNGRDSLVNPGTAMASHKDDEEKYFPQSGVLIFGKQDSGKTNVDIEKVMITDEEEIRTTNPVATEQYGSVSTNLQSGNTQAATSDVNTQGVLPGMVWQDRDVYLQGPIWAKIPHTDGHFHPSPLMGGFGPKHPPPQILIKNTPVPANPSTTFSAAKFASFITQYSTGQVSVEIEWELQKENSKRWNPEIQYTSNYNKSVNVDFTVDTNGVYSEPRPIGTRYLTRNL

SEQ ID NO: 2602 - protein, 735 aa, Artificial Sequence
  Description of Artificial Sequence: Synthetic polypeptide
MAADGYLPDWLEDTLSEGIRQWWKLKPGPPPPKPAERHKDDSRGLVLPGYKYLGPFNGLDKGEPVNEADAAALEHDKAYDRQLDSGDNPYLKYNHADAEFQERLKEDTSFGGNLARAVFQAKKRVLEPLGLVEEPVKTAPGKKRPVEHSPAELDSSSGTGKSGQQPARKRLNFGQTGDADSVPDPQPLGQPPAAPSGLGTNTMASGSGAPMADNNEGADGVGNSSGNWHCDSTWMGDRVITTSTRTWALPTYNNHLYKQISSQSGASNDNHYFGYSTPWGYFDFNRFHCHFSPRDWQRPINNNWGFRPKRLNFKLFNIQVKEVTQNDGTTTIANNLTSTVQVFTDSEYQLPYVLGSAHQGCLPPFPADVFMVPQYGYLTLNNGSQAVGRSSFYCLEYFPSQMLRTGNNFTFSYTFEDVPFHSSYAHSQSLDRLMNPLIDQYLYYLSRTNTPSGTTTQSRLQFSQAGASDIRDQSRNWLPGPCYRQQRVSKTAADNNNSDYSWTGATKYHLNGRDSLVNPGTAMASHKDDEEKYFPQSGVLIFGKQDSGKTNVDIEKVMITDEEEIRTTNPVATEQYGSVSTNLQSGNTQAATSDVNTQGVLPGMVWQDRDVYLQGPIWAKIPHTDGHFHPSPLMGGFGPKHPPPQILIKNTPVPANPSTTFSAAKFASFITQYSTGQVSVEIEWELQKENSKRWNPEIQYTSNYNKSVNVDFTVDTNGVYSEPRPIGTRYLTRNL

SEQ ID NO: 2603 - protein, 735 aa, Artificial Sequence
  Description of Artificial Sequence: Synthetic polypeptide
MAADGYLPDWLEDTLSEGIRQWWKLKPGPPPPKPAERHKDDSRGLVLPGYKYLGPFNGLDKGEPVNEADAAALEHDEAYDRQLDSGDNPYLKYNHADAEFQERLKEDTSFGGNLARAVFQAKKRVLEPLGLVEEPVKTAPGKKRPVEHSPAELDSSSGTGKSGQQPARKRLNFGQTGDADSVPDPQPLGQPPAAPSGLGTNTMASGSGAPMADNNEGADGVGNSSGNWHCDSTWMGDRVITTSTRTWALPTYNNHLYKQISSQSGASNDNHYFGYSTPWGYFDFNRFHCHFSPRDWQRLINNNWGFRPKRLNFKLFNIQVKEVTQNDGTTTIVNNLTSTVQVFTDSEYQLPYVLGSAHQGCLPPFPADVFMVPQYGYLTLNNGSQAVGRSSFYCLEYFPSQMLRTGNNFTFSYTFEDVPFHSSYAHSQSLDRLMNPLIDQYLYYLSRTNTPSGTTTQSRLQFSQAGASDIRDQSRNWLPGPCYRQQRVSKTAADNNNSDYSWTGATKYHLNGRDSLVNPGTAMASHKDDEEKYFPQSGVLIFGKQDSGKTNVDIEKVMITDEEEIRTTNPVATEQYGSVSTNLQSGNTQAATSDVNTQGVLPGMVWQDRDVYLQGPIWAKIPHTDGHFHPSPLMGGFGPKHPPPQILIKNTPVPANPSTTFSAAKFAYFITQYSTGQVSVEIEWELQKGNSKRWNPEIQYTSNYNKSVNVDFTVDTNGVYSEPRPIGTRYLTRNL

SEQ ID NO: 2604 - protein, 735 aa, Artificial Sequence
  Description of Artificial Sequence: Synthetic polypeptide
MAADGYLPDWLEDTLSEGIRQWWKLKPGPPPPKPAERHKDDSRGLVLPGYKYLGPFNGLDKGEPVNEADAAALEHDKAYDRQLDSGDNPYLKYNHADAEFQERLKEDTSFGGNLARAVFQAKKRVLEPLGLVEEPVKTAPGKKRPVEHSPAELDSSSGTGKSGQQPARKRLNFGQTGDADSVPDPQPLGQPPAAPSGLGTNTMASGSGAPMADNNEGADGVGNSSGNWHCDSTWMGDRVITTSTRTWALPTYNNHLYKQISSQSGASNDNHYFGYSTPWGYFDFNRFHCHFSPRDWQRLINNNWGFRPKRLNFKLFNIQVKEVTQNDGTTTIANNLTSTVQVFTDSEYQLPYVLGSAHQGCLPPFPADVFMVPQYGYLTLNNGSQAVGRSSFYCLEYFPSQMLRTGNNCTFSYTFEDVPFHSSYAHSQSLDRLMNPLIDQYLYYLSRTNTPSGTTTQSRLQFSQAGASDIRDQSRNWLPGPCYRQQRVSKTAADNNNSDYSWTGATKYHLNGRDSLVNPGTAMASHKDDEEKYFPQSGVLIFGKQDSGKTNVDIEKVMITDEEEIRTTNPVATEQYGSVSTNLQSGNTQAATSDVNTQGVLPGMVWQDRDVYLQGPIWAKIPHTDGHFHPSPLMGGFGPKHPPPQILIKNTPVPANPSTTFSAAKFASFITQYSTGQVSVEIEWELQKENSKRWNPEIQYTSNYNKSVNVDFTVDTNGVYSEPRPIGTRYLTRNL

SEQ ID NO: 2605 - protein, 735 aa, Artificial Sequence
  Description of Artificial Sequence: Synthetic polypeptide
MAADGYLPDWLEDTLSEGIRQWWKLKPGPPPPKPAERHKDDSRGLVLPGYKYLGPFNGLDKGEPVNEADAAALEHDKAYDRQLDSGDNPYLKYNHADAEFQERLKEDTSFGGNLARAVFQAKKRVLEPLGLVEEPVKTAPGKKRPVEHSPAELDSSSGTGKSGQQPARKRLNFGQTGDADSVPDPQPLGQPPAAPSGLGTNTMASGSGAPMADNNEGADGVGNSSGNWHCDSTWMGDRVITTSTRTWALPTYNNHLYKQISSQSGASNDNHYFGYSTPWGYFDFNRFHCHFSPRDWQRLINNNWGFRPKRPNFKLFNIQVKEVTQNDGTTTIANNLTSTVQVFTDSEYQLPYVLGSAHQGCLPPFPADVFMVPQYGYLTLNNGSQAVGRSSFYCLEYFPSQMLRTGNNFTFSYTFEDVPFHSSYAHSQSLDRLMNPLIDQYLYYLSRTNTPSGTTTQSRLQFSQAGASDIRDQSRNWLPGPCYRQQRVSKTAADNNNSDYSWTGATKYHLNGRDSLVNPGTAMASHKDDEEKYFPQSGVLIFGKQDSGKTNVDIEKVMITDEEEIRTTNPVATEQYGSVSTNLQSGNTQAATSDVNTQGVLPGMVWQDRDVYLQGPIWAKIPHTDGHFHPSPLMGGFGPKHPPPQILIKNTPVPANPSTTFSAAKFASFITQYSTGQVSVEIEWELQKENSKRWNPEIQYTSNYNKSVNVDFTVDTNGVYSEPRPIGTRYLTRNL

SEQ ID NO: 2606 - protein, 735 aa, Artificial Sequence
  Description of Artificial Sequence: Synthetic polypeptide
MAADGYLPDWLEDTLSEGIRQWWKLKPGPPPPKPAERHKDDSRGLVLPGYKYLGPFNGLDKGEPVNEADAAALEHDKAYDRQLDSGDNPYLKYNHADAEFQERLKEDTSFGGNLARAVFQAKKRVLEPLGLVEEPVKTAPGKKRPVEHSPAELDSSSGTGKSGQQPARKRLNFGQTGDADSVPDPQPLGQPPAAPSGLGTNTMASGSGAPMAGNNEGADGVGNSSGNWHCDSTWMGDRVITTSTRTWALPTYNNHLYKQISSQSGASNDNHYFGYSTPWGYFDFNRFHCHFSPRDWQRLINNNWGFRPKRLNFKLFNIQVKEVTQNDGTTTIANNLTSTVQVFTDSEYQLPYVLGSAHQGCLPPFPADVFMVPQYGYLTLNNGSQAVGRSSFYCLEYFPSQMLRTGNNFTFSYTFEDVPFHSSYAHSQSLDRLMNPLIDQYLYYLSRTNTPSGTTTQSRLQFSQAGASDIRDQSRNWLPGPCYRQQRVSKTAADNNNSDYSWTGATKYHLNGRDSLVNPGTAMASHKDDEEKYFPQSGVLIFGKQDSGKTNVDIEKVMITDEEEIRTTNPVATEQYGSVSTNLQSGNTQAATSDVNTQGVLPGMVWQDRDVYLQGPIWAKIPHTDGHFHPSPLMGGFGPKHPPPQILIKNTPVPANPSTTFSAAKFASFITQYSTGQVSVEIEWELQKENSKRWNPEIQYTSNYNKSVNVDFTVDTNGVYSEPRPIGTRYLTRNL

SEQ ID NO: 2607 - protein, 735 aa, Artificial Sequence
  Description of Artificial Sequence: Synthetic polypeptide
MAADGYLPDWLEDTLSEGIRQWWKLKPGPPPPKPAERHKDDSRGLVLPGYKYLGPFNGLDKGEPVNEADAAALEHDKAYDRQLDSGDNPYLKYNHADAEFQERLKEDTPFGGNLARAVFQAKKRVLEPLGLVEEPVKTAPGKKRPVEHSPAELDSSSGTGKSGQQPARKRLNFGQTGDADSVPDPQPLGQPPAAPSGLGTNTMASGSGAPMADNNEGADGVGNSSGNWHCDSTWMGDRVITTSTRTWALPTYNNHLYKQISSQSGASNDNHYFGYSTPWGYFDFNRFHCHFSPRDWQRLINNNWGFRPKRLNFKLFNIQVKEVTQNDGTTTIANNLTSTVQVFTDSEYQLPYVLGSAHQGCLPPFPADVFMVPQYGYLTLNNGSQAVGRSSFYCLEYFPSQMLRTGNNFTFSYTFEDVPFHSSYAHSQSLDRLMNPLIDQYLYYLSRTNTPSGTTTQSRLQFSQAGASDIRDQSRNWLPGPCYRQQRVSKTAADNNNSDYSWTGATKYHLNGRDSLVNPGTAMASHKDDEEKYFPQSGVLIFGKQDSGKTNVDIEKVMITDEEEIRTTNPVATEQYGSVSTNLQSGNTQAATSDVNTQGVLPGMVWQDRDVYLQGPIWAKIPHTDGHFHPSPLMGGFGPKHPPPQILIKNTPVPANPSTTFSAAKFASFITQYSTGQVSVEIEWELQKENSKRWNPEIQYTSNYNKSVNVDFTMDTNGVYSEPRPIGTRYLTRNL

SEQ ID NO: 2608 - protein, 735 aa, Artificial Sequence
  Description of Artificial Sequence: Synthetic polypeptide
MAADGYLPDWLEDTLSEGIRQWWKLKPGPPPPKPAERHKDDSRGLVLPGYKYLGPFNGLDKGEPVNEADAAALEHDKAYDRQLDSGDNPYLKYNHADAEFQERLKEDTSFGGNLARAVFQAKKRVLEPLGLVEEPVKTAPGKKRPVEHSPAELDSSSGTGKSGQQPARKRLNFGQTGDADSVPDPQPLGQPPAAPSGLGTNTMASGSGAPMADNNEGADGVGNSSGNWHCDSTWMGDRVITTSTRTWALPTYNNHLYKQISSQSGASNDNHYFGYSTPWGYFDFNRFHCHFSPRDWQRLINNNWGFRPKRLNFKLFNIQVKEVTQNDGTTTIANNLTSTVQVFTDSEYQLPYVLGSAHQGCLPPFPADVFMVPQYGYLTLNNGSQAVGRSSFYCLEYFPSQMLRTGNNFTFSYTFEDVPFHSSYAHSQSLDRLMNPLIDQYLYYLSRTNTPSGTTTQPRLQFSQAGASDIRDQSRNWLPGPCYRQQRVSKTAADNNNSDYSWTGATKYHLNGRDSLVNPGTAMASHKDDEEKYFPQSGVLIFGKQDSGKTNVDIEKVMITDEEEIRTTNPVATEQYGSVSTNLQSGNTQAATSDVNTQGVLPGMVWQDRDVYLQGPIWAKIPHTDGHFHPSPLMGGFGPKHPPPQILIKNTPVPANPSTTFSAAKFASFITQYSTGQVSVEIEWELQKENSKRWNPEIQYTSNYNKSVNVDFTVDTNGVYSEPRPIGTRYLTRNL

SEQ ID NO: 2609 - protein, 735 aa, Artificial Sequence
  Description of Artificial Sequence: Synthetic polypeptide
MAADGYLPDWLEDTLSEGIRQWWKLKPGPPPPKPAERHKDDSRGLVLPGYKYLGPFNGLDKGEPVNEADAAALEHDKAYDRQLDSGDNPYLKYNHADAEFQERLKEDTSFGGNLARAVFQAKKRVLEPLGLVEEPVKTAPGKKRPVEHSPAELDSSSGTGKSGQQPARKRLNFGQTGDADSVPDPQPLGQPPAAPSGLGTNTMASGSGAPMADNNEGADGVGNSSGNWHCDSTWMGDRVITTSTRTWALPTYNNHLYKQISSQSGASNDNHYFGYSTPWGYFDFNRFHCHFSPRDWQRLINNNWGFRPKRLNFKLFNIQVKEVTQNDGTTTIANNLTSTVQVFTDSEYQLPYVLGSAHQGCLPPFPADVFMVPQYGYLTLNNGSQAVGRSSFYCLEYFPSQMLRTGNNFTFSYTFEDVPFHSSYAHSQSLDRLMNPLIDQYLYYLSRTNTPSGTTTQSRLQFSQAGASDIRDQSRNWLPGPCYRQQRVSKTAADNNNSDYSWTGATKHHLNGRDSLVNPGTAMASHKDDEEKYFPQSGVLIFGKQDSGKTNVDIEKVMITDEEEIRTTNPVATEQYGSVSTNLQSGNTQAATSDVNTQGVLPGMVWQDRDVYLQGPIWAKIPHTDGHFHPSPLMGGFGPKHPPPQILIKNTPVPANPSTTFSAAKFASFITQYSTGQVSVEIEWELQKENSKRWNPEIQYTSNYNKSVNVDFTVDTNGVYSEPRPIGTRYLTRNL

SEQ ID NO: 2610 - protein, 735 aa, Artificial Sequence
  Description of Artificial Sequence: Synthetic polypeptide
MAADGYLPDWLEDTLSEGIRQWWKLKPGPPPPKPAERHKDDSRGLVLPGYKYLGPFNGLDKGEPVNEADAAALEHDKAYDRQLDSGDNPYLKYNHADAEFQERLKEDTSFGGNLARAVFQAKKRVLEPLGLVEEPVKTAPGKKRPVEHSPAELDSSSGTGKSGQQPARKRLNFGQTGDADSVPDPQPLGQPPAAPSGLGTNTMASGSGAPMADNNEGADGVGNSSGNWHCDSTWMGDRVITTSTRTWALPTYNNHLYKQISSQSGASNDNHYFGYSTPWGYFDLNRFHCHFSPRDWQRLINNNWGFRPKRLNFKLFNIQVKEVTQNDGTTTIANNLTSTVQVFTDSEYQLPYVLGSAHQGCLPPFPADVFMVPQYGYLTLNNGSQAVGRSSFYCLEYFPSQMLRTGNNFTFSYTFEDVPFHSSYAHSQSLDRLMNPLIDQYLYYLSRTNTPSGTTTQSRLQFSQAGASDIRDQSRNWLPGPCYRQQRVSKTAADNNNSDYSWTGATKYHLNGRDSLVNPGTAMASHKDDEEKYFPQSGVLIFGKQDSGKTNVDIEKVMITDEEEIRTTNPVATEQYGSVSTNLQSGNTQAATSDVNTQGVLPGMVWQDRDVYLQGPIWAKIPHTDGHFHPSPLMGGFGPKHPPPQILIKNTPVPANPSTTFSAAKFASFITQYSTGQVSVEIEWELQKENSKRWNPEIQYTSNYNKSVNVDFTVDTNGVYSEPRPIGTRYLTRNL

SEQ ID NO: 2611 - protein, 735 aa, Artificial Sequence
  Description of Artificial Sequence: Synthetic polypeptide
MAADGYLPDWLEDTLSEGIRQWWKLKPGPPPPKPAERHKDDSRGLVLPGYKYLGPLNGLDKGEPVNEADAAALEHDKAYDRQLDSGDNPYLKYNHADAEFQERLKEDTSFGGNLARAVFQAKKRVLEPLGLVEEPVKTAPGKKRPVEHSPAELDSSSGTGKSGQQPARKRLNFGQTGDADSVPDPQPLGQPPAAPSGLGTNTMASGSGAPMADNNEGADGVGNSSGNWHCDSTWMGDRVITTSTRTWALPTYNNHLYKQISSQSGASNDNHYFGYSTPWGYFDFNRFHCHFSPRDWQRLINNNWGFRPKRLNFKLFNIQVKEVTQNDGTTTIANNLTSTVQVFTDSEYQLPYVLGSAHQGCLPPFPADVFMVPQYGYLTLNNGSQAVGRSSFYCLEYFPSQMLRTGNNFTFSYTFEDVPFHSSYAHSQSLDRLMNPLIDQYLYYLSRTNTPSGTTTQSRLQFSQAGASDIRDQSRNWLPGPCYRQQRVSKTAADNNNSDYSWTGATKYHLNGRDSLVNPGTAMASHKDDEEKYFPQSGVLIFGKQDSGKTNVDIEKVMITDEEEIRTTNPVATEQYGSVSTNLQSGNTQAATSDVNTQGVLPGMVWQDRDVYLQGPIWAKIPHTDGHFHPSPLMGGFGPKHPPPQILIKNTPVPANPSTTFSAAKFASFITQYSTGQVSVEIEWELQKENSKRWNPEIQYTSNYNKSVNVDFTVDTNGVYSEPRPIGTRYLTRNL

SEQ ID NO: 2612 - protein, 735 aa, Artificial Sequence
  Description of Artificial Sequence: Synthetic polypeptide
MAADGYLPDWLEDTLSEGIRQWWKLKPGPPPPKPAERHKDDSRGLVLPGYKYLGPFNGLDKGEPVNEADAAALEHDKAYDRQLDSGDNPYLKYNHADAEFQERLKEDTSFGGNLARAVFQAKKRVLEPLGLVEEPVKTAPGKKRPVEHSPAELDSSSGTGKSGQQPARKRLNFGQTGDADSVPDPQPLGQPPAAPSGLGTNTMASGSGAPMADNNEGADGVGNSSGNWHCDSTWMGDRVITTSTRTWALPTYNNHLYKQISSQSGASNDNHYFGYSTPWGYFDFNRFHCHFSPRDWQRLINNNWGFRPKRLNFKLFNIQVKEVTQNDGTTTIANNLTSTVQVFTDSEYQLPYVLGSAHQGCLPPFPADVFMVPQYGYLTLNNGSQAVGRSSFYCLEYFPSQMLRTGNNFTFSYTFEDVPFHSSYAHSQSLDRLMNPLIDQYLYYLSRTNTPSGTTTQSRLQFSQAGASDIRDQSRNWLPGPCYRQQRVSKTAADNNNSDYSWTGATKYHLNGRDSLVNPGTAMASHKDDEEKYFPQSGVLIFGKQDSGKTNVDIEKVMITDEEEIRTTNPVATEQYGSVSTNLQSGNTQAATSDVNTQGVLPGMVWQDRDVYLQGPIWAKIPHTDGHFHPSPLMGGFGPKHPPPQILIKNTPVPANPSTTFSAAKFASFITQYSTGQVSVEIEWELQKENSKRWNPEIQYTSNYNKSVNVDFTVDTNGVYSEPRPIGTRYLARNL

SEQ ID NO: 2613 - protein, 735 aa, Artificial Sequence
  Description of Artificial Sequence: Synthetic polypeptide
MAADGYLPDWLEDTLSEGIRQWWKLKPGPPPPKPAERHKDDSRGLVLPGYKYLGPFNGLDKGEPVNEADAAALEHDKAYDRQLDSGDNPYLKYNHADAEFQERLKEDTSFGGNLARAVFQAKKRVLEPLGLVEEPVKTAPGKKRPVEHSPAELDSSSGTGKSGQQPARKRLNFGQTGDADSVPDPQPLGQPPAAPSGLGTNTMASGSGAPMADNNEGADGVGNSSGNWHCDSTWMGDRVITTSTRTWALPTYNNHLYKQISSQSGASNDNHYFGYSTPWGYFDFNRFHCHFSPRDWQRLINNNWGFRPKRLNFKLFNIQVKEVTQNDGTTTIANNLTSTVQVFTDSEYQLPYVLGSAHQGCLPPFPADVFMVPQYGYLTLNNGSQAVGRSSFYCLEYFPSQMLRTGNNFTLSYTFEDVPFHSSYAHSQSLDRLMNPLIDQYLYYLSRTNTPSGTTTQSRLQFSQAGASDIRDQSRNWLPGPCYRQQRVSKTAADNNNSDYSWTGATKYHLNGRDSLVNPGTAMASHKDDEEKYFPQSGVLIFGKQDSGKTNVDIEKVMITDEEEIRTTNPVATEQYGSVSTNLQSGNTQAATSDVNTQGVLPGMVWQDRDVYLQGPIWAKIPHTDGHFHPSPLMGGFGPKHPPPQILIKNTPVPANPSTTFSAAKFASFITQYSTGQVSVEIEWELQKENSKRWNPEIQYTSNYNKSVNVDFTVDTNGVYSEPRPIGTRYLTRNL

SEQ ID NO: 2614 - protein, 735 aa, Artificial Sequence
  Description of Artificial Sequence: Synthetic polypeptide
MAADGYLPDWLEDTLSEGIRQWWKLKPGPPPPKPAERHKDDSRGLVLPGYKYLGPFNGLDKGEPVNEADAAALEHDKAYDRQLDSGDNPYLKYNHADAEFQERLKEDTSFGGNLARAVFQAKKRVLEPLGLVEEPVKTAPGKKRPVEHSPAELDSSSGTGKSGQQPARKRLNFGQTGDADSVPDPQPLGQPPAAPSGLGTNTMASGSGAPMADNNEGADGVGNSSGNWHCDSTWMGDRVITTSTRTWALPTYNNHLYKQISSQSGASNDNHYFGYSTPWGYFDFNRFHCHFSPRDWQRLINNNWGFRPKRLNFKLFNIQVKEVTQNDGTTTIANNLTSTVQVFTDSEYQLPYVLGSAHQGCLPPFPADVFMVPQYGYLTLNNGSQAVGRSSFYCLEYFPSQMLRTGNNFTFSYTFEDVPFHSSYAHSQSLDRLMNPLIDQYLYYLSRTNTPSGTTTQSRLQFSQAGASDIRDQSRNWLPGPCYRQQRVSKTAADNNNSDYSWTGATKYHLNGRDSLVNPGTAMASHKDDEEKYFPQSGVLIFRKQDSGKTNVDIEKVMITDEEEIRTTNPVATEQYGSVSTNLQSGNTQAATSDVNTQGVLPGMVWQDRDVYLQGPIWAKIPHTDGHFHPSPLMGGFGPKHPPPQILIKNTPVPANPSTTFSAAKFASFITQYSTGQVSVEIEWELQKENSKRWNPEIQYTSNYNKSVNVDFTVDTNGVYSEPRPIGTRYLTRNL

SEQ ID NO: 2615 - protein, 735 aa, Artificial Sequence
  Description of Artificial Sequence: Synthetic polypeptide
MAADGYLPDWLEDTLSEGIRQWWKLKPGPPPPKPAERHKDDSRGLVLPGYKYLGPFNGLDKGEPVNEADAAALEHDKAYDRQLDSGDNPYLKYNHADAEFQERLKEDTSFGGNLARAVFQAKKRVLEPLGLVEEPVKTAPGKKRPVEHSPAELDSSSGTGKSGQQPARKRLNFGQTGDADSVPDPQPLGQPPAAPSGLGTNTMASGSGAPMADNNEGADGVGNSSGNWHCDSTWMGDRVITTSTRTWALPTYNNHLYKQISSQSGASNDNHYFGYSTPWGYFDFNRFHCHFSPRDWQRLINNNWGFRPKRLNFKLFNIQVKEVTQNDGTTTIANNLTSTVQVFTDSEYQLPYVLGSAHQGCLPPFPADVFMVPQYGYLTLNNGSQAVGRSSFYCLEYFPSQMLRTGNNFTFSYTFEDVPFHSSYAHSQSLDRLMNPLIDQYLYYLSRTNTPSGTTTQSRLQFSQAGASDIRDQSRNWLPGPCYRQQRVSKTAADNNNSDYSWTGATKYHLNGRDSLVNPGTAMASHKDDEEKYFPQSGVLIFGKRDSGKTNVDIEKVMITDEEEIRTTNPVATEQYGSVSTNLQSGNTQAATSDVNTQGVLPGMVWQDRDVYLQGPIWAKIPHTDGHFHPSPLMGGFGPKHPPPQILIKNTPVPANPSTTFSAAKFASFITQYSTGQVSVEIEWELQKENSKRWNPEIQYTSNYNKSVNVDFTVDTNGVYSEPRPIGTRYLTRNL

SEQ ID NO: 2616 - protein, 735 aa, Artificial Sequence
  Description of Artificial Sequence: Synthetic polypeptide
MAADGYLPDWLEDTLSEGIRQWWKLKPGPPPPKPAERHKDDSRGLVLPGYKYLGPFNGLDKGEPVNEADAAALEHDKAYDRQLDSGDNPYLKYNHADAEFQERLKEDTSFGGNLARAVFQAKKRVLEPLGLVEEPVKTAPGKKRPVEHSPAELDSSSGTGKSGQQPARKRLNFGQTGDADSVPDPQPLGQPPAAPSGLGTNTMASGSGAPMADNNEGADGVGNSSGNWHCDSTWMGDRAITTSTRTWALPTYNNHLYKQISSQSGASNDNHYFGYSTPWGYFDFNRFHCHFSPRDWQRLINNNWGFRPKRLNFKLFNIQVKEVTQNDGTTTIANNLTSTVQVFTDSEYQLPYVLGSAHQGCLPPFPADVFMVPQYGYLTLNNGSQAVGRSSFYCLEYFPSQMLRTGNNFTFSYTFEDVPFHSSYAHSQSLDRLMNPLIDQYLYYLSRTNTPSGTTTQSRLQFSQAGASDIRDQSRNWLPGPCYRQQRVSKTAADNNNSDYSWTGATKYHLNGRDSLVNPGTAMASHKDDEEKYFPQSGVLIFGKQDSGKTNVDIEKVMITDEEEIRTTNPVATEQYGSVSTNLQSGNTQAATSDVNTQGVLPGMVWQDRDVYLQGPIWAKIPHTDGHFHPSPLMGGFGPKHPPPQILIKNTPVPANPSTTFSAAKFASFITQYSTGQVSVEIEWELQKENSKRWNPEIQYTSNYNKSVNVDFTVDTNGVYSEPRPIGTRYLTRNL

SEQ ID NO: 2617 - protein, 735 aa, Artificial Sequence
  Description of Artificial Sequence: Synthetic polypeptide
MAADGYLPDWLEDTLSEGIRQWWKLKPGPPPPKPAERHKDDSRGLVLPGYKYLGPFNGLDKGEPVNEADAAALEHDKAYDRQLDSGDNPYLKYNHADAEFQERLKEDTSFGGNLARAVFQAKKRVLEPLGLVEEPVKTAPGKKRPVEHSPAELDSSSGTGKSGQQPARKRLNFGQTGDADSVPDPQPLGQPPAAPSGLGTNTMASGSGAPMADNNEGADGVGNSSGNWHCDSTWMGDRVITTSTRTWALPTYNNHLYKQISSQSGASNDNHYFGYSTPWGYFDFNRFHCHFSPRDWQRLINNNWGFRPKRLNFKLFNIQVKEVTQNDGTTTIANNLTSTVQVFTDSEYQLPYVLGSAHQGCLPPFPADVFMVPQYGYLTLNNGSQAVGRSSFYCLEYFPSQMLRTGNNFTFSYTFEDVPFHSSYAHSQSLDRLMNPLIDQYLYYLSRTNTPSGTTTQSRLQFSQAGASDIRDQSRNWLPGPCYRQQRVSKTAADNNNSDYSWTGATKYHLNGRDSLVNPGTAMASHKDDEEKYFPQSGVLIFGKQDSGKTNVDIEKVMITDEEEIRTTNPVATEQYGSVSTNLQSGNTQAATSDVNTQGVLPGMVWQDRDVYLQGPIWAKIPHTDGHFHPSPLMGGFGPKHPPPQILIKNTPVPANPSTTFSAAKFAYFITQYSTGQVSVEIEWELQKENSKRWNPEIQYTSNYNKSVNVDFTVDTNGVYSEPRPIGTRYLTRNL

SEQ ID NO: 2618 - protein, 735 aa, Artificial Sequence
  Description of Artificial Sequence: Synthetic polypeptide
MAADGYLPDWLEDTLSEGIRQWWKLKPGPPPPKPAERHKDDSRGLVLPGYKYLGPFNGLDKGEPVNEADAAALEHDKAYDRQLDSGDNPYLKYNHADAEFQERLKEDTSFGGNLARAVFQAKKRVLEPLGLVEEPVKTAPGKKRPVEHSPAELDSSSGTGKSGQQPARKRLNFGQTGDADSVPDPQPLGQPPAAPSGLGTNTMASGSGAPMADNNEGADGVGNSSGNWHCDSTWMGDRVITTSTRTWALPTYNNHLYKQISSQSGASNDNHYFGYSTPWGYFGFNRFHCHFSPRDWQRLINNNWGFRPKRLNFKLFNIQVKEVTQNDGTTTIANNLTSTVQVFTDSEYQLPYVLGSAHQGCLPPFPADVFMVPQYGYLTLNNGSQAVGRSSFYCLEYFPSQMLRTGNNFTFSYTFEDVPFHSSYAHSQSLDRLMNPLIDQYLYYLSRTNTPSGTTTQSRLQFSQAGASDIRDQSRNWLPGPCYRQQRVSKTAADNNNSDYSWTGATKYHLNGRDSLVNPGTAMASHKDDEEKYFPQSGVLIFGKQDSGKTNVDIEKVMITDEEEIRTTNPVATEQYGSVSTNLQSGNTQAATSDVNTQGVLPGMVWQDRDVYLQGPIWAKIPHTDGHFHPSPLMGGFGPKHPPPQILIKNTPVPANPSTTFSAAKFAYFITQYSTGQVSVEIEWELQKENSKRWNPEIQYTSNYNKSVNVDFTVDTNGVYSEPRPIGTRYLTRNL

SEQ ID NO: 2619 - protein, 735 aa, Artificial Sequence
  Description of Artificial Sequence: Synthetic polypeptide
MAADGYLPDWLEDTLSEGIRQWWKLKPGPPPPKPAERHKDDSRGLVLPGYKYLGPFNGLDKGEPVNEADAAALEHDKAYDRQLDSGDNPYLKYNHADAEFQERLKEDTSFGGNLARAVFQAKKRVLEPLGLVEEPVKTAPGKKRPVEHSPAELDSSSGTGKSGQQPARKRLNFGQTGDADSVPDPQPLGQPPAAPSGLGTNTMASGSGAPMADNNEGADGVGNSSGNWHCDSTWMGDRVITTSTRTWALPTYNNHLYKQISSQSGASNDNRYFGYSTPWGYFDFNRFHCHFSPRDWQRLINNNWGFRPKRLNFKLFNIQVKEVTQNDGTTTIANNLTSTVQVFTDSEYQLPYVLGSAHQGCLPPFPADVFMVPQYGYLTLNNGSQAVGRSSFYCLEYFPSQMLRTGNNFTFSYTFEDVPFHSSYAHSQSLDRLMNPLIDQYLYYLSRTNTPSGTTTQSRLQFSQAGASDIRDQSRNWLPGPCYRQQRVSKTAADNNNSDYSWTGATKYHLNGRDSLVNPGTAMASHKDDEEKYFPQSGVLIFGKQDSGKTNVDIEKVMITDEEEIRTTNPVATEQYGSVSTNLQSGNTQAATSDVNTQGVLPGMVWQDRDVYLQGPIWAKIPHTDGHFHPSPLMGGFGPKHPPPQILIKNTPVPANPSTTFSAAKFASFITQYSTGQVSVEIEWELQKENSKRWNPEIQYTSNYNKSVNVDFTVDTNGVYSEPRPIGTRYLTRNL

SEQ ID NO: 2620 - protein, 735 aa, Artificial Sequence
  Description of Artificial Sequence: Synthetic polypeptide
MAADGYLPDWLEDTLSEGIRQWWKLKPGPPPPKPAERHKDDSRGLVLPGYKYLGPFNGLDKGEPVNEADAAALEHDKAYDRQLDSGDNPYLKYNHADAEFQERLKEDTPFGGNLARAVFQAKKRVLEPLGLVEEPVKTAPGKKRPVEHSPAELDSSSGTGKSGQQPARKRLNFGQTGDADSVPDPQPLGQPPAAPSGLGTNTMASGSGAPMADNNEGADGVGNSSGNWHCDSTWMGDRVITTSTRTWALPTYNNHLYKQISSQSGASNDNHYFGYSTPWGYFDFNRFHCHFSPRDWQRLINNNWGFRPKRLNFKLFNIQVKEVTQNDGTTTIANNLTSTVQVFTDSEYQLPYVLGSAHQGCLPPFPADVFMVPQYGYLTLNNGSQAVGRSSFYCLEYFPSQMLRTGNNFTFSYTFEDVPFHSSYAHSRSLDRLMNPLIDQYLYYLSRTNTPSGTTTQSRLQFSQAGASDIRDQSRNWLPGPCYRQQRVSKTAADNNNSDYSWTGATKYHLNGRDSLVNPGTAMASHKDDEEKYFPQSGVLIFGKQDSGKTNVDIEKVMITDEEEIRTTNPVATEQYGSVSTNLQSGNTQAATSDVNTQGVLPGMVWQDRDVYLQGPIWAKIPHTDGHFHPSPLMGGFGPKHPPPQILIKNTPVPANPSTTFSAAKFASFITQYSTGQVSVEIEWELQKENSKRWNPEIQYTSNYNKSVNVDFTVDTNGVYSEPRPIGTRYLTRNL

SEQ ID NO: 2621 - protein, 735 aa, Artificial Sequence
  Description of Artificial Sequence: Synthetic polypeptide
MAADGYLPDWLEDTLSEGIRQWWKLKPGPPPPKPAERHKDGSRGLVLPGYKYLGPFNGLDKGEPVNEADAAALEHDKAYDRQLDSGDNPYLKYNHADAEFQERLKEDTSFGGNLARAVFQAKKRVLEPLGLVEEPVKTAPGKKRPVEHSPAELDSSSGTGKSGQQPARKRLNFGQTGDADSVPDPQPLGQPPAAPSGLGTNTMASGSGAPMADNNEGADGVGNSSGNWHCDSTWMGDRVITTSTRTWALPTYNNHLYKQISSQSGASNDNHYFGYSTPWGYFDFNRFHCHFSPRDWQRLINNNWGFRPKRLNFKLFNIQVKEVTQNDGTTTIANNLTSTVQVFTDSEYQLPYVLGSAHQGCLPPFPADVFMVPQYGYLTLNNGSQAVGRSSFYCLEYFPSQMLRTGNNFTFSYTFEDVPFHSSYAHSQSLDRLMNPLIDQYLYYLSRTNTPSGTTTQSRLQFSQAGASDIRDQSRNWLPGPCYRQQRVSKTAADNNNSDYSWTGATKYHLNGRDSLVNPGTAMASHKDDEEKYFPQSGVLIFGKQDSGKTNVDIEKVMITDEEEIRTTNPVATEQYGSVSTNLQSGNTQAATSDVNTQGVLPGMVWQDRDVYLQGPIWAKIPHTDGHFHPSPLMGGFGPKHPPPQILIKNTPVPANPSTTFSAAKFASFITQYSTGQVSVEIEWELQKENSKRWNPEIQYTSNYNKSVNVDFTVDTNGVYSEPRPIGTRYLTRNL

SEQ ID NO: 2622 - protein, 735 aa, Artificial Sequence
  Description of Artificial Sequence: Synthetic polypeptide
MAADGYLPDWLEDTLSEGIRQWWKLKPGPPPPKPAERHKDDSRGLVLPGYKYLGPFNGLDKGEPVNEADAAALEHDKAYDRQLDSGDNPYLKYNHADAGFQERLKEDTSFGGNLARAVFQAKKRVLEPLGLVEEPVKTAPGKKRPVEHSPAELDSSSGTGKSGQQPARKRLNFGQTGDADSVPDPQPLGQPPAAPSGLGTNTMASGSGAPMADNNEGADGVGNSSGNWHCDSTWMGDRVITTSTRTWALPTYNNHLYKQISSQSGASNDNHYFGYSTPWGYFDFNRFHCHFSPRDWQRLINNNWGFRPKRLNFKLFNIQVKEVTQNDGTTTIANNLTSTVQVFTDSEYQLPYVLGSAHQGCLPPFPADVFMVPQYGYLTLNNGSQAVGRSSFYCLEYFPSQMLRTGNNFTFSYTFEDVPFHSSYAHSQSLDRLMNPLIDQYLYYLSRTNTPSGTTTQSRLQFSQAGASDIRDQSRNWLPGPCYRQQRVSKTAADNNNSDYSWTGATKYHLNGRDSLVNPGTAMASHKDDEEKYFPQSGVLIFGKQDSGKTNVDIEKVMITDEEEIRTTNPVATEQYGSVSTNLQSGNTQAATSDVNTQGVLPGMVWQDRDVYLQGPIWAKIPHTDGHFHPSPLMGGFGPKHPPPQILIKNTPVPANPSTTFSAAKFASFITQYSTGQVSVEIEWELQKENSKRWNPEIQYTSNYNKSVNVDFTVDTNGVYSEPRPIGTRYLTRNL

SEQ ID NO: 2623 - protein, 735 aa, Artificial Sequence
  Description of Artificial Sequence: Synthetic polypeptide
MAADGYLPDWLEDTLSEGIRQWWKLKPGPPPPKPAERHKDDSRGLVLPGYKYLGPFNGLDKGEPVNEADAAALEHDKAYDRQLDSGDNPYLKYNHADAEFQERLKEDTSFGGNLARAVFQAKKRVLEPLGLVEEPVKTAPGKKRPVEHSPAELDSSSGTGKSGQQPARKRLNFGQTGDADSVPDPQPLGQPPAAPSGLGTNTMASGSGAPMADNNEGADGVGNSSGNWHCDSTWMGDRVITTSTRTWALPTYNNHLYKQISSQSGASNDNHYLGYSTPWGYFDFNRFHCHFSPRDWQRLINNNWGFRPKRLNFKLFNIQVKEVTQNDGTTTIANNLTSTVQVFTDSEYQLPYVLGSAHQGCLPPFPADVFMVPQYGYLTLNNGSQAVGRSSFYCLEYFPSQMLRTGNNFTFSYTFEDVPFHSSYAHSQSLDRLMNPLIDQYLYYLSRTNTPSGTTTQSRLQFSQAGASDIRDQSRNWLPGPCYRQQRVSKTAADNNNSDYSWTGATKYHLNGRDSLVNPGTAMASHKDDEEKYFPQSGVLIFGKQDSGKTNVDIEKVMITDEEEIRTTNPVATEQYGSVSTNLQSGNTQAATSDVNTQGVLPGMVWQDRDVYLQGPIWAKIPHTDGHFHPSPLMGGFGPKHPPPQILIKNTPVPANPSTTFSAAKFASFITQYSTGQVSVEIERELQKENSKRWNPEIQYTSNYNKSVNVDFTVDTNGVYSEPRPIGTRYLTRNL

SEQ ID NO: 2624 - protein, 735 aa, Artificial Sequence
  Description of Artificial Sequence: Synthetic polypeptide
MAADGYLPDWLEDTLSEGIRQWWKLKPGPPPPKPAERHKDDSRGLVLPGYKYLGPFNGLDKGEPVNEADAAALEHDKAYDRQLDSGDNPYLKYNHADAEFQERLKEDTSFGGNLARAVFQAKKRVLEPLGLVEEPVKTAPGKKRPVEHSPAELDSSSGTGKSGQQPARKRLNFGQTGDADSVPDPQPLGQPPAAPSGLGTNTMASGSGAPMADNNEGADGVGNSSGNWHCDSTWMGDRVITTSTRTWALPTYNNHLYKQISSQSGASNDNHYFGYSTPWGYFDFNRFHCHFSPRDWQRLINNNWGFRPKRLNFKLFNIQVKEVTQNDGTTTIANNLTSTVQVFTDSEYQLPYVLGSAHQGCLPPFPADVFMVPQYGYLTLNNGSQAVGRSSFYCLEYFPSQMLRTGNNFTFSYTFEDVPFHSSYAHSQSLDRLMNPLIDQYLYYLSRTNTPSGTTTQSRLQFSQAGASDIRDQSRNWLPGPCYRQQRVSKTAADNNNSDYSWTGATKYHLNGRDSLVNPGTAMASHKDDEEKYFPQSGVLIFGKQDSGKANVDIEKVMITDEEEIRTTNPVATEQYGSVSTNLQSGNTQAATSDVNTQGVLPGMVWQDRDVYLQGPIWAKIPHTDGHFHPSPLMGGFGPKHPPPQILIKNTPVPANPSTTFSAAKFASFITQYSTGQVSVEIEWELQKENSKRWNPEIQYTSNYNKSVNVDFTVDTNGVYSEPRPIGTRYLTRNL

SEQ ID NO: 2625 - protein, 735 aa, Artificial Sequence
  Description of Artificial Sequence: Synthetic polypeptide
MAADGYLPDWLEDTLSEGIRQWWKLKPGPPPPKPAERHKDDSRGLVLPGYKYLGPFNGLDKGEPVNEADAAALEHDKAYDRQLDSGDNPYLKYNHADAEFQERLKEDTSFGGNLARAVFQAKKRVLEPLGLVEEPVKTAPGKKRPVEHSPAELDSSSGTGKSGQQPARKRLNFGQTGDADSVPDPQPLGQPPAAPSGLGTNTMASGSGAPMADNNEGADGVGNSSGNWHCDSTWMGDRVITTSTRTWALPTYNNHLYKQISSQSGASNDNHYFGYSTPWGYFDFNRFHCHFSPRDWQRLTNNNWGFRPKRLNFKLFNIQVKEVTQNDGTTTIANNLTSTVQVFTDSEYQLPYVLGSAHQGCLPPFPADVFMVPQYGYLTLNNGSQAVGRSSFYCLEYFPSQMLRTGNNFTFSYTFEDVPFHSSYAHSQSLDRLMNPLIDQYLYYLSRTNTPSGTTTQSRLQFSQAGASDIRDQSRNWLPGPCYRQQRVSKTAADNNNSDYSWTGATKYHLNGRDSLVNPGTAMASHKDDEEKYFPQSGVLIFGKQDSGKTNVDIEKVMITDEEEIRTTNPVATEQYGSVSTNLQSGNTQAATSDVNTQGVLPGMVWQDRDVYLQGPIWAKIPHTDGHFHPSPLMGGFGPKHPPPQILIKNTPVPANPSTTFSAAKFASFITQYSTGQVSVEIEWELQKENSKRWNPEIQYTSNYNKSVNVDFTVDTNGVYSEPRPIGTRYLTRNL

SEQ ID NO: 2626 - protein, 735 aa, Artificial Sequence
  Description of Artificial Sequence: Synthetic polypeptide
MAADGYLPDWLEDTLSEGIRQWWKLKPGPPPPKPAERHKDDSRGLVLPGYKYLGPFNGLDKGEPVNEADAAALEHDKAYDRQLDSGDNPYLKYNHADAEFQERLKEDTSFGGNLARAVFQAKKRVLEPLGLVEEPVKTAPGKKRPVEHSPAELDSSSGTGKSGQQPARKRLNFGQTGDADSVPDPQPLGQPPAAPSGLGTNTMASGSGAPMADNNEGADGVGNSSGNWHCDSTWMGDRVITTSTRTWALPTYNNHLYKQISSQSGASNDNHYFGYSTPWGYFDFNRFHCHFSPRDWQRLINNNWGFRPKRLNFKLFNIQVKEVTQNDGTTTIANNLTSTVRVFTDSEYQLPYVLGSAHQGCLPPFPADVFMVPQYGYLTLNNGSQAVGRSSFYCLEYFPSQMLRTGNNFTFSYTFEDVPFHSSYAHSQSLDRLMNPLIDQYLYYLSRTNTPSGTTTQSRLQFSQAGASDIRDQSRNWLPGPCYRQQRVSKTAADNNNSDYSWTGATKYHLNGRDSLVNPGTAMASHKDDEEKYFPQSGVLIFGKQDSGKTNVDIEKVMITDEEEIRTTNPVATEQYGSVSTNLQSGNTQAATSDVNTQGVLPGMVWQDRDVYLQGPIWAKIPHTDGHFHPSPLMGGFGPKHPPPQILIKNTPVPANPSTTFSAAKFASFITQYSTGQVSVEIEWELQKENSKRWNPEIQYTSNYNKSVNVDFTVDTNGVYSEPRPIGTRYLTRNL

SEQ ID NO: 2627 - protein, 735 aa, Artificial Sequence
  Description of Artificial Sequence: Synthetic polypeptide
MAADGYLPDWLEDTLSEGIRQWWKLKPGPPPPKPAERHKDDSRGLVLPGYKYLGPFNGLDKGEPVNEADAAALEHDKAYDRQLDSGDNPYLKYNHADAEFQERLKEDTSFGGNLARAVFQAKKRVLEPLGLVGEPVKTAPGKKRPVEHSPAELDSSSGTGKSGQQPARKRLNFGQTGDADSVPDPQPLGQPPAAPSGLGTNTMASGSGAPMADNNEGADGVGNSSGNWHCDSTWMGDRVITTSTRTWALPTYNNHLYKQISSQSGASNDNHYFGYSTPWGYFDFNRFHCHFSPRDWQRLINNNWGFRPKRLNFKLFNIQVKEVTQNDGTTTIANNLTSTVQVFTDSEYQLPYVLGSAHQGCLPPFPADVFMVPQYGYLTLNNGSQAVGRSSFYCLEYFPSQMLRTGNNFTFSYTFEDVPFHSSYAHSQSLDRLMNPLIDQYLYYLSRTNTPSGTTTQSRLQFSQAGASDIRDQSRNWLPGPCYRQQRVSKTAADNNNSDYSWTGATKYHLNGRDSLVNPGTAMASHKDDEEKYFPQSGVLIFGKQDSGKTNVDIEKVMITDEEEIRTTNPVATEQYGSVSTNLQSGNTQAATSDVNTQGVLPGMVWQDRDVYLQGPIWAKIPHTDGHFHPSPLMGGFGPKHPPPQILIKNTPVPANPSTTFSAAKFASFITQYSTGQVSVEIEWELQKENSKRWNPEIQYTSNYNKSVNVDFTVDTNGVYSEPRPIGTRYLTRNL

SEQ ID NO: 2628 - protein, 735 aa, Artificial Sequence
  Description of Artificial Sequence: Synthetic polypeptide
MAADGYLPDWLEDTLSEGIRQWWKLKPGPPPPKPAERHKDDSRGLVLPGYKYLGPFNGLDKGEPVNEADAAALEHDKAYDRQLDSGDNPYLKYNHADAEFQERLKEDTSFGGNLARAVFQAKKRVLEPLGLVEEPVKTAPGKKRPVEHSPAELDSSSGTGKSGQQPARKRLNFGQTGDADSVPGPQPLGQPPAAPSGPGTNTMASGSGAPMADNNEGADGVGNSSGNWHCDSTWMGDRVVTTSTRTWALPTYNNHLYKQISSQSGASNDNHYFGYSTPWGYFDFNRFHCHFSPRDWQRLINNNWGFRPKRLNFKLFNIQVKEVTQNDGTTTIANNLTSTVQVFTDSEYQLPYVLGSAHQGCLPPFPADVFMVPQYGYLTLNNGSQAVGRSSFYCLEYFPSQMLRTGNNFTFSYTFEDVPFHSSYAHSQSLDRLMNPLIDQYLYYLSRTNTPSGTTTQSRLQFSQAGASDIRDQSRNWLPGPCYRQQRVPKTAADNNNSDYSWTGATKYHLNGRDSLVNPGTAMASHKDDEEKYFPQSGVLIFGKQDSGKTNVDIEKVMITDEEEIRTTNPVATEQYGSVSTNLQSGNTQAATSDVNTQGVLPGMVWQDRDVYLQGPIWAKIPHTDGHFHPSPLMGGFGPKHPPPQILIKNTPVPANPSTTFSAAKFASFITQYSTGQVSVEIEWELQKENSKRWNPEIQYTSNYNKSVNVDFTVDTNGVYSEPRPIGTRYLTRNL

SEQ ID NO: 2629 - protein, 735 aa, Artificial Sequence
  Description of Artificial Sequence: Synthetic polypeptide
MAADGYLPDWLEDTLSEGIRQWWKLKPGPPPPKPAERHKDDSRGLVLPGYKYLGPFNGLDKGEPVNEADAAALEHDKAYDRQLDSGDNPYLKYNHADAEFQERLKEDTSFGGNLARAVFQAKKRVLEPLGLVEGPVKTAPGKKRPVEHSPAELDSSSGTGKSGQQPARKRLNFGQTGDADSVPDPQPLGQPPAAPSGLGTNTMASGSGAPMADNNEGADGVGNSSGNWHCDSTWMGDRVITTSTRTWALPTYNNHLYKQISSQSGASNDNHYFGYSTPWGYFDFNRFHCHFSPRDWQRLINNNWGFRPKRLNFKLFNIQVKEVTQNDGTTTIANNLTSTVQVFTDSEYQLPYVLGSAHQGCLPPFPADVFMVPQYGYLTLNNGSQAVGRSSFYCLEYFPSQMLRTGNNFTFSYTFEDVPFHSSYAHSQSLDRLMNPLIDQYLYYLSRTNTPSGTTTQSRLQFSQAGASDIRDQSRNWLPGPCYRQQRVSKTAADNNNSDYSWTGATKYHLNGRDSLVNPGTAMASHKDDEEKYFPQSGVLIFGKQDSGKTNVDIEKVMITDEEEIRTTNPVATEQYGSVSTNLQSGNTQAATSDVNTQGVLPGMVWQDRDVYLQGPIWAKIPHTDGHFHPSPLMGGFGPKHPPPQILIKNTPVPANPSTTFSAAKFASFITQYSTGQVSVEIEWELQKENSKRWNPEIQYTSNYNKSVNVDFTVDTNGVYSEPRPIGTRYLTRNL

SEQ ID NO: 2630 - protein, 735 aa, Artificial Sequence
  Description of Artificial Sequence: Synthetic polypeptide
MAADGYLPDWLEDTLSEGIRQWWKLKPGPPPPKPAERHKDDSRGLVLPGYKYLGPFNGLDKGEPVNEADAAALEHDKAYDRQLDSGDNPYLKYNHADAEFQERLKEDTSFGGNLARAVFQAKKRVLEPLGLVEEPVKTAPGKKRPVEHSPAELDSSSGTGKSGQQPARKRLNFGQTGDADSVPDPQPLGQPPAAPSGLGTNTMASGSGAPMADNNEGADGVGNSSGNWHCDSTWMGDRVITTSTRTWALPTYNNHLYKQISSQSGASNDNHYLGYSTPWGYFDFNRFHCHFSPRDWQRLINNNWGFRPKRLNFKLFNIQVKEVTQNDGTTTIANNLTSTVQVFTDSEYQLPYVLGSAHQGCLPPFPADVFMVPQYGYLTLNNGSQAVGRSSFYCLEYFPSQMLRTGNNFTFSYTFEDVPFHSSYAHSQSLDRLMNPLIDQYLYYLSRTNTPSGTTTQSRLQFSQAGASDIRDQSRNWLPGPCYRQQRVSKTAADNNNSDYSWTGATKYHLNGRDSLVNPGTAMASHKDDEEKYFPQSGVLIFGKQDSGKTNVDIEKVMITDEEEIRTTNPVATEQYGSVSTNLQSGNTQAATSDVNTQGVLPGMVWQDRDVYLQGPIWAKIPHTDGHFHPSPLMGGFGPKHPPPQILIKNTPVPANPSTTFSAAKFASFITQYSTGQVSVEIEWELQKENSKRWNPEIQYTSNYNKSVNVDFTVDTNGVYSEPRPIGTRYLTRNL

SEQ ID NO: 2631 - protein, 735 aa, Artificial Sequence
  Description of Artificial Sequence: Synthetic polypeptide
MAADGYLPDWLEDTLSEGIRQWWKLKPGPPPPKPAERHKDDSRGLVLPGYKYLGPFNGLDKGEPVNEADAAALEHDKAYDRQLDSGDNPYLKYNHADAEFQERLKEDTSFGGNLARAVFQAKKRVLEPLGLVEEPVKTAPGKKGPVEHSPAELDSSSGTGKSGQQPARKRLNFGQTGDADSVPDPQPLGQPPAAPSGLGTNTMASGSGAPMADNNEGADGVGNSSGNWHCDSTWMGDRVITTSTRTWALPTYNNHLYKQISSQSGASNDNHYFGYSTPWGYFDFNRFHCHFSPRDWQRLINNNWGFRPKRLNFKLFNIQVKEVTQNDGTTTIANNLTSTVQVFTDSEYQLPYVLGSAHQGCLPPFPADVFMVPQYGYLTLNNGSQAVGRSSFYCLEYFPSQMLRTGNNFTFSYTFEDVPFHSSYAHSQSLDRLMNPLIDQYLYYLSRTNTPSGTTTQSRLQFSQAGASDIRDQSRNWLPGPCYRQQRVSKTAADNNNSDYSWTGATKYHLNGRDSLVNPGTAMASHKDDEEKYFPQSGVLIFGKQDSGKTNVDIEKVMITDEEEIRTTNPVATEQYGSVSTNLQSGNTQAATSDVNTQGVLPGMVWQDRDVYLQGPIWAKIPHTDGHFHPSPLMGGFGPKHPPPQILIKNTPVPANPSTTFSAAKFASFITQYSTGQVSVEIEWELQKENSKRWNPEIQYTSNYNKSVNVDFTVDTNGVYSEPRPIGTRYLTRNL

SEQ ID NO: 2632 - protein, 735 aa, Artificial Sequence
  Description of Artificial Sequence: Synthetic polypeptide
MAADGYLPDWLEDTLSEGIRQWWKLKPGPPPPKPAERHKDDSRGLVLPGYKYLGPFNGLDKGEPVNEADAAALEHDKAYDRQLDSGDNPYLKYNHADAEFQERLKEDTPFGGNLARAVFQAKKRVLEPLGLVEEPVKTAPGKKRPVEHSPAELDSSSGTGKSGQQPARKRLNFGQTGDADSVPDPQPLGQPPAAPSGLGTNTMASGSGAPMADNNEGADGVGNSSGNWHCDSTWMGDRVITTSTRTWALPTYNNHLYKQISSQSGASNDNHYFGYSTPWGYFDFNRFHCHFSPRDWQRLINNNWGFRPKRLNFKLFNIQVKEVTQNDGTTTIANNLTSTVQVFTDSEYQLPYVLGSAHQGCLPPFPADVFMVPQYGYLTLNNGSQAVGRSSFYCLEYFPSQMLRTGNNFTFSYTFEDVPFHSSYAHSQSLDRLMNPLIDQYLYYLSRANTPSGTTTQSRLQFSQAGASDIRDQSRNWLPGPCYRQQRVSKTAADNNNSDYSWTGATKYHLNGRDSLVNPGTAMASHKDDEEKYFPQSGVLIFGKQDSGKTNVDIEKVMITDEEEIRTTNPVATEQYGSVSTNLQSGNTQAATSDVNTQGVLPGMVWQDRDVYLQGPIWAKIPHTDGHFHPSPLMGGFGPKHPPPQILIKNTPVPANPSTTFSAAKFASFITQYSTGQVSVEIEWELQKENSKRWNPEIQYTSNYNKSVNVDFTVDTNGVYSEPRPIGTRYLTRNL

SEQ ID NO: 2633 - protein, 735 aa, Artificial Sequence
  Description of Artificial Sequence: Synthetic polypeptide
MAADGYLPDWLEDTLSEGIRQWWKLKPGPPPPKPAERHKDDSRGLVLPGYKYLGPFNGLDKGEPVNEADAAALEHDKAYDRQLDSGDNPYLKYNHADAEFQERLKEDTSFGGNLARAVFQAKKRVLEPLGLVEEPVKTAPGKKRPVEHSPAELDSSSGTGKSGQQPARKRLNFGQTGDADSVPDPQPLGQPPAAPSGLGTNTMASGSGAPMADNNEGADGVGNSSGNWHCDSTWMGDRVITTSTRTWALPTYNNHLYKQISSQSGASNDNHYFGYSAPWGYFDFNRFHCHFSPRDWQRLINNNWGFRPKRLNFKLFNIQVKEVTQNDGTTTIANNLTSTVQVFTDSEYQLPYVLGSAHQGCLPPFPADVFMVPQYGYLTLNNGSQAVGRSSFYCLEYFPSQMLRTGNNFTFSYTFEDVPFHSSYAHSQSLDRLMNPLIDQYLYYLSRTNTPSGTTTQSRLQFSQAGASDIRDQSRNWLPGPCYRQQRVSKTAADNNNSDYSWTGATKYHLNGRDSLVNPGTAMASHKDDEEKYFPQSGVLIFGKQDSGKTNVDIEKVMITDEEEIRTTNPVATEQYGSVSTNLQSGNTQAATSDVNTQGVLPGMVWQDRDVYLQGPIWAKIPHTDGHFHPSPLMGGFGPKHPPPQILIKNTPVPANPSTTFSAAKFASFITQYSTGQVSVEIEWELQKENSKRWNPEIQYTSNYNKSVNVDFTVDTNGVYSEPRPIGTRYLTRNL

SEQ ID NO: 2634 - protein, 735 aa, Artificial Sequence
  Description of Artificial Sequence: Synthetic polypeptide
MAADGYLPDWLEDTLSEGIRQWWKLKPGPPPPKPAERHKDDSRGLVLPGYKYLGPFNGLDKGEPVNEADAAALEHDKAYDRQLDSGDNPYLKYNHADAEFQERLKEDTSFGGNLARAVFQAKKRVLEPLGLVEEPVKTAPGKKRPVEHSPAELDSSSGTGKSGQQPARKRLNFGQTGDADSVPDPQPLGQPPAAPSGLGTNTMASGSGAPMADNNEGADGVGNSSGNWHCDSTWMGDRVITTSTRTWALPTYNNHLYKQISSQSGASNDNHYFGYSTPWGYFDFNRFHCHFSPRDWQRLINNNWGFRPKRLNFKLFNIQVKEVTQNDGTTTIANNLTSTVQVFTDSEYQLPYVLGSAHQGCLPPFPADVFMVPQYGYLTLNNGSQAVGRSSFYCLEYFPSQMLRTGNNFTFSYTFEDVPFHSSYAHSQSLDRLMNPLIDQYLYYLSRTNTPSGTTTQSRLQFSQAGASDIRDQSRNWLPGPCYRQQRVSKTAADNNNSDYSWTGATKYHLNGRDSLVNPGTAMASHKDDEEKYFPQSGVLIFGKQDSGKTNVDIEKVMITDEEEIRTTNPVATEQYGSVSTNLQSGNTQAATSDVNTQGVLPGMVWQDRDVYLQGPIWAKIPHTDGHFHPSPLMGGFGPKHPPPQILIKNTPVPANPSTTFSAAKFASLITQYSTGQVSVEIEWELQKENSKRWNPEIQYTSNYNKSVNVDFTVDTNGVYSEPRPIGTRYLTRNL

SEQ ID NO: 2635 - protein, 735 aa, Artificial Sequence
  Description of Artificial Sequence: Synthetic polypeptide
MAADGYLPDWLEDTLSEGIRQWWKLKPGPPPPKPAERHKDDSRGLVLPGYKYLGPFNGLDKGEPVNEADAAALEHDKAYDRQLDSGDNPYLKYNHADAEFQERLKEDTSFGGNLARAVFQAKKRVLEPLGLVEEPVKTAPGKKRPVEHSPAELDSSSGTGKSGQQPARKGLNFGQTGDADSVPDPQPLGQPPAAPSGLGTNTMASGSGAPMADNNEGADGVGNSSGNWHCDSTWMGDRVITTSTRTWALPTYNNHLYKQISSQSGASNDNHYFGYSTPWGYFDFNRFHCHFSPRDWQRLINNNWGFRPKRLNFKLFNIQVKEVTQNDGTTTIANNLTSTVQVFTDSEYQLPYVLGSAHQGCLPPFPADVFMVPQYGYLTLNNGSQAVGRSSFYCLEYFPSQMLRTGNNFTFSYTFEDVPFHSSYAHSQSLDRLMNPLIDQYLYYLSRTNTPSGTTTQSRLQFSQAGASDIRDQSRNWLPGPCYRQQRVSKTAADNNNSDYSWTGATKYHLNGRDSLVNPGTAMASHKDDEEKYFPQSGVLIFGKQDSGKTNVDIEKVMITDEEEIRTTNPVATEQYGSVSTNLQSGNTQAATSDVNTQGVLPGMVWQDRDVYLQGPIWAKIPHTDGHFHPSPLMGGFGPKHPPPQILIKNTPVPANPSTTFSAAKFASFITQYSTGQVSVEIEWELQKENSKRWNPEIQYTSNYNKSVNVDFTVDTNGVYSEPRPIGTRYLTRNL

SEQ ID NO: 2636 - protein, 735 aa, Artificial Sequence
  Description of Artificial Sequence: Synthetic polypeptide
MAADGYLPDWLEDTLSEGIRQWWKLKPGPPPPKPAERHKDDSRGLVLPGYKYLGPFNGLDKGEPVNEADAAALEHDEAYDRQLDSGDNPYLKYNHADAEFQERLKEDTSFGGNLARAVFQAKKRVLEPLGLVEEPVKTAPGKKRPVEHSPAELDSSSGTGKSGQQPARKRLNFGQTGDADSVPDPQPLGQPPAAPSGLGTNTMASGSGAPMADNNEGADGVGNSSGNWHCDSTWMGDRVITTSTRTWALPTYNNHLYKQISSQSGASNDNHYFGYSTPWGYFDFNRFHCHFSPRDWQRLINNNWGFRPKRLNFKLFNIQVKEVTQNDGTTTIVNNLTSTVQVFTDSEYQLPYVLGSAHQGCLPPFPADVFMVPQYGYLTLNNGSQAVGRSSFYCLEYFPSQMLRTGNNFTFSYTFEDVPFHSSYAHSQSLDRLMNPLIDQYLYYLSRTNTPSGTTTQSRLQFSQAGASDIRDQSRNWLPGPCYRQQRVSKTAADNNNSDYSWTGATKYHLNGRDSLVNPGTAMASHKDDEEKYFPQSGVLIFGKQDSGKTNVDIEKVMITDEEEIRTTNPVATEQYGSVSTNLQSGNTQAATSDVNTQGVLPGMVWQDRDVYLQGPIWAKIPHTDGHFHPSPLMGGFGPKHPPPQILIKNTPVPANPSTTFSAAKFAYFITQYSTGQVSVEIEWELQKENSKRWNPEIQYTSNYNKSVNVDFTVDTNGVYSEPRPIGTRYLTRNL

SEQ ID NO: 2637 - protein, 735 aa, Artificial Sequence
  Description of Artificial Sequence: Synthetic polypeptide
MAADGYLPDWLEDTLSEGIRQWWKLKPGPPPPKPAERHKDDSRGLVLPGYKYLGPFNGLDKGEPVNEADAAALEHDKAYDRQLDSGDNPYLKYNHADAEFQERLKEDTSFGGNLARAVFQAKKRVLEPLGLVEEPVKTAPGKKRPVEHSPAELDSSSGTGKSGQQPARKRLNFGQTGDADSVPDPQPLGQPPAAPSGLGTNTMASGSGAPMADNNEGADGVGNSSGNWHCDSTWMGDRVITTSTRTWALPTYNNHLYKQISSQSGASNDNHYFGYSTPWGYFDFNRFHCHFSPRDWQRLINNNWGFRPKRLNFKLFNIQVKEVTQNDGTTTIANNLTSTVQVFTDSEYQLPYVLGSAHQGCLPPFPADVFMVPQYGYLTLNNGSQAVGRSSFYCLEYFPSQMLRTGNNFTFSYTFEDVPFHSSYAHSQSLDRLMNPLIDQYLYYLSRTNTPSGTTTQSRLQFSQAGASGIRDQSRNWLPGPCYRQQRVSKTAADNNNSDYSWTGATKYHLNGRDSLVNPGTAMASHKDDEEKYFPQSGVLIFGKQDSGKTNVDIEKVMITDEEEIRTTNPVATEQYGSVSTNLQSGNTQAATSDVNTQGVLPGMVWQDRDVYLQGPIWAKIPHTDGHFHPSPLMGGFGPKHPPPQILIKNTPVPANPSTTFSAAKFASFITQYSTGQVSVEIEWELQKENSKRWNPEIQYTSNYNKSVNVDFTVDTNGVYSEPRPIGTRYLTRNL

SEQ ID NO: 2638 - protein, 735 aa, Artificial Sequence
  Description of Artificial Sequence: Synthetic polypeptide
MAADGYLPDWLEDTLSEGIRQWWKLKPGPPPPKPAERHKDDSRGLVLPGYKYLGPFNGLDKGEPVNEADAAALEHDKAYDRQLDSGDNPYLKYNHADAEFQERLKEDTSFGGNLARAVFQAKKRVLEPLGLVEEPVKTAPGKKRPVEHSPAELDSSSGTGKSGQQPARKRLNFGQTGDADSVPDPQPLGQPPAAPSGLGTNTMASGSGAPMADNNEGADGVGNSSGNWHCDSTWMGDRVITTSTRTWALPTYNNHLYKQISSQSGASNDNHYFGYSTPWGYFDFNRFHCHFSPRDWQRLINNNWGFRPKRLNFKLFNIQVKEVTQNDGTTTIANNLTSTVQVFTDSEYQLPYVLGSAHQGCLPPFPADVFMVPQYGYLTLNNGSQAVGRSSFYCLEYFPSQMLRTGNNFTFSYTFEDVPFHSSYAHSQSLDRLMNPLIDQYLYYLSRTNTPSGTTTQSRLQFSQAGASDIRDQSRNWLPGPCYRQQRVSKTAADNNNSDYSWTGATKYHLNGRDSLVNPGTAMASHKDDEEKYFPQSGVLIFGKQDSGKTNVDIEKVVITDEEEIRTTNPVATEQYGSVSTNLQSGNTQAATSDVNTQGVLPGMVWQDRDVYLQGPIWAKIPHTDGHFHPSPLMGGFGPKHPPPQILIKNTPVPANPSTTFSAAKFASFITQYSTGQVSVEIEWELQKENSKRWNPEIQYTSNYNKSVNVDFTVDTNGVYSEPRPIGTRYLTRNL

SEQ ID NO: 2639 - protein, 735 aa, Artificial Sequence
  Description of Artificial Sequence: Synthetic polypeptide
MAADGYLPDWLEDTLSEGIRQWWKLKPGPPPPKPAERHKDDSRGLVLPGYKYLGPFNGLDKGEPVNEADAAALEHDKAYDRQLDSGDNPYLKYNHADAEFQERLKEDTSFGGNLARAVFQAKKRVLEPLGLVEEPVKTAPGKKRPVEHSPAELDSSSGTGKSGQQPARKRLNFGQTGDADSVPDPQPLGQPPAAPSGLGTNTMASGSGAPMADNNEGADGVGNSSGNWHCDSTWMGDRVITTSTRTWALPTYNNHLYKQISSQSGASNDNHYFGYSTPWGYFDFNRFHCHFSPRDWQRLINNNWGFRPKRLNFKLFNIQVKEVTQNDGTTTIANNLTSTVQVFTDSEYQLPYVLGSAHQGCLPPFPADVFMVPQYGYLTLNNGSQAVGRSSFYCLEYFPSQMLRTGNNFTFSYTFEDVPFHSSYAHSQSLDRLMNPLIDQYLYYLSRTNTPSGTTTQSRLQFSQAGASDIRDQSRNWLPGPCYRQQRVSKTAADNNNSDYSWTGATKYHLNGRDSLVNPGTAMASHKDDEEKYFPQSGVLIFGKQDSGKTNVDIEKVMITDEEEIRTTNPVATEQYGSVSTNLQSGDTQAATSDVNTQGVLPGMVWQDRDVYLQGPIWAKIPHTDGHFHPSPLMGGFGPKHPPPQILIKNTPVPANPSTTFSAAKFASFITQYSTGQVSVEIEWELQKENSKRWNPEIQYTSNYNKSVNVDFTVDTNGVYSEPRPIGTRYLTRNL

SEQ ID NO: 2640 - protein, 735 aa, Artificial Sequence
  Description of Artificial Sequence: Synthetic polypeptide
MAADGYLPDWLEDTLSEGIRQWWKLKPGPPPPKPAERHKDDSRGLVLPGYKYLGPFNGLDKGEPVNEADAAALEHDKAYDRQLDSGDNPYLKYNHADAEFQERLKEDTSFGGNLARAVFQAKKRVLEPLGLVEEPVKTAPGKKRPVEHSPAELDSSSGTGKSGQQPARKRLNFGQTGDADSVPDPQPLGQPPAAPSGLGTNTMASGSGAPMADNNEGADGVGNSSGNWHCDSTWMGDRVITTSTRTWALPTYNNHLYKQISSQSGASNDNHYFGYSTPWGYFDFNRFHCHFSPRDWQRLINNNWGFRPKRLNFRLFNIQVKEVTQNDGTTTIANNLTSTVQVFTDSEYQLPYVLGSAHQGCLPPFPADVFMVPQYGYLTLNNGSQAVGRSSFYCLEYFPSQMLRTGNNFTFSYTFEDVPFHSSYAHSQSLDRLMNPLIDQYLYYLSRTNTPSGTTTQSRLQFSQAGASDIRDQSRNWLPGPCYRQQRVSKTAADNNNSDYSWTGATKYHLNGRDSLVNPGTAMASHKDDEEKYFPQSGVLIFGKQDSGKTNVDIEKVMITDEEEIRTTNPVATEQYGSVSTNLQSGNTQAATSDVNTQGVLPGMVWQDRDVYLQGPIWAKIPHTDGHFHPSPLMGGFGPKHPPPQILIKNTPVPANPSTTFSAAKFASFITQYSTGQVSVEIEWELQKENSKRWNPEIQYTSNYNKSVNVDFTVDTNGVYSEPRPIGTRYLTRNL

SEQ ID NO: 2641 - protein, 735 aa, Artificial Sequence
  Description of Artificial Sequence: Synthetic polypeptide
MAADGYLPDWLEDTLSEGIRQWWKLKPGPPPPKPAERHKDDSRGLVLPGYKYLGPFNGLDKGEPVNEADAAALEHGKAYDRQLDSGDNPYLKYNHADAEFQERLKEDTSFGGNLARAVFQAKKRVLEPLGLVEEPVKTAPGKKRPVEHSPAELDSSSGTGKSGQQPARKRLNFGQTGDADSVPDPQPLGQPPAAPSGLGTNTMASGSGAPMADNNEGADGVGNSSGNWHCDSTWMGDRVITTSTRTWALPTYNNHLYKQISSQSGASNDNHYFGYSTPWGYFDFNRFHCHFSPRDWQRLINNNWGFRPKRLNFKLFNIQVKEVTQNDGTTTIANNLTSTVQVFTDSEYQLPYVLGSAHQGCLPPFPADVFMVPQYGYLTLNNGSQAVGRSSFYCLEYFPSQMLRTGNNFTFSYTFEDVPFHSSYAHSQSLDRLMNPLIDQYLYYLSRTNTPSGTTTQSRLQFSQAGASDIRDQSRNWLPGPCYRQQRVSKTAADNNNSDYSWTGATKYHLNGRDSLVNPGTAMASHKDDEEKYFPQSGVLIFGKQDSGKTNVDIEKVMITDEEEIRTTNPVATEQYGSVSTNLQSGNTQAATSDVNTQGVLPGMVWQDRDVYLQGPIWAKIPHTDGHFHPSPLMGGFGPKHPPPQILIKNTPVPANPSTTFSAAKFASFITQYSTGQVSVEIEWELQKENSKRWNPEIQYTSNYNKSVNVDFTVDTNGVYSEPRPIGTRYLTRNL

SEQ ID NO: 2642 - protein, 735 aa, Artificial Sequence
  Description of Artificial Sequence: Synthetic polypeptide
MAADGYLPDWLEDTLSEGIRQWWKLKPGPPPPKPAERHKDDSRGLVLPGYKYLGPFNGLDKGEPVNEADAAALEHDKAYDRQLDSGDNPYLKYNHADAEFQERLKEDTSFGGNLARAVFQAKKRVLEPLGLVEEPVKTAPGKKRPVEHSPAELDSSSGTGKSGQQPARKRLNFGQTGDADSVPDPQPLGQPPAAPSGPGTNTMASGSGAPMADNNEGADGVGNSSGNWHCDSTWMGDRVITTSTRTWALPTYNNHLYKQISSQSGASNDNHYFGYSTPWGYFDFNRFHCHFSPRDWQRLINNNWGFRPKRLNFKLFNIQVKEVTQNDGTTTIANNLTSTVQVFTDSEYQLPYVLGSAHQGCLPPFPADVFMVPQYGYLTLNNGSQAVGRSSFYCLEYFPSQMLRTGNNFTFSYTFEDVPFHSSYAHSQSLDRLMNPLIDQYLYYLSRTNTPSGTTTQSRLQFSQAGASDIRDQSRNWLPGPCYRQQRVSKTAADNNNSDYSWTGATKYHLNGRDSLVNPGTAMASHKDDEEKYFPQSGVLIFGKQDSGKTNVDIEKVMITDEEEIRTTNPVATEQYGSVSTNLQSGNTQAATSDVNTQGVLPGMVWQDRDVYLQGPIWAKIPHTDGHFHPSPLMGGFGPKHPPPQILIKNTPVPANPSTTFSAAKFASFITQYSTGQVSVEIEWELQKENSKRWNPEIQYTSNYNKSVNVDFTVDTNGVYSEPRPIGTRYLTRNL

SEQ ID NO: 2643 - protein, 735 aa, Artificial Sequence
  Description of Artificial Sequence: Synthetic polypeptide
MAADGYLPDWLEDTLSEGIRQWWKLKPGPPPPKPAERHKDDSRGLVLPGYKYLGPFNGLDKGEPVNEADAAALEHDKAYDRQLDSGDNPYLKYNHADAEFQERLKEDTSFGGNLARAVFQAKKRVLEPLGLVEEPVKTAPGKKRPVEHSPAGPDSSSGTGKSGQQPARKRLNFGQTGDADSVPDPQPLGQPPAAPSGLGTNTMASGSGAPMADNNEGADGVGNSSGNWHCDSTWMGDRVITTSTRTWALPTYNNHLYKQISSQSGASNDNHYFGYSTPWGYFDFNRFHCHFSPRDWQRLINNNWGFRPKRLNFELFNIQVKEVTQNDGTTTIANNLTSTVQVFTDSEYQLPYVLGSAHQGCLPPFPADVFMVPQYGYLTLNNGSQAVGRSSFYCLEYFPSQMLRTGNNFTFSYTFEDVPFHSSYAHSQSLDRLMNPLIDQYLYYLSRTNTPSGTTTQSRLQFSQAGASDIRDQSRNWLPGPCYRQQRVSKTAADNNNSDYSWTGATKYHLNGRDSLVNPGTAMASHKDDEEKYFPQSGVLIFGKQDSEKTNVDIEKVMITDEEEIRTTNPVATEQYGSVSTNLQSGNTQAATSDVNTQGVLPGMVWQDRDVYLQGPIWAKIPHTDGHFHPSPLMGGFGLKHPPPQILIKSTPVPANPSTTFSAAKFASFITQYSTGQVSVEIEWELQKENSKRWNPEIQYTSNYNKSVNVDFTVDTNGVYSEPRPIGTRYLTRNL

SEQ ID NO: 2644 - protein, 735 aa, Artificial Sequence
  Description of Artificial Sequence: Synthetic polypeptide
MAADGYLPDWLEDTLSEGIRQWWKLKPGPPPPKPAERHKDDSRGLVLPGYKYLGPFNGLDKGEPVNEADAAALEHDKAYDRQLDSGDNPYLKYNHADAEFQERLKEDTSFGGNLARAVFQAKKRVLEPLGLVEEPVKTAPGKKRPVEHSPAGPDSSSGTGKSGQQPARKRLNFGQTGDADSVPDPQPLGQPPAAPSGLGTNTMASGSGAPMADNNEGADGVGNSSGNWHCDSTWMGDRVITTSTRTWALPTYNNHLYKQISSQSGASNDNHYFGYSTPWGYFDFNRFHCHFSPRDWQRLINNNWGFRPKRLNFELFNIQVKEVTQNDGTTTIANNLTSTVQVFTDSEYQLPYVLGSAHQGCLPPFPADVFMVPQYGYLTLNNGSQAVGRSSFYCLEYFPSQMLRTGNNFTFSYTFEDVPFHSSYAHSQSLDRLMNPLIDQYLYYLSRTNTPSGTTTQSRLQFSQAGASDIRDQSRNWLPGPCYRQQRVSKTAADNNNSDYSWTGATKYHLNGRDSLVNPGTAMASHKDDEEKYFPQSGVLIFGKQDSGKTNVDIEKVMITDEEEIRTTNPVATEQYGSVSTNLQSGNTQAATSDVNTQGVLPGMVWQDRDVYLQGPIWAKIPHTDGHFHPSPLMGGFGLKHPPPQILIKSTPVPANPSTTLSAAKFASFITQYSTGQVSVEIEWELQKENSKRWNPEIQYTSNYNKSVNVDFTVDTNGVYSEPRPIGTRYLTRNL

SEQ ID NO: 2645 - protein, 734 aa, Artificial Sequence
  Description of Artificial Sequence: Synthetic polypeptide
MAADGYLPDWLEDTLSEGIRQWWKLKPGPPPPKPAERHKDDSRGLVLPGYKYLGPFNGLDKGEPVNEADAAALEHDKAYDRQLDSGDNPYLKYNHADAEFQERLKEDTSFGGNLARAVFQAKKRVLEPLGLVEEPVKTAPGKKRPVEHSPAGPDSSSGTGKSGQQPARKRLNFGQTGDADSVPDPQPLGQPPAAPSGLGTNTMASGSGAPMADNNEGADGVGNSSGNWHCDSTWMGDRVITTSTRTWALPTYNNHLYKQISSQSGASNDNHYFGYSTPWGYFDFNRFHCHFSPRDWQRLINNNWGFRPKRLNFELFNIQVKEVTQNDGTTTIANNLTSTVQVFTDSEYQLPYVLGSAHQGCLPPFPADVFMVPQYGYLTLNNGSQAVGRSSFYCLEYFPSQMLRTGNNFTFSYTFEDVPFHSSYAHSQSLDRLMNPLIDQYLYYLSRTNTPSGTTTQSRLQFSQAGASDIRDQSRNWLPGPCYRQQRVSKTAADNNSDYSWTGATKYHLNGRDSLVNPGTAMASHKDDEEKYFPQSGVLIFGKQDSGKTNVDIEKVMITDEEEIRTTNPVATEQYGSVSTNLQSGNTQAATSDVNTQGVLPGMVWQDRDVYLQGPIWAKIPHTDGHFHPSPLMGGFGLKHPPPQILIKSTPVPANPSTTFSAAKFASFITQYSTGQVSVEIEWELQKENSKRWNPEIQYTSNYNKSVNVDFTVDTNGVYSEPRPIGTRYLTRNL

SEQ ID NO: 2646 - protein, 735 aa, Artificial Sequence
  Description of Artificial Sequence: Synthetic polypeptide
MAADGYLPDWLEDTLSEGIRQWWKLKPGPPPPKPAERHKDDSRGLVLPGYKYLGPFNGLDKGEPVNEADAAALEHDKAYDRQLDSGDNPYLKYNHADAEFQERLKEDTSFGGNLGRTVFQAKKRVLEPLGLVEEPVKTAPGKKRPVEHSPVEPDSSSGTGKAGQQPARKRLNFGQTGDADSVPDPQPLGQPPAAPSGLGTNTMATGSGAPMADNNEGADGVGNSSGNWHCDSTWMGDRVITTSTRTWALPTYNNHLYKQISSQSGASNDNHYFGYSTPWGYFDFNRFHCHFSPRDWQRLINNNWGFRPKRLSFKLFNIQVKEVTQNDGTTTIANNLTSTVQVFTDSEYQLPYVLGSAHQGCLPPFPADVFMVPQYGYLTLNNGSQAVGRSSFYCLEYFPSQMLRTGNNFTFSYTFEDVPFHSSYAHSQSLDRLMNPLIDQYLYYLSKTNAPSGTTTMSRLQFSQAGASDIRDQSRNWLPGPCYRQQRVSKTAADNNNSDYSWTGATKYHLNGRDSLVNPGPAMASHKDDEEKYFPQSGVLIFGKQGSNKTNVDIEKVMITDEEEIRTTNPVATEQYGSVSTNLQSGNTQAATSDVNTQGVLPGMVWQDRDVYLQGPIWAKIPHTDGHFHPSPLMGGFGLKHPPPQILIKNTPVPANPSTTFSAAKFASFITQYSTGQVSVEIEWELQKENSKRWNPEIQYTSNYNKSVNVDFTVDTNGVYSEPRPIGTRYLTRNL

SEQ ID NO: 2647 - protein, 735 aa, Artificial Sequence
  Description of Artificial Sequence: Synthetic polypeptide
MAADGYLPDWLEDTLSEGIRQWWKLKPGPPPPKPAERHKDDSRGLVLPGYKYLGPFNGLDKGEPVNEADAAALEHDKAYDRQLDSGDNPYLKYNHADAEFQERLKEDTSFGGNLGRAVFQAKKRVLEPLGLVEEPVKTAPGKKRPVEHSPVEPDSSSGTGKAGQQPARKRLNFGQTGDADSVPDPQPLGQPPAAPSGLGTNTMATGSGAPMADNNEGADGVGNSSGNWHCDSTWMGDRVITTSTRTWALPTYNNHLYKQISSQSGASNDNHYFGYSTPWGYFDFNRFHCHFSPRDWQRLINNNWGFRPKRLSFKLFNIQVKEVTQNDGTTTIANNLTSTVQVFTDSEYQLPYVLGSAHQGCLPPFPADVFMVPQYGYLTLNNGSQAVGRSSFYCLEYFPSQMLRTGNNFTFSYTFEDVPFHSSYAHSQSLDRLMNPLIDQYLYYLSKTNAPSGTTTMSRLQFSQAGASDIRDQSRNWLPGPCYRQQRVSKTAADNNNSDYSWTGATKYHLNGRDSLVNPGPAMANHKDDEEKYFPQSGVLIFGKQGSNKTNVDIEKVMITDEEEIRTTNPVATEQYGSVSTNLQSGNTQAATSDVNTQGVLPGMVWQDRDVYLQGPIWAKIPHTDGHFHPSPLMGGFGLKHPPPQILIKNTPVPANPSTTFSAAKFASFITQYSTGQVSVEIEWELQKENSKRWNPEIQYTSNYNKSVNVDFTVDTNGVYSEPRPIGTRYLTRNL

SEQ ID NO: 2648 - protein, 735 aa, Artificial Sequence
  Description of Artificial Sequence: Synthetic polypeptide
MAADGYLPDWLEDTLSEGIRQWWKLKPGPPPPKPAERHKDDSRGLVLPGYKYLGPFNGLDKGEPVNEADAAALEHDKAYDRQLDSGDNPYLKYNHADAEFQERLKEDTSFGGNLGRAVFQAKKRVLEPLGLVEEPVKTAPGKKRPVEHSPVEPDSSSGTGKAGQQPARKRLNFGQTGDADSVPDPQPLGQPPAAPSGLGTNTMATGSGAPMADNNEGADGVGNSSGNWHCDSTWMGDRVITTSTRTWALPTYNNHLYKQISSQSGASNDNHYFGYSTPWGYFDFNRFHCHFSPRDWQRLINNNWGFRPKRLSFKLFNIQVKEVTQNDGTTTIANNLTSTVQVFTDSEYQLPYVLGSAHQGCLPPFPADVFMVPQYGYLTLNNGSQAVGRSSFYCLEYFPSQMLRTGNNFTFSYTFEDVPFHSSYAHSQSLDRLMNPLIDQYLYYLSKTNAPSGTTTMSRLQFSQAGASDIRDQSRNWLPGPCYRQQRVSKTAADNNNSDYSWTGATKYHLNGRDSLVNPGPAMASHKDDEEKYFPQSGVLIFGKQGSNKTNVDIEKVMITDEEEIRTTNPVATEQYGSVSTNLQSGNTQAATSDVNTQGVLPGMVWQDRDVYLQGPIWAKIPHTDGHFHPSPLMGGFGLKHPPPQILIKNTPVPANPSTTFSAAKFASFITQYSTGQVSVEIEWELQKENSKRWNPEIQYTSNYNKSVNVDFTVDTNGVYSEPRPIGTRYPTRNL

SEQ ID NO: 2649 - protein, 735 aa, Artificial Sequence
  Description of Artificial Sequence: Synthetic polypeptide
MAADGYLPDWLEDTLSEGIRQWWKLKPGPPPPKPAERHKDDSRGLVLPGYKYLGPFNGLDKGEPVNEADAAALEHDKAYDRQLDSGDNPYLKYNHADAEFQERLKEDTSFGGNLGRAVFQAKKRVLEPLGLVEEPVKTAPGKKRPVEHSPVEPDSSSGTGKAGQQPARKRLNFGQTGDADSVPDPQPLGQPPAAPSGLGTNTMATGSGAPMADNNEGADGVGNSSGNWHCDSTWMGDRVITTSTRTWALPTYNNHLYKQISSQSGASNDNHYFGYSTPWGYFDFNRFHCHFSPRDWQRLINNNWGFRPKRLSFKLFNIQVKEVTQNDGTTTIANNLTSTVQVFTDSEYQLPYVLGSAHQGCLPPFPADVFMVPQYGYLTLNNGSQAVGRSSFYCLEYFPSQMLRTGNNFTFSYTFEDVPFHSSYAHSQSLDRLMNPLIDQYLYYLSKTNAPSGTTTMSRLQFSQAGASDIRDQSRNWLPGPCYRQQRVSKTAADNNNSDYSWTGATKYHLNGRDSLVNPGPAMASHKDDEEKYFPQSGVLIFGKQGSNKTNVDIEKVMITDEEEIRTTNPVATEQYGSVSTNLQSGNTQAATSDVNTQGVLPGMVWQDRDVYLQGPIWAKIPHTDGHFHPSPLMGGFGLKHPPPQILIKNTPVPANPSTTFSAAKFASFITQYSTGQVSVEIEWELQKENSKRWNPEIQYTSNYNKSVNVDFTVGTNGVYSEPRPIGTRYLTRNL

SEQ ID NO: 2650 - protein, 735 aa, Artificial Sequence
  Description of Artificial Sequence: Synthetic polypeptide
MAADGYLPDWLEDTLSEGIRQWWKLKPGPPPPKPAERHKDDSRGLVLPGYKYLGPFNGLDKGEPVNEADAAALEHDKAYDRQLDSGDNPYLKYNHADAEFQERLKEDTSFGGNLGRAVFQAKKRVLEPLGLVEEPVKTAPGKKRPVEHSPVEPDSSSGTGKAGQQPARKRLNFGQTGDADSVPDPQPLGQPPAAPSGLGTNTMATGSGAPMADNNEGADGVGNSSGNWHCDSTWMGDRVITTSTRTWALPTYNNHLYKQISSQSGASNDNHYFGYSTPWGYFDFNRFHCHFSPRDWQRLINNNWGFRPKRLSFKLFNIQVKEVTQNDGTTTIANNLTSTVQVFTDSEYQLPYVLGSAHQGCLPPFPADVFMVPQYGYLTLNNGSQAVGRSSFYCLEYFPSQMLRTGNNFTFSYTFEDVPFHSSYAHSQSLDRLMNPLIDQYLYYLSKTNAPSGTTTMSRLQFSQAGASDIRDQSRNWLPGPCYRQQRVSKTAADNNNSDYSWTGATKYHLNGRDSLVNPGPAMASHKDDEEKYFPQSGVLIFGKQGSNKTNVDIEKVMITDEEEIRTTNPVATEQYGSVSTNLQSGNTQAATSDVNTQGVLPGMVWQDRDVYLQGPIWAKIPHTDGHFHPSPLMGGFGLKYPPPQILIKNTPVPANPSTTFSAAKFASFITQYSTGQVSVEIEWELQKENSKRWNPEIQYTSNYNKSVNVDFTVDTNGVYSEPRPIGTRYLTRNL

SEQ ID NO: 2651 - protein, 735 aa, Artificial Sequence
  Description of Artificial Sequence: Synthetic polypeptide
MAADGYLPDWLEDTLSEGIRQWWKLKPGPPPPKPAERHKDDSRGLVLPGYKYLGPFNGLDKGEPVNEADAAALEHDKAYDRQLDSGDNPYLKYNHADAEFQERLKEDTSFGGNLGRAVFQAKKRVLEPLGLVEEPVKTAPGKKRPVEHSPVEPDSSSGTGKAGQQPARKRLNFGQTGDADSVPDPQPLGQPPAAPSGLGTNTMATGSGAPMADNNEGADGVGNSSGNWHCDSTWMGDRVITTSTRTWALPTYNNHLYKQISGQSGASNDNHYFGYSTPWGYFDFNRFHCHFSPRDWQRLINNNWGFRPKRLSFKLFNIQVKEVTQNDGTTTIANNLTSTVQVFTDSEYQLPYVLGSAHQGCLPPFPADVFMVPQYGYLTLNNGSQAVGRSSFYCLEYFPSQMLRTGNNFTFSYTFEDVPFHSSYAHSQSLDRLMNPLIDQYLYYLSKTNAPSGTTTMSRLQFSQAGASDIRDQSRNWLPGPCYRQQRVSKTAADNNNSDYSWTGATKYHLNGRDSLVNPGPAMASHKDDEEKYFPQSGVLIFGKQGSNKTNVDIEKVMITDEEEIRTTNPVATEQYGSVSTNLQSGNTQAATSDVNTQGVLPGMVWQDRDVYLQGPIWAKIPHTDGHFHPSPLMGGFGLKHPPPQILIKNTPVPANPSTTFSAAKFASFITQYSTGQVSVEIEWELQKENSKRWNPEIQYTSNYNKSVNVDFTVDTNGVYSEPRPIGTRYLTRNL

SEQ ID NO: 2652 - protein, 735 aa, Artificial Sequence
  Description of Artificial Sequence: Synthetic polypeptide
MAADGYLPDWLEDTLSEGIRQWWKLKPGPPPPKPAERHKDDSRGLVLPGYKYLGPFNGLDKGEPVNEADAAALEHDKAYDRQLDSGDNPYLKYNHADAEFQERLKEDTSFGGNLGRAVFQAKKRVLEPLGLVEEPVKTAPGKKRPVEHSPVEPDSSSGTGKAGQQPARKRLNFGQTGDADSVPDPQPLGQPPAAPSGLGTNTMATGSGAPMADNNEGADGVGNSSGNWHCDSTWMGDRVITTSTRTWALPTYNNHLYKQISSQSGASNDNHYFGYSTPWGYFDFNRFHCHFSPRDWQRLINNNWGFRPKRLSFKLFNIQVKEVTQNDGTTTIANNLTSTVQVFTDSEYRLPYVLGSAHQGCLPPFPADVFMVPQYGYLTLNNGSQAVGRSSFYCLEYFPSQMLRTGNNFTFSYTFEDVPFHSSYAHSQSLDRLMNPLIDQYLYYLSKTNAPSGTTTMSRLQFSQAGASDIRDQSRNWLPGPCYRQQRVSKTAADNNNSDYSWTGATKYHLNGRDSLVNPGPAMASHKDDEEKYFPQSGVLIFGKQGSNKTNVDIEKVMITDEEEIRTTNPVATEQYGSVSTNLQSGNTQAATSDVNTQGVLPGMVWQDRDVYLQGPIWAKIPHTDGHFHPSPLMGGFGLKHPPPQILIKNTPVPANPSTTFSAAKFASFITQYSTGQVSVEIEWELQKENSKRWNPEIQYTSNYNKSVNVDFTVDTNGVYSEPRPIGTRYLTRNL

SEQ ID NO: 2653 - protein, 735 aa, Artificial Sequence
  Description of Artificial Sequence: Synthetic polypeptide
MAADGYLPDWLEDTLSEGIRQWWKLKPGPPPPKPAERHKDDSRGLVLPGYKYLGPFNGLDKGEPVNEADAAALEHDKAYDRQLDSGDNPYLKYNHADAEFQERLKEDTSFGGNLGRAVFQAKKRVLEPLGLVEEPVKTAPGKKRPVEHSPVEPDSSSGTGKAGQQPARKRLNFGQTGDADSVPDPQPLGQPPAAPSGLGTNTMATGSGAPMADNNEGADGVGNSSGNWHCDSTWMGDRVITTSTRTWALPTYNNHLYKQISSQSGASNDNHYFGYSTPWGYFDFNRFHCHFSPRDWQRLINNNWGFRPKRLSFKLFNIQVKEVTQNDGTTTIANNLTSTVQVFTDSEYQLPYVLGSAHRGCLPPFPADVFMVPQYGYLTLNNGSQAVGRSSFYCLEYFPSQMLRTGNNFTFSYTFEDVPFHSSYAHSQSLDRLMNPLIDQYLYYLSKTNAPSGTTTMSRLQFSQAGASDIRDQSRNWLPGPCYRQQRVSKTAADNNNSDYSWTGATKYHLNGRDSLVNPGPAMASHKDDEEKYFPQSGVLIFGKQGSNKTNVDIEKVMITDEEEIRTTNPVATEQYGSVSTNLQSGNTQAATSDVNTQGVLPGMVWQDRDVYLQGPIWAKIPHTDGHFHPSPLMGGFGLKHPPPQILIKNTPVPANPSTTFSAAKFASFITQYSTGQVSVEIEWELQKENSKRWNPEIQYTSNYNKSVNVDFTVDTNGVYSEPRPIGTRYLTRNL

SEQ ID NO: 2654 - protein, 735 aa, Artificial Sequence
  Description of Artificial Sequence: Synthetic polypeptide
MAADGYLPDWLEDTLSEGIRQWWKLKPGPPPPKPAERHKDDSRGLVLPGYKYLGPFNGLDKGEPVNEADAAALEHDKAYDRQLDSGDNPYLKYNHADAEFQERLKEDTSFGGNLGRAVFQAKKRVLEPLGLVEEPVKTAPGKKRPVEHSPVEPDSSSGTGKAGQQPARKRLNFGQTGDADSVPDPQPLGQPPAAPSGLGTNTMATGSGAPMADNNEGADGVGNSSGNWHCDSTWMGDRVITTSTRTWALPTYNNHLYKQISSQSGASNDNHYFGYSTPWGYFDFNRFHCHFSPRDWQRLINNNWGFRPKRLSFKLFNIQVKEVTQNDGTTTIANNLTSTVQVFTDSEYQLPYVLGSAHQGCLPPFPADVFMVPQYGYLTLNNGSQAVGRSSFYCLEYFPSQMLRAGNNFTFSYTFEDVPFHSSYAHSQSLDRLMNPLIDQYLYYLSKTNAPSGTTTMSRLQFSQAGASDIRDQSRNWLPGPCYRQQRVSKTAADNNNSDYSWTGATKYHLNGRDSLVNPGPAMASHKDDEEKYFPQSGVLIFGKQGSNKTNVDIEKVMITDEEEIRTTNPVATEQYGSVSTNLQSGNTQAATSDVNTQGVLPGMVWQDRDVYLQGPIWAKIPHTDGHFHPSPLMGGFGLKHPPPQILIKNTPVPANPSTTFSAAKFASFITQYSTGQVSVEIEWELQKENSKRWNPEIQYTSNYNKSVNVDFTVDTNGVYSEPRPIGTRYLTRNL

SEQ ID NO: 2655 - protein, 735 aa, Artificial Sequence
  Description of Artificial Sequence: Synthetic polypeptide
MAADGYLPDWLEDTLSEGIRQWWKLKPGPPPPKPAERHKDDSRGLVLPGYKYLGPFNGLDKGEPVNEADAAALEHDKAYDRQLDSGDNPYLKYNHADAEFQERLKEDTSFGGNLGRAVFQAKKRVLEPLGLVEEPVKTAPGKKRPVEHSPVEPDSSSGTGKAGQQPARKRLNFGQTGDADSVPDPQPLGQPPAAPSGLGTNTMATGSGAPMADNNEGADGVGNSSGNWHCDSTWMGDRVITTSTRTWALPTYNNHLYKQISSQSGASNDNHYFGYSTPWGYFDFNRFHCHFSPRDWQRLINNNWGFRPKRLGFKLFNIQVKEVTQNDGTTTIANNLTSTVQVFTDSEYQLPYVLGSAHQGCLPPFPADVFMVPQYGYLTLNNGSQAVGRSSFYCLEYFPSQMLRTGNNFTFSYTFEDVPFHSSYAHSQSLDRLMNPLIDQYLYYLSKTNAPSGTTTMSRLQFSQAGASDIRDQSRNWLPGPCYRQQRVSKTAADNNNSDYSWTGATKYHLNGRDSLVNPGPAMASHKDDEEKYFPQSGVLIFGKQGSNKTNVDIEKVMITDEEEIRTTNPVATEQYGSVSTNLQSGNTQAATSDVNTQGVLPGMVWQDRDVYLQGPIWAKIPHTDGHFHPSPLMGGFGLKHPPPQILIKNTPVPANPSTTFSAAKFASFITQYSTGQVSVEIEWELQKENSKRWNPEIQYTSNYNKSVNVDFTVDTNGVYSEPRPIGTRYLTRNL

SEQ ID NO: 2656 - protein, 735 aa, Artificial Sequence
  Description of Artificial Sequence: Synthetic polypeptide
MAADGYLPDWLEDTLSEGIRQWWKLKPGPPPPKPAERHKDDSRGLVLPGYKYLGPFNGLDKGEPVNEADAAALEHDKAYDRQLDSGDNPYLKYNHADAEFQERLKEDTSFGGNLGRAVFQAKKRVLEPLGLVEEPVKTAPGKKRPVEHSPVEPDSSSGTGKAGQQPARKRLNFGQTGDADSVPDPQPLGQPPAAPSGLGTNTMATGSGAPMADNNEGADGVGNSSGNWHCDSTWMGDRVITTSTRTWALPTYNNHLYKQISSQSGVSNDNHYFGYSTPWGYFDFNRFHCHFSPRDWQRLINNNWGFRPKRLSFKLFNIQVKEVTQNDGTTTIANNLTSTVQVFTDSEYQLPYVLGSAHQGCLPPFPADVFMVPQYGYLTLNNGSQAVGRSSFYCLEYFPSQMLRTGNNFTFSYTFEDVPFHSSYAHSQSLDRLMNPLIDQYLYYLSKTNAPSGTTTMSRLQFSQAGASDIRDQSRNWLPGPCYRQQRVSKTAADNNNSDYSWTGATKYHLNGRDSLVNPGPAMASHKDDEEKYFPQSGVLIFGKQGSNKTNVDIEKVMITDEEEIRTTNPVATEQYGSVSTNLQSGNTQAATSDVNTQGVLPGMVWQDRDVYLQGPIWAKIPHTDGHFHPSPLMGGFGLKHPPPQILIKNTPVPANPSTTFSAAKFASFITQYSTGQVSVEIEWELQKENSKRWNPEIQYTSNYNKSVNVDFTVDTNGVYSEPRPIGTRYLTRNL

SEQ ID NO: 2657 - protein, 735 aa, Artificial Sequence
  Description of Artificial Sequence: Synthetic polypeptide
MAADGYLPDWLEDTLSEGIRQWWKLKPGPPPPKPAERHKDDSRGLVLPGYKYLGPFNGLDKGEPVNEADAAALEHDKAYDRQLDSGDNPYLKYNHADAEFQERLKEDTSFGGNLGRAVFQAKKRVLEPLGLVEEPVKTAPGKKRPVEHSPVEPDSSSGTGKAGQQPARKRLNFGQTGDADSVPDPQPLGQPPAAPSGLGTNTMATGSGAPMADNNEGADGVGNSSGNWHCDSTWMGDRVITTSTRTWALPTYNNHLYKQISSQSGASNDNHYFGYSTPWGYFDFNRFHCHFSPRDWQRLINNNWGFRPKRLSFKLFNIQVKEVTQNDGTTTIANNLTSTVQVFTDSEYQLPYVLGSAHQGCLPPFPADVFMVPQYGYLTLNNGSQAVGRSSFYCLEYFPSQMLRTGNNFTFSYTFEDVPFHSSYAHSQSLDRLMNPLIDQYLYYLSKTNAPSGTTTMSRLQFSQAGASDIRDQSRNWLPGPCYRQQRVSKTAADNNNSDYSWTGATKYHLNGRDSLVNPGPAMASHKDDEEKYFPQSGVLIFGKQGSNKTNVDIEKVMITDEEEIRTTNPMATEQYGSVSTNLQSGNTQAATSDVNTQGVLPGMVWQDRDVYLQGPIWAKIPHTDGHFHPSPLMGGFGLKHPPPQILIKNTPVPANPSTTFSAAKFASFITQYSTGQVSVEIEWELQKENSKRWNPEIQYTSNYNKSVNVDFTVDTNGVYSEPRPIGTRYLTRNL

SEQ ID NO: 2658 - protein, 735 aa, Artificial Sequence
  Description of Artificial Sequence: Synthetic polypeptide
MAADGYLPDWLEDTLSEGIRQWWKLKPGPPPPKPAERHKDDSRGLVLPGYKYLGPFNGLDKGEPVNEADAAALEHDKAYDRQLDSGDNPYLKYNHADAEFQERLKEDTSFGGNLGRAVFQAKKRVLEPLGLVEEPVKTAPGKKRPIEHSPVEPDSSSGTGKAGQQPARKRLNFGQTGDADSVPDPQPLGQPPAAPSGLGTNTMATGSGAPMADNNEGADGVGNSSGNWHCDSTWMGDRVITTSTRTWALPTYNNHLYKQISSQSGASNDNHYFGYSTPWGYFDFNRFHCHFSPRDWQRLINNNWGFRPKRLSFKLFNIQVKEVTQNDGTTTIANNLTSTVQVFTDSEYQLPYVLGSAHQGCLPPFPVDVFMVPQYGYLTLNNGSQAVGRSSFYCLEYFPSQMLRTGNNFTFSYTFEDVPFHSSYAHSQSLDRLMNPLIDQYLYYLSKTNAPSGTTTMSRLQFSQAGASDIRDQSRNWLPGPCYRQQRVSKTAADNNNSDYSWTGATKYHLNGRDSLVNPGPAMASHKDDEEKYFPQSGVLIFGKQGSNKTNVDIEKVMITDEEEIRTTNPVATEQYGSVSTNLQSGNTQAATSDVNTQGVLPGMVWQDRDVYLQGPIWAKIPHTDGHFHPSPLMGGFGLKHPPPQILIKNTPVPANPSTTFSAAKFASFITQYSTGQVSVEIEWELQKENSKRWNPEIQYTSNYNKSVNVDFTVDTNGVYSEPRPIGTRYLTRNL

SEQ ID NO: 2659 - protein, 735 aa, Artificial Sequence
  Description of Artificial Sequence: Synthetic polypeptide
MAADGYLPDWLEDTLSEGIRQWWKLKPGPPPPKPAERHKDDSRGLVLPGYKYLGPFNGLDKGEPVNEADAAALEHDKAYDRQLDSGDNPYLKYNHADAEFQERLKEDTSFGGNLGRAVFQAKKRVLEPLGLVEEPVKTAPGKKRPVEHSPVEPDSSSGTGKAGQQPARKRLNFGQTGDADSVPDPQPLGQPPAAPSGLGTNTMTTGSGAPMADNNEGADGVGNSSGNWHCDSTWMGDRVITTSTRTWALPTYNNHLYKQISSQSGASNDNHYFGYSTPWGYFDFNRFHCHFSPRDWQRLINNNWGFRPKRLSFKLFNIQVKEVTQNDGTTTIANNLTSTVQVFTDSEYQLPYVLGSAHQGCLPPFPADVFMVPQYGYLTLNNGSQAVGRSSFYCLEYFPSQMLRTGNNFTFSYTFEDVPFHSSYAHSQSLDRLMNPLIDQYLYYLSKTNAPSGTTTMSRLQFSQAGASDIRDQSRNWLPGPCYRQQRVSKTAADNNNSDYSWTGATKYHLNGRDSLVNPGPAMASHKDDEEKYFPQSGVLIFGKQGSNKTNVDIEKVMITDEEEIRTTNPVATEQYGSVSTNLQSGNTQAATSDVNTQGVLPGMVWQDRDVYLQGPIWAKIPHTDGHFHPSPLMGGFGLKHPPPQILIKNTPVPANPSTTFSAAKFASFITQYSTGQVSVEIEWELQKENSKRWNPEIQYTSNYNKSVNVDFTVDTNGVYSEPRPIGTRYLTRNL

SEQ ID NO: 2660 - protein, 735 aa, Artificial Sequence
  Description of Artificial Sequence: Synthetic polypeptide
MAADGYLPDWLEDTLSEGIRQWWKLKPGPPPPKPAERHKDDSRGLVLPGYKYLGPFNGLDKGEPVNEADAAALEHDKAYDRQLDSGDNPYLKYNHADAEFQERLKEDTSFGGNLGRAVFQAKKRVLEPLGLVEEPVKTAPGKKRSVEHSPVEPDSSSGTGKAGQQPARKRLNFGQTGDADSVPDPQPLGQPPAAPSGLGTNTMATGSGAPMADNNEGADGVGNSSGNWHCDSTWMGDRVITTSTRTWALPTYNNHLYKQISSQSGASNDNHYFGYSTPWGYFDFNRFHCHFSPRDWQRLINNNWGFRPKRLSFKLFNIQVKEVTQNDGTTTIANNLTSTVQVFTDSEYQLPYVLGSAHQGCLPPFPADVFMVPQYGYLTLNNGSQAVGRSSFYCLEYFPSQMLRTGNNFTFSYTFEDVPFHSSYAHSQSLDRLMNPLIDQYLYYLSKTNAPSGTTTMSRLQFSQAGASDIRDQSRNWLPGPCYRQQRVSKTAADNNNSDYSWTGATKYHLNGRDSLVNPGPAMASHKDDEEKYFPQSGVLIFGKQGSNKTNVDIEKVMITDEEEIRTTNPVATEQYGSVSTNLQSGNTQAATSDVNTQGVLPGMVWQDRDVYLQGPIWAKIPHTDGHFHPSPLMGGFGLKHPPPQILIKNTPVPANPSTTFSAAKFASFITQYSTGQVSVEIEWELQKENSKRWNPEIQYTSNYNKSVNVDFTVDTNGVYSEPRPIGTRYLTRNL

SEQ ID NO: 2661 - protein, 735 aa, Artificial Sequence
  Description of Artificial Sequence: Synthetic polypeptide
MAADGYLPDWLEDTLSEGIRQWWKLKPGPPPPKPAERHKDDSRGLVLPGYKYLGPFNGLDKGEPVNEADAAALEHDKAYDRQLDSGDNPYLKYNHADAEFQERLKEDTSFGGNLGRAVFQAKKRVLEPLGLVEEPVKTAPGKKRPVEHSPVEPDSSSGTGKAGQQPARKRLNFGQTGDADSVPDPQPLGQPPAAPSGLGTNTMATGSGAPMADNNEGADGVGNSSGNWHCDSTWMGDRVITTSTRTWALPTYNNHLYKQISSQSGASNDNHYFGYSTPWGYFDFNRFHCHFSPRDWQRLINNNWGFRPKRLSFKLFNIQVKEVTQNDGTTTIANNLTSTVQVFTDSEYQLPYVLGSAHQGCLPPFPADVFVVPQYGYLTLNNGSQAVGRSSFYCLEYFPSQMLRTGNNFTFSYTFEDVPFHSSYAHSQSLDRLMNPLIDQYLYYLSKTNAPSGTTTMSRLQFSQAGASDIRDQSRNWLPGPCYRQQRVSKTAADNNNSDYSWTGATKYHLNGRDSLVNPGPAMASHKDDEEKYFPQSGVLIFGKQGSNKTNVDIEKVMITDEEEIRTTNPVATEQYGSVSTNLQSGNTQAATSDVNTQGVLPGMVWQDRDVYLQGPIWAKIPHTDGHFHPSPLMGGFGLKHPPPQILIKNTPVPANPSTTFSAAKFASFITQYSTGQVGVEIEWELQKENSKRWNPEIQYTSNYNKSVNVDFTVDTNGVYSEPRPIGTRYLTRNL

SEQ ID NO: 2662 - protein, 735 aa, Artificial Sequence
  Description of Artificial Sequence: Synthetic polypeptide
MAADGYLPDWLEDTLSEGIRQWWKLKPGPPPPKPAERHKDDSRGLVLPGYKYLGPFNGLDKGEPVNEADAAALEHDKAYDRQLDSGDNPYLKYNHADAEFQERLKEDTSFGGNLGRAVFQAKKRVLEPLGLVEEPVKTAPGKKRPVEHSPVEPDSSSGTGKAGQQPARKRLNFGQTGDADSVPDPQPLGQPPAAPSGLGTNTMATGSGAPMADNNEGADGVGNSSGNWHCDSTWMGDRVITTSTRTWALPTYNNHLYKQISSQSGASNDNHYFGYSTPWGYFDFNRFHCHFSPRDWQRLINNNWGFRPKRLSFKLFNIQVKEVTQNDGTTTIANNLTSTVQVFTDSEYQLPYVLGSAHQGCLPPFPADVFMVPQYGYLTLNNGSQAVGRSSFYCLEYFPSQMLRTGNNFTFSYTFEDVPFHSSYAHSQSLDRLMNPLIDQYLYYLSKTNAPSGTTAMSRLQFSQAGASDIRDQSRNWLPGPCYRQQRVSKTAADNNNSDYSWTGATKYHLNGRDSLVNPGPAMASHKDDEEKYFPQSGVLIFGKQGSNKTNVDIEKVMITDEEEIRTTNPVATEQYGSVSTNLQSGNTQAATSDVNTQGVLPGMVWQDRDVYLQGPIWAKIPHTDGHFHPSPLMGGFGLKHPPPQILIKNTPVPANPSTTFSAAKFASFITQYSTGQVSVEIEWELQKENSKRWNPEIQYTSNYNKSVNVDFTVDTNGVYSEPRPIGTRYLTRNL

SEQ ID NO: 2663 - protein, 735 aa, Artificial Sequence
  Description of Artificial Sequence: Synthetic polypeptide
MAADGYLPDWLEDTLSEGIRQWWKLKPGPPPPKPAERHKDDSRGLVLPGYKYLGPFNGLDKGEPVNEADAAALEHDKAYDRQLDSGDNPYLKYNHADAEFQERLKEDTSFGGNLGRAVFQAKKRVLEPLGLVEEPVKTAPGKKRPVEHSPVEPDSSSGTGKAGQQPARKRLNFGQTGDADSVPDPQPLGQPPAAPSGLGTNTMATGSGAPMADNNEGADGVGNSSGNWHCDSTWMGDRVITTSTRTWALPTYNNHLYKQISSQSGASNDNHYFGYSTPWGYFDFNRFHCHFSPRDWQRLINNNWGFRPKRLSFKLFNIQVKEVTQNDGTTTIANNLTSTVQVFTDSEYQLPYVLGSAHQGCLPPFPADVFMVPQYGYLTLNNGSQAVGRSSFYCLEYFPSQMLRTGNNFTFSYTFEDVPFHSSYAHSQSLDRLMNPPIDQYLYYLSKTNAPSGTTTMSRLQFSQAGASDIRDQSRNWLPGPCYRQQRVSKTAADNNNSDYSWTGATKYHLNGRDSLVNPGPAMASHKDDEEKYFPQSGVLIFGKQGSNKTNVDIEKVMITDEEEIRTTNPVATEQYGSVSTNLQSGNTQAATSDVNTQGVLPGMVWQDRDVYLQGPIWAKIPHTDGHFHPSPLMGGFGLKHPPPQILIKNTPVPANPSTTFSAAKFASFITQYSTGQVSVEIEWELQKENSKRWNPEIQYTSNYNKSVNVDFTVDTNGVYSEPRPIGTRYLTRNL

SEQ ID NO: 2664 - protein, 735 aa, Artificial Sequence
  Description of Artificial Sequence: Synthetic polypeptide
MAADGYLPDWLEDTLSEGIRQWWKLKPGPPPPKPAERHKDDSRGLVLPGYKYLGPFNGLDKGEPVNEADAAALEHDKAYDRQLDSGDNPYLKYNHADAEFQERLKEDTSFGGNLGRAVFQAKKRVLEPLGLVEEPVKTAPGKKRPVEHSPVEPDSSSGTGKAGQQPARKRLNFGQTGDADSVPDPQPLGQPPAAPSGLGTNTMATGSGAPMADNNEGADGVGNSSGNWHCDSTWMGDRVITTSTRTWALPTYNNHLYKQISSQSGASNDNHYFGYSTPWGYFDFNRFHCHFSPRDWQRLINNNWGFRPKRLSFKLFNIQVKEVTQNDGTTTIANNLTSTVQVFTDSEYQLPYVLGSAHQGCLPPFPADVFMVPQYGYLTLNNGSQAVGRSSFYCLEYFPSQMLRTGNNFTFSYTFEDVPFHSSYAHGQSLDRLMNPLIDQYLYYLSKTNAPSGTTTMSRLQFSQAGASDIRDQSRNWLPGPCYRQQRVSKTAADNNNSDYSWTGATKYHLNGRDSLVNPGPAMASHKDDEEKYFPQSGVLIFGKQGSNKTNVDIEKVMITDEEEIRTTNPVATEQYGSVSTNLQSGNTQAATSDVNTQGVLPGMVWQDRDVYLQGPIWAKIPHTDGHFHPSPLMGGFGLKHPPPQILIKNTPVPANPSTTFSAAKFASFITQYSTGQVSVEIEWELQKENSKRWNPEIQYTSNYNKSVNVDFTVDTNGVYSEPRPIGTRYLTRNL

SEQ ID NO: 2665 - protein, 735 aa, Artificial Sequence
  Description of Artificial Sequence: Synthetic polypeptide
MAADGYLPDWLEDTLSEGIRQWWKLKPGPPPPKPAERHKDDSRGLVLPGYKYLGPFNGLDKGEPVNEADAAALEHDKAYDRQLDSGDNPYLKYNHADAEFQERLKEDTSFGGNLGRAVFQAKKRVLEPLGLVEEPVKTAPGKKRPVEHSPVEPDSSSGTGKAGQQPARKRLNFGQTGDADSVPDPQPLGQPPAAPSGLGTNTMATGSGAPMADNNEGADGVGNSSGNWHCDSTWMGDRVITTSTRTWALPTYNNHLYKQISSQSGASNDNHYFGYSTPWGYFDFNRFHCHFSPRDWQRLINNNWGFRPKRLSFKLFNIQVKEVTQNDGTTTIANNLTSTVQVFTDSEYQLPYVLGSAHQGCLPPFPADVFMVPQYGYLTLNNGSQAVGRSSFYCLEYFPSQMLRTGNNFTFSYTFEDVPFHSSYAHSQSLDRLMNPLIDQYLYYLSKTNAPSGTTTMSRPQFSQAGASDIRDQSRNWLPGPCYRQQRVSKTAADNNNSDYSWTGATKYHLNGRDSLVNPGPAMASHKDDEEKYFPQSGVLIFGKQGSNKTNVDIEKVMITDEEEIRTTNPVATEQYGSVSTNLQSGNTQAATSDVNTQGVLPGMVWQDRDVYLQGPIWAKIPHTDGHFHPSPLMGGFGLKHPPPQILIKNTPVPANPSTTFSAAKFASFITQYSTGQVSVEIEWELQKENSKRWNPEIQYTSNYNKSVNVDFTVDTNGVYSEPRPIGTRYLTRNL

SEQ ID NO: 2666 - protein, 735 aa, Artificial Sequence
  Description of Artificial Sequence: Synthetic polypeptide
MAADGYLPDWLEDTLSEGIRQWWKLKPGPPPPKPAERHKDDSRGLVLPGYKYLGPFNGLDKGEPVNEADAAALEHDKAYDRQLDSGDNPYLKYNHADAEFQERLKEDTSFGGNLGRAVFQAKKRVLEPLGLVEEPVKTAPGKKRPVEHSPVEPDSSSGTGKAGQQPARKRLNFGQTGDADSVPDPQPLGQPPAAPSGLGTNTMATGSGAPMADNNEGADGVGNSSGNWHCDSTWMGDRVITTSTRTWALPTYNNHLYKQISSQSGTSNDNHYFGYSTPWGYFDFNRFHCHFSPRDWQRLINNNWGFRPKRLSFKLFNIQVKEVTQNDGTTTIANNLTSTVQVFTDSEYQLPYVLGSAHQGCLPPFPADVFMVPQYGYLTLNNGSQAVGRSSFYCLEYFPSQMLRTGNNFTFSYTFEDVPFHSSYAHSQSLDRLMNPLIDQYLYYLSKTNAPSGTTTMSRLQFSQAGASDIRDQSRNWLPGPCYRQQRVSKTAADNNNSDYSWTGATKYHLNGRDSLVNPGPAMASHKDDEEKYFPQSGVLIFGKQGSNKTNVDIEKVMITDEEEIRTTNPVATEQYGSVSTNLQSGNTQAATSDVNTQGVLPGMVWQDRDVYLQGPIWAKIPHTDGHFHPSPLMGGFGLKHPPPQILIKNTPVPANPSTTFSAAKFASFITQYSTGQVSVEIEWELQKENSKRWNPEIQYTSNYNKSVNVDFTVDTNGVYSEPRPIGTRYLTRNL

SEQ ID NO: 2667 - protein, 735 aa, Artificial Sequence
  Description of Artificial Sequence: Synthetic polypeptide
MAADGYLPDWLEDTLSEGIRQWWKLKPGPPPPKPAERHKDDSRGLVLPGYKYLGPFNGLDKGEPVNEADAAALEHDKAYDRQLDSGDNPYLKYNHADAEFQERLKEDTSFGGNLGRAVFQAKKRVLEPLGLVEEPVKTAPGKKRPVEHSPVEPDSSSGTGKAGQQPARKRLNFGQTGDADSVPDPQPLGQPPAAPSGLGTNTMATGSGAPMADNNEGADGVGNSSGNWHCDSTWMGDRVITTSTRTWALPTYNNHLYKQISSQSGASNDNHYFGYSTPWGYFDFNRFHCHFSPRDWQRLINNNWGFRPKRLSFKLFNIQVKEVTQNDGTTTIANNLTSTVQVFTDSEYQLPYVLGSAHQGCLPPFPADVFMVPQYGYLTLNNGSQAVGRSSFYCLEYFPSQMLRTGNNFTFSYTFEDVPFHSSYAHSQSLDRLMNPLIDQYLYYLSKTNAPSGTTTMSRLQFSQAGASDIRDQSRNWLPGPCYRQQRVSKTAADNNNSDYSWTGATKYHLNGRDSLVNPGPAMASHKDDEEKYFPQSGVLIFGKQGSNKTNVDIEKVMITDEEEIRTTNPVATEQYGSVSTNLQSGNTQAATSDVNTQGVLPGMVWQDRDVYLQGPIWAKIPHTDGHFHPSPLMGGFGLKHPPPQILIKNTPVPANPSTTFSAAKFASFITQYSTGQVSVEIEWELQKENSKRWNPEIQYTSNYNKSVNVDFTVDTNGVYSEPHPIGTRYLTRNL

SEQ ID NO: 2668 - protein, 735 aa, Artificial Sequence
  Description of Artificial Sequence: Synthetic polypeptide
MAADGYLPDWLEDTLSEGIRQWWKFKPGPPPPKPAERHKDDSRGLVLPGYKYLGPFNGLDKGEPVNEADAAALEHDKAYDRQLDSGDNPYLKYNHADAEFQERLKEDTSFGGNLGRAVFQAKKRVLEPLGLVEEPVKTAPGKKRPVEHSPVEPDSSSGTGKAGQQPARKRLNFGQTGDADSVPDPQPLGQPPAAPSGLGTNTMATGSGAPMADNNEGADGVGNSSGNWHCDSTWMGDRVITTSTRTWALPTYNNHLYKQISSQSGASNDNHYFGYSTPWGYFDFNRFHCHFSPRDWQRLINNNWGFRPKRLSFKLFNIQVKEVTQNDGTTTIANNLTSTVQVFTDSEYQLPYVLGSAHQGCLPPFPADVFMVPQYGYLTLNNGSQAVGRSSFYCLEYFPSQMLRTGNNFTFSYTFEDVPFHSSYAHSQSLDRLMNPLIDQYLYYLSKTNAPSGTTTMSRLQFSQAGASDIRDQSRNWLPGPCYRQQRVSKTAADNNNSDYSWTGATKYHLNGRDSLVNPGPAMASHKDDEEKYFPQSGVLIFGKQGSNKTNVDIEKVMITDEEEIRTTNPVATEQYGSVSTNLQSGNTQAATSDVNTQGVLPGMVWQDRDVYLQGPIWAKIPHTDGHFHPSPLMGGFGLKHPPPQILIKNTPVPANPSTTFSAAKFASFITQYSTGQVSVEIEWELQKENSKRWNPEIQYTSNYNKSVNVDFTVDTNGVYSEPRPIGTRYLTRNL

SEQ ID NO: 2669 - protein, 735 aa, Artificial Sequence
  Description of Artificial Sequence: Synthetic polypeptide
MAADGYLPDWLEDTLSEGIRQWWKLKPGPPPPKPAERHKDDSRGLVLPGYKYLGPFNGLDKGEPVNEADAAALEHDKAYDRQLDSGDNPYLKYNHADAEFQERLKEDTSFGGNLGRAVFQAKKRVLEPLGLVEEPVKTAPGKKRPVEHSPVEPDSSSGTGKAGQQPARKRLNFGQTGDADSVPDPQPLGQPPAAPSGLGTNTMATGSGAPMADNNEGADGVGNSSGNWHCDSTWMGDRVITTSTRTWALPTYNNHLYKQISSQSGASNDNHYFGYSTPWGYFDFNRFHCHFSSRDWQRLINNNWGFRPKRLSFKLFNIQVKEVTQNDGTTTIANNLTSTVQVFTDSEYQLPYVLGSAHQGCLPPFPADVFMVPQYGYLTLNNGSQAVGRSSFYCLEYFPSQMLRTGNNFTFSYTFEDVPFHSSYAHSQSLDRLMNPLIDQYLYYLSKTNAPSGTTTMSRLQFSQAGASDIRDQSRNWLPGPCYRQQRVSKTAADNNNSDYSWTGATKYHLNGRDSLVNPGPAMASHKDDEEKYFPQSGVLIFGKQGSNKTNVDIEKVMITDEEEIRTTNPVATEQYGSVSTNLQSGNTQAATSDVNTQGVLPGMVWQDRDVYLQGPIWAKIPHTDGHFHPSPLMGGFGLKHPPPQILIKNTPVPANPSTTFSAAKFASFITQYSTGQVSVEIEWELQKENSKRWNPEIQYTSNYNKSVNVDFTVDTNGVYSEPRPIGTRYLTRNL

SEQ ID NO: 2670 - protein, 735 aa, Artificial Sequence
  Description of Artificial Sequence: Synthetic polypeptide
MAADGYLPDWLEDTLSEGIRQWWKLKPGPPPPKPAERHEDDSRGLVLPGYKYLGPFNGLDKGEPVNEADAAALEHDKAYDRQLDSGDNPYLKYNHADAEFQERLKEDTSFGGNLGRAVFQAKKRVLEPLGLVEEPVKTAPGKKRPVEHSPVEPDSSSGTGKAGQQPARKRLNFGQTGDADSVPDPQPLGQPPAAPSGLGTNTMATGSGAPMADNNEGADGVGNSSGNWHCDSTWMGDRVITTSTRTWALPTYNNHLYKQISSQSGASNDNHYFGYSTPWGYFDFNRFHCHFSPRDWQRLINNNWGFRPKRLSFKLFNIQVKEVTQNDGTTTIANNLTSTVQVFTDSEYQLPYVLGSAHQGCLPPFPADVFMVPQYGYLTLNNGSQAVGRSSFYCLEYFPSQMLRTGNNFTFSYTFEDVPFHSSYAHSQSLDRLMNPLIDQYLYYLSKTNAPSGTTTMSRLQFSQAGASDIRDQSRNWLPGPCYRQQRVSKTAADNNNSDYSWTGATKYHLNGRDSLVNPGPAMASHKDDEEKYFPQSGVLIFGKQGSNKTNVDIEKVMITDEEEIRTTNPVATEQYGSVSTNLQSGNTQAATSDVNTQGVLPGMVWQDRDVYLQGPIWAKIPHTDGHFHPSPLMGGFGLKHPPPQILIKNTPVPANPSTTFSAAKFASFITQYSTGQVSVEIEWELQKENSKRWNPEIQYTSNYNKSVNVDFTVDTNGVYSEPRPIGTRYLTRNL

SEQ ID NO: 2671 - protein, 734 aa, Artificial Sequence
  Description of Artificial Sequence: Synthetic polypeptide
MAADGYLPDWLEDTLSEGIRQWWKLKPGPPPPKPAERHKDDSRGLVLPGYKYLGPFNGLDKGEPVNEADAAALEHDKAYDRQLDSGDNPYLKYNHADAEFQERLKEDTSFGGNLGRAVFQAKKRVLEPLGLVEEPVKTAPGKKRPVEHSPVEPDSSSGTGKAGQQPARKRLNFGQTGDADSVPDPQPLGQPPAAPSGLGTNTMATGSGAPMADNNEGADGVGNSSGNWHCDSTWMGDRVITTSTRTWALPTYNNHLYKQISSQSGASNDNHYFGYSTPWGYFDFNRFHCHFSPRDWQRLINNNWGFRPKRLSFKLFNIQVKEVTQNDGTTTIANNLTSTVQVFTDSEYQLPYVLGSAHQGCLPPFPADVFMVPQYGYLTLNNGSQAVGRSSFYCLEYFPSQMLRTGNNFTFSYTFEDVPFHSSYAHSQSLDRLMNPLIDQYLYYLSKTNAPSGTTTMSRLQFSQAGASDIRDQSRNWLPGPCYRQQRVSKTAADNNSDYSWTGATKYHLNGRDSLVNPGPAMASHKDDEEKYFPQSGVLIFGKQGSNKTNVDIEKVMITDEEEIRTTNPVATEQYGSVSTNLQSGNTQAATSDVNTQGVLPGMVWQDRDVYLQGPIWAKIPHTDGHFHPSPLMGGFGLKHPPPQILIKNTPVPANPSTTFSAAKFASFITQYSTGQVSVEIEWELQKENSKRWNPEIQYTSNYNKSVNVDFTVDTNGVYSEPRPIGTRYLTRNL

SEQ ID NO: 2672 - protein, 735 aa, Artificial Sequence
  Description of Artificial Sequence: Synthetic polypeptide
MAADGYLPDWLEDTLSEGIRQWWKLKPGPPPPKPAEWHKDDSRGLVLPGYKYLGPFNGLDKGEPVNEADAAALEHDKAYDRQLDSGDNPYLKYNHADAEFQERLKEDTSFGGNLGRAVFQAKKRVLEPLGLVEEPVKTAPGKKRPVEHSPVEPDSSSGTGKAGQQPARKRLNFGQTGDADSVPDPQPLGQPPAAPSGLGTNTMATGSGAPMADNNEGADGVGNSSGNWHCDSTWMGDRVITTSTRTWALPTYNNHLYKQISSQSGASNDNHYFGYSTPWGYFDFNRFHCHFSPRDWQRLINNNWGFRPKRLSFKLFNIQVKEVTQNDGTTTIANNLTSTVQVFTDSEYQLPYVLGSAHQGCLPPFPADVFMVPQYGYLTLNNGSQAVGRSSFYCLEYFPSQMLRTGNNFTFSYTFEDVPFHSSYAHSQSLDRLMNPLIDQYLYYLSKTNAPSGTTTMSRLQFSQAGASDIRDQSRNWLPGPCYRQQRVSKTAADNNNSDYSWTGATKYHLNGRDSLVNPGPAMASHKDDEEKYFPQSGVLIFGKQGSNKTNVDIEKVMITDEEEIRTTNPVATEQYGSVSTNLQSGNTQAATSDVNTQGVLPGMVWQDRDVYLQGPIWAKIPHTDGHFHPSPLMGGFGLKHPPPQILIKNTPVPANPSTTFSAAKFASFITQYSTGQVSVEIEWELQKENSKRWNPEIQYTSNYNKSVNVDFTVDTNGVYSEPRPIGTRYLTRNL

SEQ ID NO: 2673 - protein, 735 aa, Artificial Sequence
  Description of Artificial Sequence: Synthetic polypeptide
MAADGYLPDWLEDTLSEGIRQWWKLKPGPPPPKPAERHKDDSRGLVLPGYKYLGPFNGLDKGEPVNEADAAALEHDKAYDRQLDSGDNPYLKYNHADAEFQERLKEDTSFGGNLGRAVFQAKKRVLEPLGLVEEPVKTAPGKKRPVEHSPVEPDSSSGTGKAGQQPARKRLNFGQTGDADSVPDPQPLGQPPAAPSGLGTNTMATGSGAPMADNNEGADGVGNSSGNWHCDSTWMGDRVITTSTRTWALPTYNNHLYKQISSQSGASNDNHYFGYSTPWGYFDFNRFHCHFSPRDWQRLINNNWGFRPKRLSFKLFNIQVKEVTQNDGTTTIANNLTSTVQVFTDSEYQLPYVLGSAHQGCLPPFPADVFMVPQYGYLTLNNGSQAVGRSSFYCLEYFPSQMLRTGNNFTFSYTFEDVPFHSSYAHSQSLDRLMNPLIDQYLYYLSKTNAPSGTTTMSRLQFSQAGASDIRDQSRNWLPGPCYRQQRVSKTAADNNNSDYSWTGATKYHLNGRDSLVNPGPAMASHKDDEEKYFPQSGVLIFGKQGSNKTNVDIEKVMITDEEEIRTTNPVATEQYGSVSTNLQSGNTQAATSDVNTQGVLPDMVWQDRDVYLQGPIWAKIPHTDGHFHPSPLMGGFGLKHPPPQILIKNTPVPANPSTTFSAAKFASFITQYSTGQVSVEIEWELQKENSKRWNPEIQYTSNYNKSVNVDFTVDTNGVYSEPRPIGTRYLTRNL

SEQ ID NO: 2674 - protein, 735 aa, Artificial Sequence
  Description of Artificial Sequence: Synthetic polypeptide
MAADGYLPDWLEDTLSEGIRQWWKLKPGPPPPKPAERHKDDSRGLVLPGYKYLGPFNGLDKGEPVNEADAAALEHDKAYDRQLDSGDNPYLKYNHADAEFQERLKEDTSFGDNLGRAVFQAKKRVLEPLGLVEEPVKTAPGKKRPVEHSPVEPDSSSGTGKAGQQPARKRLNFGQTGDADSVPDPQPLGQPPAAPSGLGTNTMATGSGAPMADNNEGADGVGNSSGNWHCDSTWMGDRVITTSTRTWALPTYNNHLYKQISSQSGASNDNHYFGYSTPWGYFDFNRFHCHFSPRDWQRLINNNWGFRPKRLSFKLFNIQVKEVTQNDGTTTIANNLTSTVQVFTDSEYQLPYVLGSAHQGCLPPFPADVFMVPQYGYLTLNNGSQAVGRSSFYCLEYFPSQMLRTGNNFTFSYTFEDVPFHSSYAHSQSLDRLMNPLIDQYLYYLSKTNAPSGTTTMSRLQFSQAGASDIRDQSRNWLPGPCYRQQRVSKTAADNNNSDYSWTGATKYHLNGRDSLVNPGPAMASHKDDEEKYFPQSGVLIFGKQGSNKTNVDIEKVMITDEEEIRTTNPVATEQYGSVSTNLQSGNTQAATSDVNTQGVLPGMVWQDRDVYLQGPIWAKIPHTDGHFHPSPLMGGFGLKHPPPQILIKNTPVPANPSTTFSAAKFASFITQYSTGQVSVEIEWELQKENSKRWNPEIQYTSNYNKSVNVDFTVDTNGVYSEPRPIGTRYLTRNL

SEQ ID NO: 2675 - protein, 735 aa, Artificial Sequence
  Description of Artificial Sequence: Synthetic polypeptide
MAADGYLPDWLEDTLSEGIRQWWKLKPGPPPPKPAERHKDDSRGLVLPGYKYLGPFNGLDKGEPVNEADAAALEHDKAYDRQLDSGDNPYLKYNHADAEFQERLKEDTSFGGNLGRAVFQAKKRVLEPLGLVEEPVKTAPGKKRPVEHSPVEPDSSSGTGKAGQQPARKRLNFGQTGDADSVPDPQPLGQPPAAPSGLGTNTMATGSGAPMADNNEGADGVGNSSGNWHCDSTWMGDRVITTSTRTWALPTYNNHLYKQISSQSGASNDNHYFGYSTPWGYFDFNRFHCHFSPRDWQRLINNNWGFRPKRLSFKLFNIQVKEVTQNDGTTTIANNLTSTVQVFTDSEYQLPYVLDSAHQGCLPPFPADVFMVPQYGYLTLNNGSQAVGRSSFYCLEYFPSQMLRTGNNFTFSYTFEDVPFHSSYAHSQSLDRLMNPLIDQYLYYLSKTNAPSGTTTMSRLQFSQAGASDIRDQSRNWLPGPCYRQQRVSKTAADNNNSDYSWTGATKYHLNGRDSLVNPGPAMASHKDDEEKYFPQSGVLIFGKQGSNKTNVDIEKVMITDEEEIRTTNPVATEQYGSVSTNLQSGNTQAATSDVNTQGVLPGMVWQDRDVYLQGPIWAKIPHTDGHFHPSPLMGGFGLKHPPPQILIKNTPVPANPSTTFSAAKFASFITQYSTGQVSVEIEWELQKENSKRWNPEIQYTSNYNKSVNVDFTVDTNGVYSEPRPIGTRYLTRNL

SEQ ID NO: 2676 - protein, 735 aa, Artificial Sequence
  Description of Artificial Sequence: Synthetic polypeptide
MAADGYLPDWLEDTLSEGIRQWWKLKPGPPPPKPAERHKDDSRGLVLPGYKYLGPFNGLDKGEPVNEADAAALEHDKAYDRQLDSGDNPYLKYNHADAEFQERLKEDTSFGGNLGRAVFQAKKRVLEPLGLVEEPVKTAPGKKRPVEHSPVEPDSSSGTGKAGQQPARKRLNFGQTGDADSVPDPQPLGQPPAAPSGLGTNTMATGSGAPMADNNEGADGVGNSSGNWHCDSTWMGDRVITTSTRTWALPTYNNHLYKQISSQSGASNDNHYFGYSTPWGYFDFNRFHCHFSPRDWQRLINNNWGFRPKRLSFKLFNIQVKEVTQNDGTTTIANNLTSTVQVFTDSEYQLPYVLGSAHQGCLPPFPADVFMVPQYGYLTLNNGSQAVGRSSFYCLEYFPSQMLRTGNNFTFSYTFEDVPFHSSYAHSQSLDRLMNPLIDQYLYYLSKTNAPSGTTTMSRLQFSQAGASDIRDQSRNWLPGPCYRQQRVSKTAADNNNSDYSWTGATKYHLNGRDSLVNPGPAMASHKDDEEKYFPQSGVLIFGKQGSNKTNVDIEKVMITDEEEIRTTNPVATEQYGSVSTNLQSGNTQAATSDVNTQGVLPGMVWQDRDVYLQGPIWAKIPHTDGHFHPSPLMGGFGLKHPPPQILIKNTPVPANPSTTFSATKFASFITQYSTGQVSVEIEWELQKENSKRWNPEIQYTSNYNKSVNVDFTVDTNGVYSEPRPIGTRYLTRNL

SEQ ID NO: 2677 - protein, 735 aa, Artificial Sequence
  Description of Artificial Sequence: Synthetic polypeptide
MAADGYLPDWLEDTLSEGIRQWWKLKPGPPPPKPAERHKDDSRGLVLPGYKYLGPFNGLDKGESVNEADAAALEHDKAYDRQLDSGDNPYLKYNHADAEFQERLKEDTSFGGNLGRAVFQAKKRVLEPLGLVEEPVKTAPGKKRPVEHSPVEPDSSSGTGKAGQQPARKRLNFGQTGDADSVPDPQPLGQPPAAPSGLGTNTMATGSGAPMADNNEGADGVGNSSGNWHCDSTWMGDRVITTSTRTWALPTYNNHLYKQISSQSGASNDNHYFGYSTPWGYFDFNRFHCHFSPRDWQRLINNNWGFRPKRLSFKLFNIQVKEVTQNDGTTTIANNLTSTVQVFTDSEYQLPYVLGSAHQGCLPPFPADVFMVPQYGYLTLNNGSQAVGRSSFYCLEYFPSQMLRTGNNFTFSYTFEDVPFHSSYAHSQSLDRLMNPLIDQYLYYLSKTNAPSGTTTMSRLQFSQAGASDIRDQSRNWLPGPCYRQQRVSKTAADNNNSDYSWTGATKYHLNGRDSLVNPGPAMASHKDDEEKYFPQSGVLIFGKQGSNKTNVDIEKVMITDEEEIRTTNPVATEQYGSVSTNLQSGNTQAATSDVNTQGVLPGMVWQDRDVYLQGPIWAKIPHTDGHFHPSPLMGGFGLKHPPPQILIKNTPVPANPSTTFSAAKFASFITQYSTGQVSVEIEWELQKENSKRWNPEIQYTSNYNKSVNVDFTVDTNGVYSEPRPIGTRYLTRNL

SEQ ID NO: 2678 - protein, 735 aa, Artificial Sequence
  Description of Artificial Sequence: Synthetic polypeptide
MAADGYLPDWLEDTLSEGIRQWWKLKPGPPPPKPAERHKDDSRGLVLPGYKYLGPFNGLDKGEPVNEADAAALEHDKAYDRQLDSGDNPYLKYNHADAEFQERLKEDTSFGGNLGRAVFQAKKRVLEPLGLVEEPVKTAPGKKRPVEHSPVEPDSSSGTGKAGQQPARKRLNFGQTGDADSVPDPQPLGQPPAAPSGLGTNTMATGSGAPMADNNEGADGVGNSSGNWHCDSTWMGDRVITTSTRTWALPTYNNHLYKQISSQSGASNDNHYFGYSTPWGYFDFNRFHCHFSPRDWQRLINNNWGFRPKRLSFKLFNIQVKEVTQNDGTTTIANNLTSTVQVFTDSEYQLPYVLGSVHQGCLPPFPADVFMVPQYGYLTLNNGSQAVGRSSFYCLEYFPSQMLRTGNNFTFSYTFEDVPFHSSYAHSQSLDRLMNPLIDQYLYYLSKTNAPSGTTTMSRLQFSQAGASDIRDQSRNWLPGPCYRQQRVSKTAADNNNSDYSWTGATKYHLNGRDSLVNPGPAMASHKDDEEKYFPQSGVLIFGKQGSNKTNVDIEKVMITDEEEIRTTNPVATEQYGSVSTNLQSGNTQAATSDVNTQGVLPGMVWQDRDVYLQGPIWAKIPHTDGHFHPSPLMGGFGLKHPPPQILIKNTPVPANPSTTFSAAKFASFITQYSTGQVSVEIEWELQKENSKRWNPEIQYTSNYNKSVNVDFTVDTNGVYSEPRPIGTRYLTRNL

SEQ ID NO: 2679 - protein, 735 aa, Artificial Sequence
  Description of Artificial Sequence: Synthetic polypeptide
MAADGYLPDWLEDTLSEGIRQWWKLKPGPPPPKPAERHKDDSRGLVLPGYKYLGPFNGLDKGEPVNEADAAALEHDKAYDRQLDSGDNPYLKYNHADAEFQERLKEDTSFGGNLGRAVFQAKKRVLEPLGLVEEPVKTAPGKKRPVEHSPVESDSSSGTGKAGQQPARKRLNFGQTGDADSVPDPQPLGQPPAAPSGLGTNTMATGSGAPMADNNEGADGVGNSSGNWHCDSTWMGDRVITTSTRTWALPTYNNHLYKQISSQSGASNDNHYFGYSTPWGYFDFNRFHCHFSPRDWQRLINNNWGFRPKRLSFKLFNIQVKEVTQNDGTTTIANNLTSTVQVFTDSEYQLPYVLGSAHQGCLPPFPADVFMVPQYGYLTLNNGSQAVGRSSFYCLEYFPSQMLRTGNNFTFSYTFEDVPFHSSYAHSQSLDRLMNPLIDQYLYYLSKTNAPSGTTTMSRLQFSQAGASDIRDQSRNWLPGPCYRQQRVSKTAADNNNSDYSWTGATKYHLNGRDSLVNPGPAMASHKDDEEKYFPQSGVLIFGKQGSNKTNVDIEKVMITDEEEIRTTNPVATEQYGSVSTNLQSGNTQAATSDVNTQGVLPGMVWQDRDVYLQGPIWAKIPHTDGHFHPSPLMGGFGLKHPPPQILIKNTPVPANPSTTFSAAKFASFITQYSTGQVSVEIEWELQKENSKRWNPEIQYTSNYNKSVNVDFTVDTNGVYSEPRPIGTRYLTRNL

SEQ ID NO: 2680 - protein, 735 aa, Artificial Sequence
  Description of Artificial Sequence: Synthetic polypeptide
MAADGYLPDWLEDTLSEGIRQWWKLKPGPPPPKPAERHKDDSRGLVLPGYKYLGPFNGLDKGEPVNEADAAALEHDKAYDRQLDSGDNPYLKYNHADAEFQERLKEDTSFGGNLGRAVFQAKKRVLEPLGLVEEPVKTAPGKKRPVEHSPVEPDSSSGTGKAGQQPARKRLNFGQTGDADSVPDPQPLGQPPAAPSGLGTNTMATGSGAPMADNNEGADGVGNSSGNWHCDSTWMGDRVITTSTRTWALPTYNNHLYKQISSQSGASNDNHYFGYSTPWGYFDFNRFHCHFSPRDWQRLINNNWGFRPKRLSFKLFNIQVKEVTQNDGTTTIANNLTSTVQVFTDSEYQLPYVLGSAHQGCLPPFPADVFMVPQYGYLTLNNGSQAVGRSSFYCLEYFPSQMLRTGNNFTFSYTFEDVPFHSSYAHSQSMDRLMNPLIDQYLYYLSKTNAPSGTTTMSRLQFSQAGASDIRDQSRNWLPGPCYRQQRVSKTAADNNNSDYSWTGATKYHLNGRDSLVNPGPAMASHKDDEEKYFPQSGVLIFGKQGSNKTNVDIEKVMITDEEEIRTTNPVATEQYGSVSTNLQSGNTQAATSDVNTQGVLPGMVWQDRDVYLQGPIWAKIPHTDGHFHPSPLMGGFGLKHPPPQILIKNTPVPANPSTTFSAAKFASFITQYSTGQVSVEIEWELQKENSKRWNPEIQYTSNYNKSVNVDFTVDTNGVYSEPRPIGTRYLTRNL

SEQ ID NO: 2681 - protein, 735 aa, Artificial Sequence
  Description of Artificial Sequence: Synthetic polypeptide
MAADGYLPDWLEDTLSEGIRQWWKLKPGPPPPKPAERHKDDSRGLVLPGYKYLGPFNGLDKGEPVNEADAAALEHDKAYDRQLDSGDNPYLKYNHADAEFQERLKEDTSFGGNLGRAVFQAKKRVLEPLGLVEEPVKTAPGKKRPVEHSPVEPDSSSGTGKAGQQPARKRLNFGQTGDADSVPDPQPLGQPPAAPSGLGTNTMATGSGAPMADNNEGADGVGNSSGNWHCDSTWMGDRVITTSTRTWALPTYNNHLYKQISSQSGASNDNHYFGYSTPWGYFDFNRFHCHFSPRDWQRLINNNWGFRPKRLSFKLFNIQVKEVTQNDGTTTIANNLTSTVQVFTDSEYQLPYVLGSAHQGCLPPFPADVFMVPQYGYLTLNNGSQAVGRSSFYCLEYFPSQMLRTGNNFTFSYTFEDVPFHSSYAHSQSLDRLMNPLIDQYLYYLSKTNAPSGTTTMSRLQFSQAGASDIRDQSRNWLPGPCYRQQRVSKTAADNNNSDYSWTGATKYHLNGRDSLVNPGPAMASHKDDEEKYFPQSGVLIFRKQGSNKTNVDIEKVMITDEEEIRTTNPVATEQYGSVSTNLQSGNTQAATSDVNTQGVLPGMVWQDRDVYLQGPIWAKIPHTDGHFHPSPLMGGFGLKHPPPQILIKNTPVPANPSTTFSAAKFASFITQYSTGQVSVEIEWELQKENSKRWNPEIQYTSNYNKSVNVDFTVDTNGVYSEPRPIGTRYLTRNL

SEQ ID NO: 2682 - protein, 735 aa, Artificial Sequence
  Description of Artificial Sequence: Synthetic polypeptide
MAADGYLPDWLEDTLSEGIRQWWKLKPGPPPPKPAERHKDDSRGLVLPGYKYLGPFNGLDKGEPVNEADTAALEHDKAYDRQLDSGDNPYLKYNHADAEFQERLKEDTSFGGNLGRAVFQAKKRVLEPLGLVEEPVKTAPGKKRPVEHSPVEPDSSSGTGKAGQQPARKRLNFGQTGDADSVPDPQPLGQPPAAPSGLGTNTMATGSGAPMADNNEGADGVGNSSGNWHCDSTWMGDRVITTSTRTWALPTYNNHLYKQISSQSGASNDNHYFGYSTPWGYFDFNRFHCHFSPRDWQRLINNNWGFRPKRLSFKLFNIQVKEVTQNDGTTTIANNLTSTVQVFTDSEYQLPYVLGSAHQGCLPPFPADVFMVPQYGYLTLNNGSQAVGRSSFYCLEYFPSQMLRTGNNFTFSYTFEDVPFHSSYAHSQSLDRLMNPLIDQYLYYLSKTNAPSGTTTMSRLQFSQAGASDIRDQSRNWLPGPCYRQQRVSKTAADNNNSDYSWTGATKYHLNGRDSLVNPGPAMASHKDDEEKYFPQSGVLIFGKQGSNKTNVDIEKVMITDEEEIRTTNPVATEQYGSVSTNLQSGNTQAATSDVNTQGVLPGMVWQDRDVYLQGPIWAKIPHTDGHFHPSPLMGGFGLKHPPPQILIKNTPVPANPSTTFSAAKFASFITQYSTGQVSVEIEWELQKENSKRWNPEIQYTSNYNKSVNVDFTVDTNGVYSEPRPIGTRYLTRNL

SEQ ID NO: 2683 - protein, 735 aa, Artificial Sequence
  Description of Artificial Sequence: Synthetic polypeptide
MAADGYLPDWLEDTLSEGIRQWWKLKPGPPPPKPAERHKDDSRGLVLPGYKYLGPFNGLDKGEPVNEADAAALEHDKAYDRQLDSGDNPYLKYNHADAEFQERLKEDTSFGGNLGRAVFQAKKRVLEPLGLVEEPVKTAPGKKRPVEHSPVEPDSSSGTGKAGQQPARKRLNFGQTGDADSVPDPQPLGQPPAAPSGLGTNTMATGSGTPMADNNEGADGVGNSSGNWHCDSTWMGDRVITTSTRTWALPTYNNHLYKQISSQSGASNDNHYFGYSTPWGYFDFNRFHCHFSPRDWQRLINNNWGFRPKRLSFKLFNIQVKEVTQNDGTTTIANNLTSTVQVFTDSEYQLPYVLGSAHQGCLPPFPADVFMVPQYGYLTLNNGSQAVGRSSFYCLEYFPSQMLRTGNNFTFSYTFEDVPFHSSYAHSQSLDRLMNPLIDQYLYYLSKTNAPSGTTTMSRLQFSQAGASDIRDQSRNWLPGPCYRQQRVSKTAADNNNSDYSWTGATKYHLNGRDSLVNPGPAMASHKDDEEKYFPQSGVLIFGKQGSNKTNVDIEKVMITDEEEIRTTNPVATEQYGSVSTNLQSGNTQAATSDVNTQGVLPGMVWQDRDVYLQGPIWAKIPHTDGHFHPSPLMGGFGLKHPPPQILIKNTPVPANPSTTFSAAKFASFITQYSTGQVSVEIEWELQKENSKRWNPEIQYTSNYNKSVNVDFTVDTNGVYSEPRPIGTRYLTRNL

SEQ ID NO: 2684 - protein, 735 aa, Artificial Sequence
  Description of Artificial Sequence: Synthetic polypeptide
MAADGYLPDWLEDTLSEGIRQWWKLKPGPPPPKPAERHKDDSRGLVLPGYKYLGPFNGLDKGEPVNEADAAALEHDKAYDRQLDSGDNPYLKYNHADAEFQERLKEDTSFGGNLGRAVFQAKKRVLEPLGLVEEPVKTAPGKKRPVEHSPVEPDSSSGTGKAGQQPARKRLNFGQTGDADSVPDPQPLGQPPAAPSGLGTNTMATGSGAPMADNNEGADGVGNSSGNWHCDSTWMGDRVITTSTRTWALSTYNNHLYKQISSQSGASNDNHYFGYSTPWGYFDFNRFHCHFSPRDWQRLINNNWGFRPKRLSFKLFNIQVKEVTQNDGTTTIANNLTSTVQVFTDSEYQLPYVLGSAHQGCLPPFPADVFMVPQYGYLTLNNGSQAVGRSSFYCLEYFPSQMLRTGNNFTFSYTFEDVPFHSSYAHSQSLDRLMNPLIDQYLYYLSKTNAPSGTTTMSRLQFSQAGASDIRDQSRNWLPGPCYRQQRVSKTAADNNNSDYSWTGATKYHLNGRDSLVNPGPAMASHKDDEEKYFPQSGVLIFGKQGSNKTNVDIEKVMITDEEEIRTTNPVATEQYGSVSTNLQSGNTQAATSDVNTQGVLPGMVWQDRDVYLQGPIWAKIPHTDGHFHPSPLMGGFGLKHPPPQILIKNTPVPANPSTTFSAAKFASFITQYSTGQVSVEIEWELQKENSKRWNPEIQYTSNYNKSVNVDFTVDTNGVYSEPRPIGTRYLTRNL

SEQ ID NO: 2685 - protein, 735 aa, Artificial Sequence
  Description of Artificial Sequence: Synthetic polypeptide
MAADGYLPDWLEDTLSEGIRQWWKLKPGPPPPKPAERHKDDSRGLVLPGYKYLGPFNGLDKGEPVNEADAAALEHDKAYDRQLDSGDNPYLKYNHADAEFQERLKEDTSFGGNLGRAVFQAKKRVLEPLGLVEEPVKTAPGKKRPVEHSPVEPDSSSGTGKAGQQPARKRLNFGQTGDADSVPDPQPLGQPPAAPSGLGTNTMATGSGAPMADNNEGADGVGNSSGNWHCDSTWMGDRVITTSTRTWALPTYNNHLYKQISSQSGASNDNHYFGYSTPWGYFDFNRFHCHFSPRDWQRLINNNWGFRPKRLSFKLFNIQVKEVTQNDGTTTIANNLTSTVQVFTDSEYQLPYVLGSAHQGCLPPFPADVFMVPQYGYLTLNNGSQAVGRSSFYCLEYFPSQMLRTGNNFTFSYTFEDVPFHSSYAHSQSLDRLMNPLIDQYLYYLSKTNAPSGTTTMSRLQFSQAGASDIRDQSRNWLPGPCYRQQRVSKTAVDNNNSDYSWTGATKYHLNGRDSLVNPGPAMASHKDDEEKYFPQSGVLIFGKQGSNKTNVDIEKVMITDEEEIRTTNPVATEQYGSVSTNLQSGNTQAATSDVNTQGVLPGMVWQDRDVYLQGPIWAKIPHTDGHFHPSPLMGGFGLKHPPPQILIKNTPVPANPSTTFSAAKFASFITQYSTGQVSVEIEWELQKENSKRWNPEIQYTSNYNKSVNVDFTVDTNGVYSEPRPIGTRYLTRNL

SEQ ID NO: 2686 - protein, 735 aa, Artificial Sequence
  Description of Artificial Sequence: Synthetic polypeptide
MAADGYLPDWLEDTLSEGIRQWWKLKPGPPPPKPAERHKDDSRGLVLPGYKYLGPFNGLDKGEPVNEADAAALEHDKAYDRQLDSGDNPYLKYNHADAEFQERLKEDTSFGGNLGRAVFQAKKRVLEPLGLVEEPVKTAPGKKRPVEHSPVEPDSSSGTGKAGQQPARKRLNFGQTGDADSVPDPQPLGQPPAAPSGLGTNTMATGSGAPMADNNEGADGVGNSSGNWHCDSTWMGDRVITTSTRTWALPTYNNHLYKQISSQSGASNDNHYFGYSTPWGYFDFNRFHCHFSPRDWQRLINNNWGFRPKRLSFKLFNIQVKEVTQNDGTTTIANNLTSTVQVFTDSEYQLPYVLGSAHQGCLPPFPADVFMVPQYGYLTLNNGSQAVGRSSFYCLEYFPSQILRTGNNFTFSYTFEDVPFHSSYAHSQSLDRLMNPLIDQYLYYLSKTNAPSGTTTMSRLQFSQAGASDIRDQSRNWLPGPCYRQQRVSKTAADNNNSDYSWTGATKYHLNGRDSLVNPGPAMASHKDDEEKYFPQSGVLIFGKQGSNKTNVDIEKVMITDEEEIRTTNPVATEQYGSVSTNLQSGNTQAATSDVNTQGVLPGMVWQDRDVYLQGPIWAKIPHTDGHFHPSPLMGGFGLKHPPPQILIKNTPVPANPSTTFSAAKFASFITQYSTGQVSVEIEWELQKENSKRWNPEIQYTSNYNKSVNVDFTVDTNGVYSEPRPIGTRYLTRNL

SEQ ID NO: 2687 - protein, 735 aa, Artificial Sequence
  Description of Artificial Sequence: Synthetic polypeptide
MAADGYLPDWLEDTLSEGIRQWWKLKPGPPPPKPAERHKDDSRGLVLPGYKYLGPFNGLDKGEPVNEADAAALEHDKAYDRQLDSGDNPYLKYNHADAEFQERLKEDTSFGGNLGRAVFQAKKRVLEPLGLVEEPVKTAPGKKRPVEHSPVEPDSSSGTGKVGQQPARKRLNFGQTGDADSVPDPQPLGQPPAAPSGLGTNTMATGSGAPMADNNEGADGVGNSSGNWHCDSTWMGDRVITTSTRTWALPTYNNHLYKQISSQSGASNDNHYFGYSTPWGYFDFNRFHCHFSPRDWQRLINNNWGFRPKRLSFKLFNIQVKEVTQNDGTTTIANNLTSTVQVFTDSEYQLPYVLGSAHQGCLPPFPADVFMVPQYGYLTLNNGSQAVGRSSFYCLEYFPSQMLRTGNNFTFSYTFEDVPFHSSYAHSQSLDRLMNPLIDQYLYYLSKTNAPSGTTTMSRLQFSQAGASDIRDQSRNWLPGPCYRQQRVSKTAADNNNSDYSWTGATKYHLNGRDSLVNPGPAMASHKDDEEKYFPQSGVLIFGKQGSNKTNVDIEKVMITDEEEIRTTNPVATEQYGSVSTNLQSGNTQAATSDVNTQGVLPGMVWQDRDVYLQGPIWAKIPHTDGHFHPSPLMGGFGLKHPPPQILIKNTPVPANPSTTFSAAKFASFITQYSTGQVSVEIEWELQKENSKRWNPEIQYTSNYNKSVNVDFTVDTNGVYSEPRPIGTRYLTRNL

SEQ ID NO: 2688 - protein, 735 aa, Artificial Sequence
  Description of Artificial Sequence: Synthetic polypeptide
MAADGYLPDWLEDTLSEGIRQWWKLKPGPPPPKPAERHKDDSRGLVLPGYKYLGPFNGLDKGEPVNEADAAALEHDKAYDRQLDSGDNPYLKYNHADAEFQERLKEDTSFGGNLGRAVFQAKKRVLEPLGLVEEPVKTAPGKKRPVEHSPVEPDSSSGTGKAGQQPARKRLNFGQTGDADSVPDPQPLGQPPAAPSGLGTNTMAAGSGAPMADNNEGADGVGNSSGNWHCDSTWMGDRVITTSTRTWALPTYNNHLYKQISSQSGASNDNHYFGYSTPWGYFDFNRFHCHFSPRDWQRLINNNWGFRPKRLSFKLFNIQVKEVTQNDGTTTIANNLTSTVQVFTDSEYQLPYVLGSAHQGCLPPFPADVFMVPQYGYLTLNNGSQAVGRSSFYCLEYFPSQMLRTGNNFTFSYTFEDVPFHSSYAHSQSLDRLMNPLIDQYLYYLSKTNAPSGTTTMSRLQFSQAGASDIRDQSRNWLPGPCYRQQRVSKTAADNNNSDYSWTGATKYHLNGRDSLVNPGPAMASHKDDEEKYFPQSGVLIFGKQGSNKTNVDIEKVMITDEEEIRTTNPVATEQYGSVSTNLQSGNTQAATSDVNTQGVLPGMVWQDRDVYLQGPIWAKIPHTDGHFHPSPLMGGFGLKHPPPQILIKNTPVPANPSTTFSAAKFASFITQYSTGQVSVEIEWELQKENSKRWNPEIQYTSNYNKSVNVDFTVDTNGVYSEPRPIGTRYLTRNL

SEQ ID NO: 2689 - protein, 735 aa, Artificial Sequence
  Description of Artificial Sequence: Synthetic polypeptide
MAADGYLPDWLEDTLSEGIRQWWKLKPGPPPPKPAERHKDDSRGLVLPGYKYLGPFNGLDKGEPVNEADAAALEHDKAYDRQLDSGDNPYLKYNHADAEFQERLKEDTSFGGNLGRAVFQAKKRVLEPLGLVEEPVKTAPGKKRPVEHSPVEPDSSSGTGKAGQQPARKRLNFGQTGDADSVPDPQPLGQPPAAPSGLGTNTMATGSGAPMADNNEGADGVGNSSGNWHCDSTWMGDRVITTSTRTWALPTYNNHLYKQISSQSGASNDNHYFGYSTPWGYFDFNRFHCHFSPRDWQRLINNNWGFRPKRLSFKLFNIQVKEVTQNDGTTTIANNLTSTVQVFTDSEYQLPYVLGSAHQGCLPPFPADVFMVPQYGYLTLNNGSQAVGRSSFYCLEYFPSQMLRTGNNFTFSYTFEDVPFHSSYAHSQSLDRLMNPLIDQYLYYLSKTNAPSGTTTMSRLQFSQAGASDIRDQSRNWLPGPCYRQQRVSKTAADNNNSDYSWTGATKYHLNGRDSLVNPGPAMASHKDDEEKYFPQSGVLIFGKQGSNKTNVDIEKVMITDEEEIRTTNPVATEQYGSVSTNLQSDNTQAATSDVNTQGVLPGMVWQDRDVYLQGPIWAKIPHTDGHFHPSPLMGGFGLKHPPPQILIKNTPVPANPSTTFSAAKFASFITQYSTGQVSVEIEWELQKENSKRWNPEIQYTSNYNKSVNVDFTVDTNGVYSEPRPIGTRYLTRNL

SEQ ID NO: 2690 - protein, 735 aa, Artificial Sequence
  Description of Artificial Sequence: Synthetic polypeptide
MAADGYLPDWLEDTLSEGIRQWWKLKPGPPPPKPAERHKDDSRGLVLPGYKYLGPFNGLDKGEPVNEADAAALEHDKAYDRQLDSGDNPYLKYNHADAEFQERLKEDTSFGGNLGRAVFQAKKRVLEPLGLVEEPVKTAPGKKRPVEHSPVEPDSSSGTGKAGQQPARKRLNFGQTGDADSVPDPQPLGQPPAAPSGLGTNTMATGSGAPMADNNEGADGVGNSSGNWHCDSTWMGDRVITTSTRTWALPTYNNHLYKQISSQSGASNDNHYFGYSTPWGYFDFNRFHCHFSPRDWQRLINNNWGFRPKRLSFKLFNIQVKEVTQNDGTTTIANNLTSTVQVFTDSEYQLPYVLGSAHQGCLPPFPADVFMVPQYGYLTLNNGSQAVGRSSFYCLEYFPSQMLRTGNNFTFSYTFEDVPFHSSYAHSQSLDRLMNPLIDQYLYYLSKTNAPSGTTTMSRLQFSQAGASDIRDQSRNWLPGPCYRQQRVSKTAADNNNSDYSWTGATKYHLNGRDSLVNPGPAMASHKDDEEKYFPQSGVLIFGKQGSNKTNVDIEKVMITDEEEIRTTNPVATEQYGSVSTNLQSGNTQAATSDVNTQGVLPGMVWQDRDVYLQGPIWAKIPHTDGHFHPSPLMGGFGLKHPPPQILIKNTPVPANPSTTFSAAKFASFITQYSTGQVSVEIEWELQKENSKRWNPEIQYTSNYNKSVNVDFTVDTNGVYSEPRPIGTRYLTRNL

SEQ ID NO: 2691 - protein, 735 aa, Artificial Sequence
  Description of Artificial Sequence: Synthetic polypeptide
MAADGYLPDWLEDTLSEGIRQWWKLKPGPPPPKPAERHKDDSRGLVLPGYKYLGPFNGLDKGEPVNEADAAALEHDKAYDRQLDSGDNPYLKYNHADAEFQERLKEDTSFGGNLGRAVFQAKKRVLEPLGLVEEPVKTAPGKKRPVEHSPVEPDSSSGTGKAGQQPARKRLNFGQTGDADSVPDPQPLGQPPAAPSGLGTNTMATGSGAPMADNNEGADGVGNSSGNWHCDSTWMGDRVITTSTRTWALPTYNNHLYKQISSQSGASNDNHYFGYSTPWGYFDFNRFHCHFSPRDWQRLINNNWGFRPKRLSFKLFNIQVKEVTQNDGTTTIANNLTSTVQVFTDSEYQLPYVLGSAHQGCLPPFPADVFMVPQYGYLTLNNGSQAVGRSSFYCLEYFPSQMLRTGNNFTFSYTFEDVPFHSSYAHSQSLDRLMNPLIDQYLYYLSKTNAPSGTTTMSRLQFSQAGASDIRDQSRNWLPGPCYRQQRVSKTAADNNNSDYSWTGATKYHLNGRDSLVNPGPAMASHKDDEEKYFPQSGVLIFGKQGSNKTNVDIEKVMITDEEEIRTTNPVATEQYGSVSTNLQSGNTQAATSDVNTQGVLPGMVWQDRDVYLQGPIWAKIPHTDGHFHPSPLMGGFGLKHPPPQILIKNTPVPANPSTTFSAAKFASFITQYSTGQVSVEIEWELQKENSKRWNPEIQYTSNYNKSVNVDFTVDTNGVYSEPRPIDTRYLTRNL

SEQ ID NO: 2692 - protein, 735 aa, Artificial Sequence
  Description of Artificial Sequence: Synthetic polypeptide
MAADGYLPDWLEDTLSEGIRQWWKLKPGPPPPKPAERHKDDSRGLVLPGYKYLGPFNGLDKGEPVNEADAAALEHDKAYDRQLDSGDNPYLKYNHADAEFQERLKEDTSFGGNLGRAVFQAKKRVLEPLGLVEEPVKTAPGKKRPVEHSPVEPDSSSGTGKAGQQPARKRLNFGQTGDTDSVPDPQPLGQPPAAPSGLGTNTMATGSGAPMADNNEGADGVGNSSGNWHCDSTWMGDRVITTSTRTWALPTYNNHLYKQISSQSGASNDNHYFGYSTPWGYFDFNRFHCHFSPRDWQRLINNNWGFRPKRLSFKLFNIQVKEVTQNDGTTTIANNLTSTVQVFTDSEYQLPYVLGSAHQGCLPPFPADVFMVPQYGYLTLNNGSQAVGRSSFYCLEYFPSQMLRTGNNFTFSYTFEDVPFHSSYAHSQSLDRLMNPLIDQYLYYLSKTNAPSGTTTMSRLQFSQAGASDIRDQSRNWLPGPCYRQQRVSKTAADNNNSDYSWTGATKYHLNGRDSLVNPGPAMASHKDDEEKYFPQSGVLIFGKQGSNKTNVDIEKVMITDEEEIRTTNPVATEQYGSVSTNLQSGNTQAATSDVNTQGVLPGMVWQDRDVYLQGPIWAKIPHTDGHFHPSPLMGGFGLKHPPPQILIKNTPVPANPSTTFSAAKFASFITQYSTGQVSVEIEWELQKENSKRWNPEIQYTSNYNKSVNVDFTVDTNGVYSEPRPIGTRYLTRNL

SEQ ID NO: 2693 - protein, 735 aa, Artificial Sequence
  Description of Artificial Sequence: Synthetic polypeptide
MAADGYLPDWLEDTLSEGIRQWWKLKPGPPPPKPAERHKDDSRGLVLPGYKYLGPFNGLDKGEPVNEADAAALEHDKAYDRQLDSGDNPYLKYNHADAEFQERLKEDTSFGGNLGRAVFQAKKRVLEPLGLVEEPVKTTPGKKRPVEHSPVEPDSSSGTGKAGQQPARKRLNFGQTGDADSVPDPQPLGQPPAAPSGLGTNTMATGSGAPMADNNEGADGVGNSSGNWHCDSTWMGDRVITTSTRTWALPTYNNHLYKQISSQSGASNDNHYFGYSTPWGYFDFNRFHCHFSPRDWQRLINNNWGFRPKRLSFKLFNIQVKEVTQNDGTTTIANNLTSTVQVFTDSEYQLPYVLGSAHQGCLPPFPADVFMVPQYGYLTLNNGSQAVGRSSFYCLEYFPSQMLRTGNNFTFSYTFEDVPFHSSYAHSQSLDRLMNPLIDQYLYYLSKTNAPSGTTTMSRLQFSQAGASDIRDQSRNWLPGPCYRQQRVSKTAADNNNSDYSWTGATKYHLNGRDSLVNPGPAMASHKDDEEKYFPQSGVLIFGKQGSNKTNVDIEKVMITDEEEIRTTNPVATEQYGSVSTNLQSGNTQAATSDVNTQGVLPGMVWQDRDVYLQGPIWAKIPHTDGHFHPSPLMGGFGLKHPPPQILIKNTPVPANPSTTFSAAKFASFITQYSTGQVSVEIEWELQKENSKRWNPEIQYTSNYNKSVNVDFTVDTNGVYSEPRPIGTRYLTRNL

SEQ ID NO: 2694 - protein, 735 aa, Artificial Sequence
  Description of Artificial Sequence: Synthetic polypeptide
MAADGYLPDWLEDTLSEGIRQWWKLKPGPPPPKPAERHKDDSRGLVLPGYKYLGPFNGLDKGEPVNEADAAALEHDKAYDRQLDSGDNPYLKYNHADAEFQERLKEDTSFGGNLGRAVFQAKKRVLEPLGLVEEPVKTAPGKKRPVEHSPVEPDSSSGTGKAGQQPARKRLNFGQTGDADSVPDPQPLGQSPAAPSGLGTNTMATGSGAPMADNNEGADGVGNSSGNWHCDSTWMGDRVITTSTRTWALPTYNNHLYKQISSQSGASNDNHYFGYSTPWGYFDFNRFHCHFSPRDWQRLINNNWGFRPKRLSFKLFNIQVKEVTQNDGTTTIANNLTSTVQVFTDSEYQLPYVLGSAHQGCLPPFPADVFMVPQYGYLTLNNGSQAVGRSSFYCLEYFPSQMLRTGNNFTFSYTFEDVPFHSSYAHSQSLDRLMNPLIDQYLYYLSKTNAPSGTTTMSRLQFSQAGASDIRDQSRNWLPGPCYRQQRVSKTAADNNNSDYSWTGATKYHLNGRDSLVNPGPAMASHKDDEEKYFPQSGVLIFGKQGSNKTNVDIEKVMITDEEEIRTTNPVATEQYGSVSTNLQSGNTQAATSDVNTQGVLPGMVWQDRDVYLQGPIWAKIPHTDGHFHPSPLMGGFGLKHPPPQILIKNTPVPANPSTTFSAAKFASFITQYSTGQVSVEIEWELQKENSKRWNPEIQYTSNYNKSVNVDFTVDTNGVYSEPRPIGTRYLTRNL

SEQ ID NO: 2695 - protein, 735 aa, Artificial Sequence
  Description of Artificial Sequence: Synthetic polypeptide
MAADGYLPDWLEDTLSEGIRQWWKLKPGPPPPKPAERHKDDSRGLVLPGYKYLGPFNGLDKGEPVNEADAAALEHDKAYDRQLDSGDNPYLKYNHADAEFQERLKEDTSFGGNLGRAVFQAKKRVLEPLGLVEEPVKTAPGKKRPVEHSPVEPDSSSGTGKAGQQPARKRLNFGQTGDADSVPDPQPLGQPPAAPSGLGTNTMATGSGAPMADNNEGADGVGNSSGNWHCDSTWMGDRVITTSTRTWALPTYNNHLYKQISSQSGASNDNHYFGYSTPWGYFDFNRFHCHFSPRDWQRLINNNWGFRPKRLSFKLFNIQVKEVTQNDGTTTIANNLTSTVQVFTDSEYQLPYVLGSAHQGCLPPFPADVFMVPQYGYLTLNNGSQAVGRSSFYCLEYFPSQMLRTGNNFTFSYTFEDVPFHSSYAHSQSLDRLMNPLIDQYLYYLSKTNAPSGTTTMSRLQFSQAGASDIRDQSRNWLPGPCYRQQRVSKTAADNNNSDYSWTGATKYHLNGRDSLVNPGPAMVSHKDDEEKYFPQSGVLIFGKQGSNKTNVDIEKVMITDEEEIRTTNPVATEQYGSVSTNLQSGNTQAATSDVNTQGVLPGMVWQDRDVYLQGPIWAKIPHTDGHFHPSPLMGGFGLKHPPPQILIKNTPVPANPSTTFSAAKFASFITQYSTGQVSVEIEWELQKENSKRWNPEIQYTSNYNKSVNVDFTVDTNGVYSEPRPIGTRYLTRNL

SEQ ID NO: 2696 - protein, 735 aa, Artificial Sequence
  Description of Artificial Sequence: Synthetic polypeptide
MAADGYLPDWLEDTLSEGIRQWWKLKPGPPPPKPAERHKDDSRGLVLPGYKYLGPFNGLDKGEPVNEADAAALEHDKAYDRQLDSGDNPYLKYNHADAEFQERLKEDTSFGGNLGRAVFQAKKRVLEPLGLVEEPVKTAPGKKRPVEHSPVEPDSSSGTGKAGQQPARKRLNFGQTGDADSVPDPQPLGQPPAAPSGLGTNTMATGSGAPMADNNEGADGVGNSSGNWHCDSTWMGDRVITTSTRTWALPTYNNHLYKQISSQSGASNDNHYFGYSTPWGYFDFNRFHCHFSPRDWQRLINNNWGFRPKRLSFKLFNIQVKEVTQNDGTTTIANNLTSTVQVFTDSEYQLPYVLGSAHQGCLPPFPADVFMVPQYGYLTLNNGSQAVGRSSFYCLEYFPSQMLRTGNNFTFSYTFEDVPFHSSYAHSQSLDRLMNPLIDQYLYYLSKTNAPSGTTTMSRLQFSQAGASDIRDQSRNWLPGPCYRQQRVSKTAADNNNSDYSWTGATKYHLNGRDSLVNPGPAMASHKDDEEKYFPQSGVLIFGKQGSNKTNVDIEKVMITDEEEIRTTNPVATEQYGSVSTNLQSGNTQAATSDVNTQGVLPGMVWQDRDVYLQGPIWAKIPHTDGHFHPSPLMGGFGLKHPPPQILIKNTPVPANPSTTFSAAKFASFITQYSMGQVSVEIEWELQKENSKRWNPEIQYTSNYNKSVNVDFTVDTNGVYSEPRPIGTRYLTRNL

SEQ ID NO: 2697 - protein, 735 aa, Artificial Sequence
  Description of Artificial Sequence: Synthetic polypeptide
MAADGYLPDWLEDTLSEGIRQWWKLKPGPPPPKPAERHKDDSRGLVLPGYKYLGPFNGLDKGEPVNEADAAALEHDKVYDRQLDSGDNPYLKYNHADAEFQERLKEDTSFGGNLGRAVFQAKKRVLEPLGLVEEPVKTAPGKKRPVEHSPVEPDSSSGTGKAGQQPARKRLNFGQTGDADSVPDPQPLGQPPAAPSGLGTNTMATGSGAPMADNNEGADGVGNSSGNWHCDSTWMGDRVITTSTRTWALPTYNNHLYKQISSQSGASNDNHYFGYSTPWGYFDFNRFHCHFSPRDWQRLINNNWGFRPKRLSFKLFNIQVKEVTQNDGTTTIANNLTSTVQVFTDSEYQLPYVLGSAHQGCLPPFPADVFMVPQYGYLTLNNGSQAVGRSSFYCLEYFPSQMLRTGNNFTFSYTFEDVPFHSSYAHSQSLDRLMNPLIDQYLYYLSKTNAPSGTTTMSRLQFSQAGASDIRDQSRNWLPGPCYRQQRVSKTAADNNNSDYSWTGATKYHLNGRDSLVNPGPAMASHKDDEEKYFPQSGVLIFGKQGSNKTNVDIEKVMITDEEEIRTTNPVATEQYGSVSTNLQSGNTQAATSDVNTQGVLPGMVWQDRDVYLQGPIWAKIPHTDGHFHPSPLMGGFGLKHPPPQILIKNTPVPANPSTTFSAAKFASFITQYSTGQVSVEIEWELQKENSKRWNPEIQYTSNYNKSVNVDFTVDTNGVYSEPRPIGTRYLTRNL

SEQ ID NO: 2698 - protein, 735 aa, Artificial Sequence
  Description of Artificial Sequence: Synthetic polypeptide
MAADGYLPDWLEDTLSEGIRQWWKLKPGPPPPKPAERHKDDSRGLVLPGYKYLGPFNGLDKGEPVNEADAAALEHDKAYDRQLDSGDNPYLKYNHADAEFQERLKEDTSFGGNLGRAVFQAKKRVLEPLGLVEEPVKTAPGKKRPVEHSPVEPDSSSGTGKAGQQPARKRLNFGQTGDADSVPDPQPLGQPPAAPSGLGTNTMATGSGAPMADNNEGADGVGNSSGNWHCDSTWMGDRVITTSTRTWALPTYNNHLYKQISSQSGASNDNHYFGYSTPWGYFDFNRFHCHFSPRDWQRLINNNWGFRPKRLSFKLFNIQVKEVTQNDGTTTIANNLTSTVQVFTDSEYQLPYVLGSAHQGCLPPFPADVFMVPQYGYLTLNNGSQAVGRSSFYCLEYFPSQMLRTGNNFTFSYTFEDVPFHSSYAHSQSLDRLMNPLIDQYLYYLSKTNAPSGTTTMSRLQFSQAGASDIRDQSRNWLPGPCYRQQRVSKTAADNNNSDYSWTGATKYHLNGRDSLVNPGPAMASHKDDEEKYFPQSGVLIFGKQGSNKTNVDIEKVMITDEEEIRTTNPVATEQYGSVSTNLQSGNTQAATSDVNTQGVLPGMVWQDRDVYLQGPIWAKIPHTDGHFHPSPLMGGFGLKHPPPQILIKNTPVPANPSTTFSAAKFASFITQYSTGQVSVEIEWELQKENNKRWNPEIQYTSNYNKSVNVDFTVDTNGVYSEPRPIGTRYLTRNL

SEQ ID NO: 2699 - protein, 735 aa, Artificial Sequence
  Description of Artificial Sequence: Synthetic polypeptide
MAADGYLPDWLEDTLSEGIRQWWKLKPGPPPPKPAERHKDDSRGLVLPGYKYLGPFNGLDKGEPVNEADAAALEHDKAYDRQLDSGDNPYLKYNHADAEFQERLKEDTSFGGNLGRAVFQAKKRVLEPLGLVEEPVKTAPGKKRPVEHSPVEPDSSSGTGKAGQQPTRKRLNFGQTGDADSVPDPQPLGQPPAAPSGLGTNTMATGSGAPMADNNEGADGVGNSSGNWHCDSTWMGDRVITTSTRTWALPTYNNHLYKQISSQSGASNDNHYFGYSTPWGYFDFNRFHCHFSPRDWQRLINNNWGFRPKRLSFKLFNIQVKEVTQNDGTTTIANNLTSTVQVFTDSEYQLPYVLGSAHQGCLPPFPADVFMVPQYGYLTLNNGSQAVGRSSFYCLEYFPSQMLRTGNNFTFSYTFEDVPFHSSYAHSQSLDRLMNPLIDQYLYYLSKTNAPSGTTTMSRLQFSQAGASDIRDQSRNWLPGPCYRQQRVSKTAADNNNSDYSWTGATKYHLNGRDSLVNPGPAMASHKDDEEKYFPQSGVLIFGKQGSNKTNVDIEKVMITDEEEIRTTNPVATEQYGSVSTNLQSGNTQAATSDVNTQGVLPGMVWQDRDVYLQGPIWAKIPHTDGHFHPSPLMGGFGLKHPPPQILIKNTPVPANPSTTFSAAKFASFITQYSTGQVSVEIEWELQKENSKRWNPEIQYTSNYNKSVNVDFTVDTNGVYSEPRPIGTRYLTRNL

SEQ ID NO: 2700 - protein, 735 aa, Artificial Sequence
  Description of Artificial Sequence: Synthetic polypeptide
MAADGYLPDWLEDTLSEGIRQWWKLKPGPPPPKPAERHKDDSRGLVLPGYKYLGPFNGLDKGEPVNEADAAALEHDKAYDRQLDSGDNPYLKYNHADAEFQERLKEDTSFGGNLGRAVFQAKKRVLEPLGLVEEPVKTAPGKKRPVEHSPVEPDSSSGTGKAGQQPARKRLNFGQTGDADSVPDPQPLGQPPAAPSGLGTNTMATGSGAPMADNNEGADGVGNSSGNWHCDSTWMGDRVITTSTRTWALPTYNNHLYKQISSQSGASNDNHYFGYSTPWGYFDFNRFHCHFSPRDWQRLINNNWGFRPKRLSFKLFNIQVKEVTQNDGTTTIANNLTSTVQVFTDSEYQLPYVLGSAHQGCLPPFPADVFMVPQYGYLTLNNGSQAVGRSSFYCLEYFPSQMLRTGNNFTFSYTFEDVPFHSSYAHSQSLDRLMNPLIDQYLYYLSKTNAPSGTTTMSRLQFSQAGASDIRDQSRNWLPGPCYRQQRVSKTAADNNNSDYSWTGATKYHLNGRDSLVNPGPAMASHKDDEEKYFPQSGVLIFGKQGSNKTNVDIERVMITDEEEIRTTNPVATEQYGSVSTNLQSGNTQAATSDVNTQGVLPGMVWQDRDVYLQGPIWAKIPHTDGHFHPSPLMGGFGLKHPPPQILIKNTPVPANPSTTFSAAKFASFITQYSTGQVSVEIEWELQKENSKRWNPEIQYTSNYNKSVNVDFTVDTNGVYSEPRPIGTRYLTRNL

SEQ ID NO: 2701 - protein, 735 aa, Artificial Sequence
  Description of Artificial Sequence: Synthetic polypeptide
MAADGYLPDWLEDTLSEGIRQWWKLKPGPPPPKPAERHKDDSRGLVLPGYKYLGPFNGLDKGEPVNEADAAALEHDKAYDRQLDSGDNPYLKYNHADAEFQERLKEDTSFGGNLGRAVFQAKKRVLEPLGLVEEPVKTAPGKKRPVEHSPVEPDSSSGTGKAGQQPVRKRLNFGQTGDADSVPDPQPLGQPPAAPSGLGTNTMATGSGAPMADNNEGADGVGNSSGNWHCDSTWMGDRVITTSTRTWALPTYNNHLYKQISSQSGASNDNHYFGYSTPWGYFDFNRFHCHFSPRDWQRLINNNWGFRPKRLSFKLFNIQVKEVTQNDGTTTIANNLTSTVQVFTDSEYQLPYVLGSAHQGCLPPFPADVFMVPQYGYLTLNNGSQAVGRSSFYCLEYFPSQMLRTGNNFTFSYTFEDVPFHSSYAHSQSLDRLMNPLIDQYLYYLSKTNAPSGTTTMSRLQFSQAGASDIRDQSRNWLPGPCYRQQRVSKTAADNNNSDYSWTGATKYHLNGRDSLVNPGPAMASHKDDEEKYFPQSGVLIFGKQGSNKTNVDIEKVMITDEEEIRTTNPVATEQYGSVSTNLQSGNTQAATSDVNTQGVLPGMVWQDRDVYLQGPIWAKIPHTDGHFHPSPLMGGFGLKHPPPQILIKNTPVPANPSTTFSAAKFASFITQYSTGQVSVEIEWELQKENSKRWNPEIQYTSNYNKSVNVDFTVDTNGVYSEPRPIGTRYLTRNL

SEQ ID NO: 2702 - protein, 735 aa, Artificial Sequence
  Description of Artificial Sequence: Synthetic polypeptide
MAADGYLPDWLEDTLSEGIRQWWKLKPGPPPPKPAERHKDDSRGLVLPGYKYLGPFNGLDKGEPVNEADAAALEHDKAYDRQLDSGDNPYLKYNHADAEFQERLKEDTSFGGNLGRAVFQAKKRVLEPLGLVEEPVKTAPGKKRPVEHSPVEPDSSSGTGKAGQQPARKRLNFGQTGDADSVPDPQPLGQPPAAPSGLGTNTMATGSGAPMADNNEGADGVGNSSGNWHCDSTWMGDRVITTSTRTWALPTYNNHLYKQISSQSGASNDNHYFGYSTPWGYFDFNRFHCHFSPRDWQRLINNNWGFRPKRLSFKLFNIQVKEVTQNDGTTTIANNLTSTVQVFTDSEYQLPYVLGSAHQGCLPPFPADVFMVPQYGYPTLNNGSQAVGRSSFYCLEYFPSQMLRTGNNFTFSYTFEDVPFHSSYAHSQSLDRLMNPLIDQYLYYLSKTNAPSGTTTMSRLQFSQAGASDIRDQSRNWLPGPCYRQQRVSKTAADNNNSDYSWTGATKYHLNGRDSLVNPGPAMASHKDDEEKYFPQSGVLIFGKQGSNKTNVDIEKVMITDEEEIRTTNPVATEQYGSVSTNLQSGNTQAATSDVNTQGVLPGMVWQDRDVYLQGPIWAKIPHTDGHFHPSPLMGGFGLKHPPPQILIKNTPVPANPSTTFSAAKFASFITQYSTGQVSVEIEWELQKENSKRWNPEIQYTSNYNKSVNVDFTVDTNGVYSEPRPIGTRYLTRNL

SEQ ID NO: 2703 - protein, 735 aa, Artificial Sequence
  Description of Artificial Sequence: Synthetic polypeptide
MAADGYLPDWLEDTLSEGIRQWWKLKPGPPPPKPAERHKDDSRGLVLPGYKYLGPFNGLDKGEPVNEADAAALEHDKAYDRQLDSGDNPYLKYNHADAEFQERLKEDTSFGGNLGRAVFQAKKRVLEPLGLVEEPVKTAPGKKRPVEHSPVEPDSSSGTGKAGQQPARKRLNFGQTGDADSVPDPQSLGQPPAAPSGLGTNTMATGSGAPMADNNEGADGVGNSSGNWHCDSTWMGDRVITTSTRTWALPTYNNHLYKQISSQSGASNDNHYFGYSTPWGYFDFNRFHCHFSPRDWQRLINNNWGFRPKRLSFKLFNIQVKEVTQNDGTTTIANNLTSTVQVFTDSEYQLPYVLGSAHQGCLPPFPADVFMVPQYGYLTLNNGSQAVGRSSFYCLEYFPSQMLRTGNNFTFSYTFEDVPFHSSYAHSQSLDRLMNPLIDQYLYYLSKTNAPSGTTTMSRLQFSQAGASDIRDQSRNWLPGPCYRQQRVSKTAADNNNSDYSWTGATKYHLNGRDSLVNPGPAMASHKDDEEKYFPQSGVLIFGKQGSNKTNVDIEKVMITDEEEIRTTNPVATEQYGSVSTNLQSGNTQAATSDVNTQGVLPGMVWQDRDVYLQGPIWAKIPHTDGHFHPSPLMGGFGLKHPPPQILIKNTPVPANPSTTFSAAKFASFITQYSTGQVSVEIEWELQKENSKRWNPEIQYTSNYNKSVNVDFTVDTNGVYSEPRPIGTRYLTRNL

SEQ ID NO: 2704 - protein, 735 aa, Artificial Sequence
  Description of Artificial Sequence: Synthetic polypeptide
MAADGYLPDWLEDTLSEGIRQWWKLKPGPPPPKPAERHKDDSRGLVLPGYKYLGPFNGLDKGEPVNEADAAALEHDKAYDRQLDSGDNPYLKYNHADAEFQERLKEDTSFGGNLGRAVFQAKKRVLEPLGLVEEPVKTAPGKKRPVEHSPVEPDSSSGTGKAGQQPARKRLNFGQTGDADSVPDPQPLGQPPAAPSGLGTNTMATGSGAPMADNNEGADGVGNSSGNWHCDSTWMGDRVITTSTRTWALPTYNNHLYKQISSQSGASNDNHYFGYSTPWGYFDFNRFHCHFSPRDWQRLINNNWGFRPKRLSFKLFNIQVKEVTQNGGTTTIANNLTSTVQVFTDSEYQLPYVLGSAHQGCLPPFPADVFMVPQYGYLTLNNGSQAVGRSSFYCLEYFPSQMLRTGNNFTFSYTFEDVPFHSSYAHSQSLDRLMNPLIDQYLYYLSKTNAPSGTTTMSRLQFSQAGASDIRDQSRNWLPGPCYRQQRVSKTAADNNNSDYSWTGATKYHLNGRDSLVNPGPAMASHKDDEEKYFPQSGVLIFGKQGSNKTNVDIEKVMITDEEEIRTTNPVATEQYGSVSTNLQSGNTQAATSDVNTQGVLPGMVWQDRDVYLQGPIWAKIPHTDGHFHPSPLMGGFGLKHPPPQILIKNTPVPANPSTTFSAAKFASFITQYSTGQVSVEIEWELQKENSKRWNPEIQYTSNYNKSVNVDFTVDTNGVYSEPRPIGTRYLTRNL

SEQ ID NO: 2705 - protein, 735 aa, Artificial Sequence
  Description of Artificial Sequence: Synthetic polypeptide
MAADGYLPDWLEDTLSEGIRQWWKLKPGPPPPKPAERHKDDSRGLVLPGYKYLGPFNGLDKGEPVNEADAAALEHDKAYDRQLDSGDNPYLKYNHADAEFQERLKEDTSFGGNLGRAVFQAKKRVLEPLGLVEEPVKTAPGKKRPVEHSPVEPDSSSGTGKAGQQPARKRLNFGQTGDADSVPDPQPLGQPPAAPSGLGTNTMATGSGAPMADNNEGADGVGNSSGNWHCDSTWMGDRVITTSTRTWALPTYNNHLYKQISSQSGASNDNHYFGYSTPWGYFDFNRFHCHFSPRDWQRLINNNWGFRPKRLSFKLFNIQVKEVTQNDGTTTIANNLTSTVQVFTDSEYQLPYVLGSAHQGCLPPFPADVFMVPQYGYLTLNNGSQAVGRSSFYCLEYFPSQMLRTGNNFTFSYTFEDVPFHSSYAHSQSLDRLMNPLIDQYLYYLSKTNAPSGTTTMSGLQFSQAGASDIRDQSRNWLPGPCYRQQRVSKTAADNNNSDYSWTGATKYHLNGRDSLVNPGPAMASHKDDEEKYFPQSGVLIFGKQGSNKTNVDIEKVMITDEEEIRTTNPVATEQYGSVSTNLQSGNTQAATSDVNTQGVLPGMVWQDRDVYLQGPIWAKIPHTDGHFHPSPLMGGFGLKHPPPQILIKNTPVPVNPSTTFSAAKFASFITQYSTGQVSVEIEWELQKENSKRWNPEIQYTSNYNKSVNVDFTVDTNGVYSEPRPIGTRYLTRNL

SEQ ID NO: 2706 - protein, 735 aa, Artificial Sequence
  Description of Artificial Sequence: Synthetic polypeptide
MAADGYLPDWLEDTLSEGIRQWWKLKPGPPPPKPAERHKDDSRGLVLPGYKYLGPFNGLDKGEPVNEADAAALEHDKAYDRQLDSGDNPYLKYNHADAEFQERLKEDTSFGGNLGRAVFQAKKRVLEPLGLVEEPVKTAPGKKRPVEHSPVEPDSSSGTGKAGQQPARKRLNFGQTGDADSVPDPQPLGQPPAAPSGLGTNTMATGSGAPMADNNEGADGVGNSSGNWHCDSTWMGDRVITTSTRTWALPTYNNHLYKQISSQSGASNDNHYFGYSTPWGYFDFNRFHCHFSPRDWQRLINNNWGFRPKRLSFKLFNIQVKEVTQNDGTTTIANNLTSTVQVFTDSEYQLPYVLGSAHQGCLPPFPADVFMVPQYGYLTLNNGSQAVGRSSFYCLEYFPSQMLRTGNNFTFSYTFEDVPFHSSYAHSQSLDRLMNPLIDQYLYYLSKTNAPSGTTTMSRLQFSQAGASDIRDQSRNWLPGPCYRQQRVSKTAADNNNSDYSWTGATKYHLNGRDSLVNPGPTMASHKDDEEKYFPQSGVLIFGKQGSNKTNVDIEKVMITDEEEIRTTNPVATEQYGSVSTNLQSGNTQAATSDVNTQGVLPGMVWQDRDVYLQGPIWAKIPHTDGHFHPSPLMGGFGLKHPPPQILIKNTPVPANPSTTFSAAKFASFITQYSTGQVSVEIEWELQKENSKRWNPEIQYTSNYNKSVNVDFTVDTNGVYSEPRPIGTRYLTRNL

SEQ ID NO: 2707 - protein, 735 aa, Artificial Sequence
  Description of Artificial Sequence: Synthetic polypeptide
MAADGYLPDWLEDTLSEGIRQWWKLKPGPPPPKPAERHKDDSRGLVLPGYKYLGPLNGLDKGEPVNEADAAALEHDKAYDRQLDSGDNPYLKYNHADAEFQERLKEDTSFGGNLGRAVFQAKKRVLEPLGLVEEPVKTAPGKKRPVEHSPVEPDSSSGTGKAGQQPARKRLNFGQTGDADSVPDPQPLGQPPAAPSGLGTNTMATGSGAPMADNNEGADGVGNSSGNWHCDSTWMGDRVITTSTRTWALPTYNNHLYKQISSQSGASNDNHYFGYSTPWGYFDFNRFHCHFSPRDWQRLINNNWGFRPKRLSFKLFNIQVKEVTQNDGTTTIANNLTSTVQVFTDSEYQLPYVLGSAHQGCLPPFPADVFMVPQYGYLTLNNGSQAVGRSSFYCLEYFPSQMLRTGNNFTFSYTFEDVPFHSSYAHSQSLDRLMNPLIDQYLYYLSKTNAPSGTTTMSRLQFSQAGASDIRDQSRNWLPGPCYRQQRVSKTAADNNNSDYSWTGATKYHLNGRDSLVNPGPAMASHKDDEEKYFPQSGVLIFGKQGSNKTNVDIEKVMITDEEEIRTTNPVATEQYGSVSTNLQSGNTQAATSDVNTQGVLPGMVWQDRDVYLQGPIWAKIPHTDGHFHPSPLMGGFGLKHPPPQILIKNTPVPANPSTTFSAAKFASFITQYSTGQVSVEIEWELQKENSKRWNPEIQYTSNYNKSVNVDFTVDTNGVYSEPRPIGTRYLTRNL

SEQ ID NO: 2708 - protein, 735 aa, Artificial Sequence
  Description of Artificial Sequence: Synthetic polypeptide
MAADGYLPDWLEDTLSEGIRQWWKLKPGPPPPKPAERHKDDSRGLVLPGYKYLGPFNGLDKGEPVNEADAAALEHDKAYDRQLDSGDNPYLKYNHADAEFQERLKEDTSFGGNLGRAVFQAKKRVLEPLGLVEEPVKTAPGKKRPVEHSPVEPDSSSGTGKAGQQPARKRLNFGQTGDADSVPDPQPLGQPPAAPSGLGTNTMATGSGAPMADNNEGADGVGNSSGNWHCDSTWMGDRVITTSTRTWALPTYNNHLYKQISSQSGASNDNHYFGYSTPWGYFDFNRFHCHFSPRDWQRLINNNWGFRPKRLSFKLFNIQVKEVTQNDGTTTIANNLTSTVQVFTDSEYQLPYVLGSAHQGCLPPFPADVFMVPQYGYLTLNNGSQAVGRSSFYCLEYFPSQMLRTGNNFTFSYTFEDVPFHSSYAHSQSLDRLMNPLIDQYLYYLSKTNAPSGTTTMSRLQFSQAGASDIRDQSRNWLPGPCYRQQRVSKTAADNNNSDYSWTGATKYHLNGRDSLVNPGPAMTSHKDDEEKYFPQSGVLIFGKQGSNKTNVDIEKVMITDEEEIRTTNPVATEQYGSVSTNLQSGNTQAATSDVNTQGVLPGMVWQDRDVYLQGPIWAKIPHTDGHFHPSPLMGGFGLKHPPPQILIKNTPVPANPSTTFSAAKFASFITQYSTGQVSVEIEWELQKENSKRWNPEIQYTSNYNKSVNVDFTVDTNGVYSEPRPIGTRYLTRNL

SEQ ID NO: 2709 - protein, 735 aa, Artificial Sequence
  Description of Artificial Sequence: Synthetic polypeptide
MAADGYLPDWLEDTLSEGIRQWWKLKPGPPPPKPAERHKDDSRGLVLPGYKYLGPFNGLDKGEPVNEADAAALEHDKAYDRQLDSGDNPYLKYNHADAEFQERLKEDTSFGGNLGRAVFQAKKRVLEPLGLVEEPVKTAPGKKRPVEHSPVEPDSSSGTGKAGQQPARKRLNFGQTGDADSVPDPQPLGQPPAAPSGLGTNTMATGSGAPMADNNEGADGVGNSSGNWHCDSTWMGDRVITTSTRTWALPTYNNHLYKQISSQSGASNDNHYFGYSTPWGYFDFNRFHCHFSPRDWQRLINNNWGFRPKRLSFKLFNIQVKEVTQNDGTTTIANNLTSTVQVFTDSEYQLPYVLGSAHQGCLPPFPADVFMVPQYGYLTLNNGSQAVGRSSFYCLEYFPSQMLRTGNNFTFSYTFEDVPFHSSYAHSQSLDRLMNPLIDQYLYYLSKTNAPSGTTTMSRLQFSQAGASDIRDQSRNWLPGPCYRQQRVSKTAADNNNSDYSWTGATKYHLNGRDSLVNPGPAMASHKDDEEKYFPQSGVLIFGKQGSNKTNVDIEKVMITDEEEIRTTNPVATEQYGSVSTNLQSGNTQAATSDVNTQGVLPGMVWQDRDVYLQGPIWTKIPHTDGHFHPSPLMGGFGLKHPPPQILIKNTPVPANPSTTFSAAKFASFITQYSTGQVSVEIEWELQKENSKRWNPEIQYTSNYNKSVNVDFTVDTNGVYSEPRPIGTRYLTRNL

SEQ ID NO: 2710 - protein, 735 aa, Artificial Sequence
  Description of Artificial Sequence: Synthetic polypeptide
MAADGYLPDWLEDTLSEGIRQWWKLKPGPPPPKPAERHKDDSRGLVLPGYKYLGPFNGLDKGEPVNEADAAALEHDKAYDRQLDSGDNPYLKYNHADAEFQERLKEDTSFGGNLGRAVFQAKKRVLEPLGLVEEPVKTAPGKKRPVEHSPVEPDSSSGTGKAGQQPARKRLNFGQTGDADSVPDPQPLGQPPVAPSGLGTNTMATGSGAPMADNNEGADGVGNSSGNWHCDSTWMGDRVITTSTRTWALPTYNNHLYKQISSQSGASNDNHYFGYSTPWGYFDFNRFHCHFSPRDWQRLINNNWGFRPKRLSFKLFNIQVKEVTQNDGTTTIANNLTSTVQVFTDSEYQLPYVLGSAHQGCLPPFPADVFMVPQYGYLTLNNGSQAVGRSSFYCLEYFPSQMLRTGNNFTFSYTFEDVPFHSSYAHSQSLDRLMNPLIDQYLYYLSKTNAPSGTTTMSRLQFSQAGASDIRDQSRNWLPGPCYRQQRVSKTAADNNNSDYSWTGATKYHLNGRDSLVNPGPAMASHKDDEEKYFPQSGVLIFGKQGSNKTNVDIEKVMITDEEEIRTTNPVATEQYGSVSTNLQSGNTQAATSDVNTQGVLPGMVWQDRDVYLQGPIWAKIPHTDGHFHPSPLMGGFGLKHPPPQILIKNTPVPANPSTTFSAAKFASFITQYSTGQVSVEIEWELQKENSKRWNPEIQYTSNYNKSVNVDFTVDTNGVYSEPRPIGTRYLTRNL

SEQ ID NO: 2711 - protein, 735 aa, Artificial Sequence
  Description of Artificial Sequence: Synthetic polypeptide
MAADGYLPDWLEDTLSEGIRQWWKLKPGPPPPKPAERHKDDSRGLVLPGYKYLGPFNGLDKGEPVNEADAAALEHDKAYDRQLDSGDNPYLKYNHADAEFQERLKEDTSFGGNLGRAVFQAKKRVLEPLGLVEEPVKTAPGKKRPVEHSPVEPDSSSGTGKAGQQPARKRLNFGQTGDADSVPDPQPLGQPPAAPSGLGTNTMATGSGAPMADNNEGADGVGNSSGNWHCDSTWMGDRVITTSTRTWALPTYNNHLYKQISSQSGASNDNHYFGYSTPWGYFDFNRFHCHFSPRDWQRLINNNWGFRPKRLSFKLFNIQVKEVTQNDGTTTIANNLTSTVQVFTDSEYQLPYVLGSAHQGCLPPFPADVFMVPQYGYLTLNNGSQAVGRSSFYCLEYFPSQMLRTGNNFTFSYTFEDVPFHSSYAHSQSLDRLMNPLIDQYLYYLSKTNAPSGTTTMSRLQFSQAGASDIRDQSRNWLPGPCYRQQRVSKTAADNNNSDYSWTGATKYHLNGRDSLVNPGPAMASHKDDEEKYFPQSGVLIFGKQGSNKTNVDIEKVMITDEEEIRTTNPVATEQYGSVSTNLQSGNTQAATSDVNTQGVLPGMVWQDRDVYLQGPIWAKIPHTDGHFHPSPLMGGFGLKHPPPQILIKNTPVPANPSTTFSAAKFASFITQYSTGQVSVEIEWEPQKENSKRWNPEIQYTSNYNKSVNVDFTVDTNGVYSEPRPIGTRYLTRNL

SEQ ID NO: 2712 - protein, 735 aa, Artificial Sequence
  Description of Artificial Sequence: Synthetic polypeptide
MAADGYLPDWLEDTLSEGIRQWWKLKPGPPPPKPAERHKDDSRGLVLPGYKYLGPFNGLDKGEPVNEADAAALEHDKAYDRQLDSGDNPYLKYNHADAEFQERLKEDTSFGGNLGRAVFQAKKRVLEPLGLVEEPVKTAPGKKRPVEHSPVEPDSSSGTGKAGQQPARKRLNFGQTGDADSVPDPQPLGQPPAAPSGLGTNTMATGSGAPMADNNEGADGVGNSSGNWHCDSTWMGDRVITTSTRTWALPTYNNHLYKQISSQSGASNDNHYFGYSTPWGYFDFNRFHCHFSPRDWQRLINNNWGFRPKRLSFKLFNIQVKEVTQNDGTTTIANNLTSTVQVFTDSEYQLPYVLGSAHQGCLPPFPADVFMVPQYGYLTLNNGSQAVGRSSFYCLEYFPSQMLRTGNNFTFSYTFEDVPFHSSYAHSQSLDRLMNPLIDQYLYYLSKTNAPSGTTTMSRLQFSQAGASDIRDQSRNWLPGPCYRQQRVSKTVADNNNSDYSWTGATKYHLNGRDSLVNPGPAMASHKDDEEKYFPQSGVLIFGKQGSNKTNVDIEKVMITDEEEIRTTNPVATEQYGSVSTNLQSGNTQAATSDVNTQGVLPGMVWQDRDVYLQGPIWAKIPHTDGHFHPSPLMGGFGLKHPPPQILIKNTPVPANPSTTFSAAKFASFITQYSTGQVSVEIEWELQKENSKRWNPEIQYTSNYNKSVNVDFTVDTNGVYSEPRPIGTRYLTRNL

SEQ ID NO: 2713 - protein, 735 aa, Artificial Sequence
  Description of Artificial Sequence: Synthetic polypeptide
MAADGYLPDWLEDTLSEGIRQWWKLKPGPPPPKPAERHKDDSRGLVLPGYKYLGPFNGLDKGEPVNEADAAALEHDKAYDRQLDSGDNPYLKYNHADAEFQERLKEDTSFGGNLGRAVFQAKKRVLEPLGLVEEPVKTAPGKKRPVEHSPVEPDSSSGTGKAGQQPARKRLNFGQTGDADSVPDPQPLGQPPAAPSGLGTNTMATGSGAPMADNNEGADGVGNSSGNWHCDSTWMGDRVITTSTRTWALPTYNNHLYKQISSQSGASNDNHYFGYSTPWGYFDFNRFHCHFSPRDWQRLINNNWGFRPKRLSFKLFNIQVKEVTQNDGTTTIANNLTSTVQVFTDSEYQLPYVLGSAHQGCLPPFPADVFMVPQYGYLTLNNGSQAVGRSSFYCLEYFPSQMLRTGNNFTFSYTFEDVPFHSSYAHSQSLDRLMNPLIDQYPYYLSKTNAPSGTTTMSRLQFSQAGASDIRDQSRNWLPGPCYRQQRVSKTAADNNNSDYSWTGATKYHLNGRDSLVNPGPAMASHKDDEEKYFPQSGVLIFGKQGSNKTNVDIEKVMITDEEEIRTTNPVATEQYGSVSTNLQSGNTQAATSDVNTQGVLPGMVWQDRDVYLQGPIWAKIPHTDGHFHPSPLMGGFGLKHPPPQILIKNTPVPANPSTTFSAAKFASFITQYSTGQVSVEIEWELQKENSKRWNPEIQYTSNYNKSVNVDFTVDTNGVYSEPRPIGTRYLTRNL

SEQ ID NO: 2714 - protein, 735 aa, Artificial Sequence
  Description of Artificial Sequence: Synthetic polypeptide
MAADGYLPDWLEDTLSEGIRQWWKLKPGPPPPKPAERHKDDSRGLVLPGYKYLGPFNGLDKGEPVNEADAAALEHDKAYDRQLDSGDNPYLKYNHTDAEFQERLKEDTSFGGNLGRAVFQAKKRVLEPLGLVEEPVKTAPGKKRPVEHSPVEPDSSSGTGKAGQQPARKRLNFGQTGDADSVPDPQPLGQPPAAPSGLGTNTMATGSGAPMADNNEGADGVGNSSGNWHCDSTWMGDRVITTSTRTWALPTYNNHLYKQISSQSGASNDNHYFGYSTPWGYFDFNRFHCHFSPRDWQRLINNNWGFRPKRLSFKLFNIQVKEVTQNDGTTTIANNLTSTVQVFTDSEYQLPYVLGSAHQGCLPPFPADVFMVPQYGYLTLNNGSQAVGRSSFYCLEYFPSQMLRTGNNFTFSYTFEDVPFHSSYAHSQSLDRLMNPLIDQYLYYLSKTNAPSGTTTMSRLQFSQAGASDIRDQSRNWLPGPCYRQQRVSKTAADNNNSDYSWTGATKYHLNGRDSLVNPGPAMASHKDDEEKYFPQSGVLIFGKQGSNKTNVDIEKVMITDEEEIRTTNPVATEQYGSVSTNLQSGNTQAATSDVNTQGVLPGMVWQDRDVYLQGPIWAKIPHTDGHFHPSPLMGGFGLKHPPPQILIKNTPVPANPSTTFSAAKFASFITQYSTGQVSVEIEWELQKENSKRWNPEIQYTSNYNKSVNVDFTVDTNGVYSEPRPIGTRYLTRNL

SEQ ID NO: 2715 - protein, 735 aa, Artificial Sequence
  Description of Artificial Sequence: Synthetic polypeptide
MAADGYLPDWLEDTLSEGIRQWWKLKPGPPPPKPAERHKDDSRGLVLPGYKYLGPFNGLDKGGPVNEADAAALEHDKAYDRQLDSGDNPYLKYNHADAEFQERLKEDTSFGGNLGRAVFQAKKRVLEPLGLVEEPVKTAPGKKRPVEHSPVEPDSSSGTGKAGQQPARKRLNFGQTGDADSVPDPQPLGQPPAAPSGLGTNTMATGSGAPMADNNEGADGVGNSSGNWHCDSTWMGDRVITTSTRTWALPTYNNHLYKQISSQSGASNDNHYFGYSTPWGYFDFNRFHCHFSPRDWQRLINNNWGFRPKRLSFKLFNIQVKEVTQNDGTTTIANNLTSTVQVFTDSEYQLPYVLGSAHQGCLPPFPADVFMVPQYGYLTLNNGSQAVGRSSFYCLEYFPSQMLRTGNNFTFSYTFEDVPFHSSYAHSQSLDRLMNPLIDQYLYYLSKTNAPSGTTTMSRLQFSQAGASDIRDQSRNWLPGPCYRQQRVSKTAADNNNSDYSWTGATKYHLNGRDSLVNPGPAMASHKDDEEKYFPQSGVLIFGKQGSNKTNVDIEKVMITDEEEIRTTNPVATEQYGSVSTNLQSGNTQAATSDVNTQGVLPGMVWQDRDVYLQGPIWAKIPHTDGHFHPSPLMGGFGLKHPPPQILIKNTPVPANPSTTFSAAKFASFITQYSTGQVSVEIEWELQKENSKRWNPEIQYTSNYNKSVNVDFTVDTNGVYSEPRPIGTRYLTRNL

SEQ ID NO: 2716 - protein, 735 aa, Artificial Sequence
  Description of Artificial Sequence: Synthetic polypeptide
MAADGYLPDWLEDTLSEGIRQWWKLKPGPPPPKPAERHKDDSRGLVLPGYKYLGPFNGLDKGEPVNEADAAALEHDKAYDRQLDSGDNPYLKYNHADAEFQERLKEDTSFGGNLGRAVFQAKKRVLEPLGLVEEPVKTAPGKKRPVEHSPVEPDSSSGTGKAGQQPARKRLNFGQTGDADSVPDPQPLGQPPAAPSGLGTNTMATGSGAPMADNNEGADGVGNSSGNWHCDSTWMGDRVITTSTRTWTLPTYNNHLYKQISSQSGASNDNHYFGYSTPWGYFDFNRFHCHFSPRDWQRLINNNWGFRPKRLSFKLFNIQVKEVTQNDGTTTIANNLTSTVQVFTDSEYQLPYVLGSAHQGCLPPFPADVFMVPQYGYLTLNNGSQAVGRSSFYCLEYFPSQMLRTGNNFTFSYTFEDVPFHSSYAHSQSLDRLMNPLIDQYLYYLSKTNAPSGTTTMSRLQFSQAGASDIRDQSRNWLPGPCYRQQRVSKTAADNNNSDYSWTGATKYHLNGRDSLVNPGPAMASHKDDEEKYFPQSGVLIFGKQGSNKTNVDIEKVMITDEEEIRTTNPVATEQYGSVSTNLQSGNTQAATSDVNTQGVLPGMVWQDRDVYLQGPIWAKIPHTDGHFHPSPLMGGFGLKHPPPQILIKNTPVPANPSTTFSAAKFASFITQYSTGQVSVEIEWELQKENSKRWNPEIQYTSNYNKSVNVDFTVDTNGVYSEPRPIGTRYLTRNL

SEQ ID NO: 2717 - protein, 735 aa, Artificial Sequence
  Description of Artificial Sequence: Synthetic polypeptide
MAADGYLPDWLEDTLSEGIRQWWKLKPGPPPPKPAERHKDDSRGLVLPGYKYLGPFNGLDKGEPVNEADAAVLEHDKAYDRQLDSGDNPYLKYNHADAEFQERLKEDTSFGGNLGRAVFQAKKRVLEPLGLVEEPVKTAPGKKRPVEHSPVEPDSSSGTGKAGQQPARKRLNFGQTGDADSVPDPQPLGQPPAAPSGLGTNTMATGSGAPMADNNEGADGVGNSSGNWHCDSTWMGDRVITTSTRTWALPTYNNHLYKQISSQSGASNDNHYFGYSTPWGYFDFNRFHCHFSPRDWQRLINNNWGFRPKRLSFKLFNIQVKEVTQNDGTTTIANNLTSTVQVFTDSEYQLPYVLGSAHQGCLPPFPADVFMVPQYGYLTLNNGSQAVGRSSFYCLEYFPSQMLRTGNNFTFSYTFEDVPFHSSYAHSQSLDRLMNPLIDQYLYYLSKTNAPSGTTTMSRLQFSQAGASDIRDQSRNWLPGPCYRQQRVSKTAADNNNSDYSWTGATKYHLNGRDSLVNPGPAMASHKDDEEKYFPQSGVLIFGKQGSNKTNVDIEKVMITDEEEIRTTNPVATEQYGSVSTNLQSGNTQAATSDVNTQGVLPGMVWQDRDVYLQGPIWAKIPHTDGHFHPSPLMGGFGLKHPPPQILIKNTPVPANPSTTFSAAKFASFITQYSTGQVSVEIEWELQKENSKRWNPEIQYTSNYNKSVNVDFTVDTNGVYSEPRPIGTRYLTRNL

SEQ ID NO: 2718 - protein, 735 aa, Artificial Sequence
  Description of Artificial Sequence: Synthetic polypeptide
MAADGYLPDWLEDTLSEGIRQWWKLKPGPPPPKPAERHKDDSRGLVLPGYKYLGPFNGLDKGEPVNEADAAALEHDKAYDRQLDSGDNPYLKYNHADAEFQERLKEDTSFGGNLGRAVFQAKKRVLEPLGLVEEPVKTAPGKKRPVEHSPVEPDSSSGTGKAGQQPARKRLNFGQTGDADSVPDPQPLGQPPAAPSGLGTNTMATGSGAPMADNNEGADGVGNSSGNWHCDSTWMGDRVITTSTHTWALPTYNNHLYKQISSQSGASNDNHYFGYSTPWGYFDFNRFHCHFSPRDWQRLINNNWGFRPKRLSFKLFNIQVKEVTQNDGTTTIANNLTSTVQVFTDSEYQLPYVLGSAHQGCLPPFPADVFMVPQYGYLTLNNGSQAVGRSSFYCLEYFPSQMLRTGNNFTFSYTFEDVPFHSSYAHSQSLDRLMNPLIDQYLYYLSKTNAPSGTTTMSRLQFSQAGASDIRDQSRNWLPGPCYRQQRVSKTAADNNNSDYSWTGATKYHLNGRDSLVNPGPAMASHKDDEEKYFPQSGVLIFGKQGSNKTNVDIEKVMITDEEEIRTTNPVATEQYGSVSTNLQSGNTQAATSDVNTQGVLPGMVWQDRDVYLQGPIWAKIPHTDGHFHPSPLMGGFGLKHPPPQILIKNTPVPANPSTTFSAAKFASFITQYSTGQVSVEIEWELQKENSKRWNPEIQYTSNYNKSVNVDFTVDTNGVYSEPRPIGTRYLTRNL

SEQ ID NO: 2719 - protein, 735 aa, Artificial Sequence
  Description of Artificial Sequence: Synthetic polypeptide
MAADGYLPDWLEDTLSEGIRQWWKLKPGPPPPKPAERHKDDSRGLVLPGYKYLGPFNGLDKGEPVNEADAAALEHDKAYDRQLDSGDNPYLKYNHADAEFQERLKEDTSFGGNLGRAVFQAKKRVLEPLGLVEEPVKTAPGKKRPVEHSPVEPDSSSGTGKAGQQPARKRLNFGQTGDADSVPDPQPLGQPPAAPSGLGTNTMATGSGAPMADNNEGADGVGNSSGNWHCDSTWMGDRVITTSTRTWALPTYNNHLYKQISSQSGASNDNHYFGYSTPWGYFDFNRFHCHFSPRDWQRLINNNWGFRPKRLSFKLFNIQVKEVTQNDGTTTIANNLTSTVQVFTDSEYQLPYVLGSAHQGCLPPFPADVFMVPQYGYLTLNNGSQAVGRSSFYCLEYFPSQMLRTGNNFTFSYTFEDVPFHSSYAHSQSLDRLMNPLIDQYLYYLSKTNAPSGTTTMSRLQFSQAGASGIRDQSRNWLPGPCYRQQRVSKTAADNNNSDYSWTGATKYHLNGRDSLVNPGPAMASHKDDEEKYFPQSGVLIFGKQGSNKTNVDIEKVMITDEEEIRTTNPVATEQYGSVSTNLQSGNTQAATSDVNTQGVLPGMVWQDRDVYLQGPIWAKIPHTDGHFHPSPLMGGFGLKHPPPQILIKNTPVPANPSTTFSAAKFASFITQYSTGQVSVEIEWELQKENSKRWNPEIQYTSNYNKSVNVDFTVDTNGVYSEPRPIGTRYLTRNL

SEQ ID NO: 2720 - protein, 735 aa, Artificial Sequence
  Description of Artificial Sequence: Synthetic polypeptide
MAADGYLPDWLEDTLSEGIRQWWKLKPGPPPPKPAERHKDDSRGLVLPGYKYLGPFNGLDKGEPVNEADAAALEHDKAYDRQLDSGDNPYLKYNHADAEFQERLKEDTSFGGNLGRVVFQAKKRVLEPLGLVEEPVKTAPGKKRPVEHSPVEPDSSSGTGKAGQQPARKRLNFGQTGDADSVPDPQPLGQPPAAPSGLGTNTMATGSGAPMADNNEGADGVGNSSGNWHCDSTWMGDRVITTSTRTWALPTYNNHLYKQISSQSGASNDNHYFGYSTPWGYFDFNRFHCHFSPRDWQRLINNNWGFRPKRLSFKLFNIQVKEVTQNDGTTTIANNLTSTVQVFTDSEYQLPYVLGSAHQGCLPPFPADVFMVPQYGYLTLNNGSQAVGRSSFYCLEYFPSQMLRTGNNFTFSYTFEDVPFHSSYAHSQSLDRLMNPLIDQYLYYLSKTNAPSGTTTMSRLQFSQAGASDIRDQSRNWLPGPCYRQQRVSKTAADNNNSDYSWTGATKYHLNGRDSLVNPGPAMASHKDDEEKYFPQSGVLIFGKQGSNKTNVDIEKVMITDEEEIRTTNPVATEQYGSVSTNLQSGNTQAATSDVNTQGVLPGMVWQDRDVYLQGPIWAKIPHTDGHFHPSPLMGGFGLKHPPPQILIKNTPVPANPSTTFSAAKFASFITQYSTGQVSVEIEWELQKENSKRWNPEIQYTSNYNKSVNVDFTVDTNGVYSEPRPIGTRYLTRNL

SEQ ID NO: 2721 - protein, 735 aa, Artificial Sequence
  Description of Artificial Sequence: Synthetic polypeptide
MAADGYLPDWLEDTLSEGIRQWWKLKPGPPPPKPAERHKDDSRGLVLPGYKYLGPFNGLDKGEPVNEADAAALEHDKAYDRQLDSGDNPYLKYNHADAEFQERLKEDTSFGGNLGRAVFQAKKRVLEPLGLVEEPVKTAPGKKRPVEHSPVEPDSSSGTGKAGQQPARKRLNFGQTGDADSVPDPQPLGQPPAAPSGLGTNTMATGSGAPMADNNEGADGVGNSSGNWHCDSTWMGDRVITTSTRTWALPTYNNHLYKQISSQSGASNDNHYFGYSTPWGYFDFNRFHCHFSPRDWQRLINNNWGFRPKRLSFKLFNIQVKEVTQNDGTTTIANNLTSTVQVFTDSEYQLPYILGSAHQGCLPPFPADVFMVPQYGYLTLNNGSQAVGRSSFYCLEYFPSQMLRTGNNFTFSYTFEDVPFHSSYAHSQSLDRLMNPLIDQYLYYLSKTNAPSGTTTMSRLQFSQAGASDIRDQSRNWLPGPCYRQQRVSKTAADNNNSDYSWTGATKYHLNGRDSLVNPGPAMASHKDDEEKYFPQSGVLIFGKQGSNKTNVDIEKVMITDEEEIRTTNPVATEQYGSVSTNLQSGNTQAATSDVNTQGVLPGMVWQDRDVYLQGPIWAKIPHTDGHFHPSPLMGGFGLKHPPPQILIKNTPVPANPSTTFSAAKFASFITQYSTGQVSVEIEWELQKENSKRWNPEIQYTSNYNKSVNVDFTVDTNGVYSEPRPIGTRYLTRNL

SEQ ID NO: 2722 - protein, 735 aa, Artificial Sequence
  Description of Artificial Sequence: Synthetic polypeptide
MAADGYLPDWLEDTLSEGIRQWWKLKPGPPPPKPAERHKDDSRGLVLPGYKYLGPFNGLDKGEPVNEADAAALEHDKAYDRQLDSGDNPYLKYNHADAEFQERLKEDTSFGGNLGRAVFQAKKRVLEPLGLVEEPVKTAPGKKRPVEHSPVEPDSSSGTGKAGQQPARKRLNFGQTGDADSVPDPQPLGQPPAAPSGLGTNTMATGSGAPMADNNEGVDGVGNSSGNWHCDSTWMGDRVITTSTRTWALPTYNNHLYKQISSQSGASNDNHYFGYSTPWGYFDFNRFHCHFSPRDWQRLINNNWGFRPKRLSFKLFNIQVKEVTQNDGTTTIANNLTSTVQVFTDSEYQLPYVLGSAHQGCLPPFPADVFMVPQYGYLTLNNGSQAVGRSSFYCLEYFPSQMLRTGNNFTFSYTFEDVPFHSSYAHSQSLDRLMNPLIDQYLYYLSKTNAPSGTTTMSRLQFSQAGASDIRDQSRNWLPGPCYRQQRVSKTAADNNNSDYSWTGATKYHLNGRDSLVNPGPAMASHKDDEEKYFPQSGVLIFGKQGSNKTNVDIEKVMITDEEEIRTTNPVATEQYGSVSTNLQSGNTQAATSDVNTQGVLPGMVWQDRDVYLQGPIWAKIPHTDGHFHPSPLMGGFGLKHPPPQILIKNTPVPANPSTTFSAAKFASFITQYSTGQVSVEIEWELQKENSKRWNPEIQYTSNYNKSVNVDFTVDTNGVYSEPRPIGTRYLTRNL

SEQ ID NO: 2723 - protein, 735 aa, Artificial Sequence
  Description of Artificial Sequence: Synthetic polypeptide
MAADGYLPDWLEDTLSEGIRQWWKLKPGPPPPKPAERHKDDSRGLVLPGYKYLGPFNGLDKGEPVNEADAAALEHDKAYDRQLDSGDNPYLKYNHADAEFQERLKEDTSFGGNLGRAVFQAKKRVLEPLGLVEEPVKTAPGKKRPVEHSPVEPDSSSGTGKAGQQPARKRLNFGQTGDADSVPDPQPLGQPPAAPSGLGTNTMATGSGAPMADNNEGADGVGNSSGNWHCDSTWMGDRVITTSTRTWALPTYNNHLYKQISSQSGASNDNHYFGYSTPWGYFDFNRFHCHFSPRDWQRLINNNWGFRPKRLSFKLFNIQVKEVTQNDGTTTIANNLTSTVQVFTDSEYQLPYVLGSAHQGCLPPFPADVFMVPQYGYLTLNNGSQAVGRSSFYCLEYFPSQMLRTGNNFTFSYTFEDVPFHSSYAHSQSLDRLMNPLIDQYLYYLSKTNAPSGTTTMSRLQFSQAGASDIRDQSRNWLPGPCYRQQRVSKTAADNNNSDYSWTGATKYHLNGRGSLVNPGPAMASHKDDEEKYFPQSGVLIFGKQGSNKTNVDIEKVMITDEEEIRTTNPVATEQYGSVSTNLQSGNTQAATSDVNTQGVLPGMVWQDRDVYLQGPIWAKIPHTDGHFHPSPLMGGFGLKHPPPQILIKNTPVPANPSTTFSAAKFASFITQYSTGQVSVEIEWELQKENSKRWNPEIQYTSNYNKSVNVDFTVDTNGVYSEPRPIGTRYLTRNL

SEQ ID NO: 2724 - protein, 735 aa, Artificial Sequence
  Description of Artificial Sequence: Synthetic polypeptide
MAADGYLPDWLEDTLSEGIRQWWKLKPGPPPPKPAERHKDDSRGLVLPGYKYLGPFNGLDKGEPVNEADAAALEHDKAYDRQLDSGDNPYLKYNHADAEFQERLKEDTSFGGNLGRAVFQAKKRVLEPLGLVEEPVKTAPGKKRPVEHSPVEPDSSSGTGKAGQQPARKRLNFGQTGDADSVPDPQPLGQPPAAPSGLGTNTMATGSGAPMADNNEGADGVGNSSGNWHCDSTWMGDRVITTSTRTWALPTYNNHLYKQISSQSGASNDNHYFGYSTPWGYFDFNRFHCHFSPRDWQRLINNNWGFRPKRLSFKLFNIQVKEVTQNDGTTTIANNLTSTVQVFTDSEYQLPYVLGSAHQGCLPPFPADVFMVPQYGYLTLNNGSQAVGRSSFYCLEYFPSQMLRTGNNFTFSYTFEDVPFHSSYAHSQSLDRLMNPLIDQYLYYLSKTNAPSGTTTMSRLQFSQAGASDIRDQSRNWLPGPCYRQQRVSKTAADNNNSDYSWTGATKYHLNGRDSLVNPGPAMASHKDDEEKYFPQSGVLIFGKQGSNKTNVDIEKVMITDEEEIRTTNPVATEQYGSVSTNLQSGNTQAATPDVNTQGVLPGMVWQDRDVYLQGPIWAKIPHTDGHFHPSPLMGGFGLKHPPPQILIKNTPVPANPSTTFSAAKFASFITQYSTGQVSVEIEWELQKENSKRWNPEIQYTSNYNKSVNVDFTVDTNGVYSEPRPIGTRYLTRNL

SEQ ID NO: 2725 - protein, 735 aa, Artificial Sequence
  Description of Artificial Sequence: Synthetic polypeptide
MAADGYLPDWLEDTLSEGIRQWWKLKPGPPPPKPAERHKDDSRGLVLPGYKYLGPFNGLDKGEPVNEADAAALEHDKAYDRQLDSGDNPYLKYNHADAEFQERLKEDTSFGGNLGRAVFQAKKRVLEPLGLVEEPVKTAPGKKRPVEHSPVEPDSSSGTGKAGQQPARKRLNFGQTGDADSVPDPQPLGQPPAAPSGLGTNTMATGSGAPMADNNEGADGVGNSSGNWHCDSTWMGDRVITTSTRTWALPTYNNHLYKQISSQSGASNDNHYFGYSTPWGYFDFNRFHCHFSPRDWQRLINNNWGFRPKRLSFKLFNIQVKEVTQNDGTTTIANNLTSTVQVFTDSEYQLPYVLGSAHQGCLPPFPADVFMVPQYGYLTLNNGSQAVGRSSFYCLEYFPSQMLRTGNNFTFSYTFEDVPFHSSYAHSQSLDRLMNPLIDQYLYYLSKTNAPSGTTTMSRLQFSQAGASDIRDQSRNWLPGPCYRQQRVSKTAADNNNSDYSWTGATKYHLNGRDSLVNPGPAMASHKDDEEKYFPQSGVLIFGKQGSNKTNVDIEKVMITDEEEIRTTNPVATEQYGSVSTNLQSGNTQAATSDVNTQGVLPGMVWQDRDVYLQGPIWAKIPHTDGHFHPSPLMGGFGLKHPPPQILIKNTPVPANPSTTFSVAKFASFITQYSTGQVSVEIEWELQKENSKRWNPEIQYTSNYNKSVNVDFTVDTNGVYSEPRPIGTRYLTRNL

SEQ ID NO: 2726 - protein, 735 aa, Artificial Sequence
  Description of Artificial Sequence: Synthetic polypeptide
MAADGYLPDWLEDTLSEGIRQWWKLKPGPPPPKPAERHKDDSRGLVLPGYKYLGPFNGLDKGEPVNEADAAALEHDKAYDRQLDSGDNPYLKYNHADAEFQERLKEDTSFGGNLGRAVFQAKKRVLEPLGLVEEPVKTAPGKKRPVEHSPVEPDSSSGTGKAGQQPARKRLNFGQTGDADSVPDPQPLGQPPAAPSGLGTNTMATGSGAPMADNNEGADGVGNSSGNWHCDSTWMGDRVITTSTRTWALPTYNNHLYKQISSQSGASNDNHYFGYSTPWGYFDFNRFHCHFSPRDWQRLINNNWGFRPKRLSFKLFNIQVKEVTQNDGTTTIANNLTSTVQVFTDSEYQLPYVLGSAHQGCLPPFPADVFMVPQYGYLTLNNGSQAVGRSSFYCLEYFPSQMLRTGNNFTFSYTFEDVPFRSSYAHSQSLDRLMNPLIDQYLYYLSKTNAPSGTTTMSRLQFSQAGASDIRDQSRNWLPGPCYRQQRVSKTAADNNNSDYSWTGATKYHLNGRDSLVNPGPAMASHKDDEEKYFPQSGVLIFGKQGSNKTNVDIEKVMITDEEEIRTTNPVATEQYGSVSTNLQSGNTQAATSDVNTQGVLPGMVWQDRDVYLQGPIWAKIPHTDGHFHPSPLMGGFGLKHPPPQILIKNTPVPANPSTTFSAAKFASFITQYSTGQVSVEIEWELQKENSKRWNPEIQYTSNYNKSVNVDFTVDTNGVYSEPRPIGTRYLTRNL

SEQ ID NO: 2727 - protein, 735 aa, Artificial Sequence
  Description of Artificial Sequence: Synthetic polypeptide
MAADGYLPDWLEDTLSEGIRQWWKLKPGPPPPKPAERHKDDSRGLVLPGYKYLGPFNGLDKGEPVNEADAAALEHDKAYDRQLDSGDNPYLKYNHADAEFQERLKEDTSFGGNLGRAVFQAKKRVLEPLGLVEEPVKTAPGKKRPVEHSPVEPDSSSGTGKADQQPARKRLNFGQTGDADSVPDPQPLGQPPAAPSGLGTNTMATGSGAPMADNNEGADGVGNSSGNWHCDSTWMGDRVITTSTRTWALPTYNNHLYKQISSQSGASNDNHYFGYSTPWGYFDFNRFHCHFSPRDWQRLINNNWGFRPKRLSFKLFNIQVKEVTQNDGTTTIANNLTSTVQVFTDSEYQLPYVLGSAHQGCLPPFPADVFMVPQYGYLTLNNGSQAVGRSSFYCLEYFPSQMLRTGNNFTFSYTFEDVPFHSSYAHSQSLDRLMNPLIDQYLYYLSKTNAPSGTTTMSRLQFSQAGASDIRDQSRNWLPGPCYRQQRVSKTAADNNNSDYSWTGATKYHLNGRDSLVNPGPAMASHKDDEEKYFPQSGVLIFGKQGSNKTNVDIEKVMITDEEEIRTTNPVATEQYGSVSTNLQSGNTQAATSDVNTQGVLPGMVWQDRDVYLQGPIWAKIPHTDGHFHPSPLMGGFGLKHPPPQILIKNTPVPANPSTTFSAAKFASFITQYSTGQVSVEIEWELQKENSKRWNPEIQYTSNYNKSVNVDFTVDTNGVYSEPRPIGTRYLTRNL

SEQ ID NO: 2728 - protein, 735 aa, Artificial Sequence
  Description of Artificial Sequence: Synthetic polypeptide
MAADGYLPDWLEDTLSEGIRQWWKLKPGPPPPKPAERHKDDSRGLVLPGYKYLGPFNGLDKGEPVNEADAAALEHDKAYDRQLDSGDNPYLKYNHADAEFQERLKEDTSFGGNLGRAVFQAKKRVLEPLGLVEEPVKTAPGKKRPVEHSPVEPDSSSGTGKAGQQPARKRLNFGQTGDADSVPDPQPLGQPPAAPSGLGTNTMATGSGAPMADNNEGADGVGNSSGNWHCDSTWMGDRVITTSTRTWALPTYNNHLYKQISSQSGASNDNHYFGYSTPWGYFDFNRFHCHFSPRDWQRLINNNWGFRPKRLSFKLFNIQVKEVTQNDGTTTIANNLTNTVQVFTDSEYQLPYVLGSAHQGCLPPFPADVFMVPQYGYLTLNNGSQAVGRSSFYCLEYFPSQMLRTGNNFTFSYTFEDVPFHSSYAHSQSLDRLMNPLIDQYLYYLSKTNAPSGTTTMSRLQFSQAGASDIRDQSRNWLPGPCYRQQRVSKTAADNNNSDYSWTGATKYHLNGRDSLVNPGPAMASHKDDEEKYFPQSGVLIFGKQGSNKTNVDIEKVMITDEEEIRTTNPVATEQYGSVSTNLQSGNTQAATSDVNTQGVLPGMVWQDRDVYLQGPIWAKIPHTDGHFHPSPLMGGFGLKHPPPQILIKNTPVPANPSTTFSAAKFASFITQYSTGQVSVEIEWELQKENSKRWNPEIQYTSNYNKSVNVDFTVDTNGVYSEPRPIGTRYLTRNL

SEQ ID NO: 2729 - protein, 735 aa, Artificial Sequence
  Description of Artificial Sequence: Synthetic polypeptide
MAADGYLPDWLEDTLSEGIRQWWKLKPGPPPPKPAERHKDDSRGLVLPGYKYLGPFNGLDKGEPVNEADAAALEHDKAYDRQLDSGDNPYLKYNHADAEFQERLKEDTSFGGNLGRAVFQAKKRVLEPLGLVEEPVKTAPGKKRPVEHSPVEPDSSSGTGKAGQQPARKRLNFGQTGDADSVPDPQPLGQPPAAPSGLGTNTMATGSGAPMADNNEGADGVGNSSGNWHCDSTWMGDRVITTSTRTWALPTYNNHLYKQISSQSGASNDNHYFGYNTPWGYFDFNRFHCHFSPRDWQRLINNNWGFRPKRLSFKLFNIQVKEVTQNDGTTTIANNLTSTVQVFTDSEYQLPYVLGSAHQGCLPPFPADVFMVPQYGYLTLNNGSQAVGRSSFYCLEYFPSQMLRTGNNFTFSYTFEDVPFHSSYAHSQSLDRLMNPLIDQYLYYLSKTNAPSGTTTMSRLQFSQAGASDIRDQSRNWLPGPCYRQQRVSKTAADNNNSDYSWTGATKYHLNGRDSLVNPGPAMASHKDDEEKYFPQSGVLIFGKQGSNKTNVDIEKVMITDEEEIRTTNPVATEQYGSVSTNLQSGNTQAATSDVNTQGVLPGMVWQDRDVYLQGPIWAKIPHTDGHFHPSPLMGGFGLKHPPPQILIKNTPVPANPSTTFSAAKFASFITQYSTGQVSVEIEWELQKENSKRWNPEIQYTSNYNKSVNVDFTVDTNGVYSEPRPIGTRYLTRNL

SEQ ID NO: 2730 - protein, 735 aa, Artificial Sequence
  Description of Artificial Sequence: Synthetic polypeptide
MAADGYLPDWLEDTLSEGIRQWWKLKPGPPPPKPAERHKDDSRGLVLPGYKYLGPFNGLDKGEPVNEADAAALEHDKAYDRQLDSGDNPYLKYNHADAEFQERLKEDTSFGGNLGRAVFQAKKRVLEPLGLVEEPVKTAPGKKRPVEHSPVEPDSSSGTGKAGQQPARKRLNFGQTGGADSVPDPQPLGQPPAAPSGLGTNTMATGSGAPMADNNEGADGVGNSSGNWHCDSTWMGDRVITTSTRTWALPTYNNHLYKQISSQSGASNDNHYFGYSTPWGYFDFNRFHCHFSPRDWQRLINNNWGFRPKRLSFKLFNIQVKEVTQNDGTTTIANNLTSTVQVFTDSEYQLPYVLGSAHQGCLPPFPADVFMVPQYGYLTLNNGSQAVGRSSFYCLEYFPSQMLRTGNNFTFSYTFEDVPFHSSYAHSQSLDRLMNPLIDQYLYYLSKTNAPSGTTTMSRLQFSQAGASDIRDQSRNWLPGPCYRQQRVSKTAADNNNSDYSWTGATKYHLNGRDSLVNPGPAMASHKDDEEKYFPQSGVLIFGKQGSNKTNVDIEKVMITDEEEIRTTNPVATEQYGSVSTNLQSGNTQAATSDVNTQGVLPGMVWQDRDVYLQGPIWAKIPHTDGHFHPSPLMGGFGLKHPPPQILIKNTPVPANPSTTFSAAKFASFITQYSTGQVSVEIEWELQKENSKRWNPEIQYTSNYNKSVNVDFTVDTNGVYSEPRPIGTRYLTRNL

SEQ ID NO: 2731 - protein, 735 aa, Artificial Sequence
  Description of Artificial Sequence: Synthetic polypeptide
MAADGYLPDWLEDTLSEGIRQWWKLKPGPPPPRPAERHQDDSRGLVLPGYKYLGPFNGLDKGEPVNEADAAALEHDKAYDRQLDSGDNPYLKYNHADAEFQERLKEDTSFGGNLGRAVFQAKKRVLEPLGLVEEPVKTAPGKKRPVEHSPAEPDSSSGTGKAGQQPARKRLNFGQTGDADSVPDPQPLGQPPAAPTSLGSTTMATGSGAPMADNNEGADGVGNSSGNWHCDSQWLGDRVITTSTRTWALPTYNNHLYKQISSQSGASNDNHYFGYSTPWGYFDFNRFHCHFSPRDWQRLINNNWGFRPKRLNFKLFNIQVKEVTQNDGTTTIANNLTSTVQVFTDSEYQLPYVLGSAHQGCLPPFPADVFMVPQYGYLTLNNGSQAVGRSSLYCLEYFPSQMLRTGNNFTFSYTFEDVPFHSSYAHSQSLDRLMNPLIDQYLYYLNRTQSNSGTLQQSRLLFSQAGPTSMSLQAKNWLPGPCYRQQRLSKQANDNNNSNFPWTAATKYHLNGRDSLVNPGPAMASHKDDEEKFFPMHGTLIFGKQGTNANDADLEHVMITDEEEIRTTNPVATEQYGNVSNNLQNSNTGPTTENVNHQGALPGMVWQDRDVYLQGPIWAKIPHTDGHFHPSPLMGGFGLKHPPPQIMIKNTPVPANPPTNFSAAKFASFITQYSTGQVSVEIEWELQKENSKRWNPEIQYTSNYNKSVNVDFTVDANGVYSEPRPIGTRYLTRNL

SEQ ID NO: 2732 - protein, 735 aa, Artificial Sequence
  Description of Artificial Sequence: Synthetic polypeptide
MAADGYLPDWLEDTLSEGIRQWWKLKPGPPPPRPAERHQDDSRGLVLPGYKYLGPFNGLDKGEPVNEADAAALEHDKAYDRQLDSGDNPYLKYNHADAEFQERLKEDTSFGGNLGRAVFQAKKRVLEPLGLVEEPVKTAPGKKRPVEHSPAEPDSSSGTGKAGQQPARKRLNFGQTGDADSVPDPQPLGQPPAAPTSLGSTTMATGSGAPMADNNEGADGVGNSSGNWHCDPQWLGDRVITTSTRTWALPTYNNHLYKQISSQSGASNDNHYFGYSTPWGYFDFNRFHCHFSPRDWQRLINNNWGFRPKRLNFKLFNIQVKEVTQNDGTTTIANNLTSTVQVFTDSEYQLPYVLGSAHQGCLPPFPADVFMVPQYGYLTLNNGSQAVGRSSFYCLEYFPSQMLRTGNNFTFSYTFEDVPFHSSYAHSQSLDRLMNPLIDQYLYYLNRTQSNSGTLQQSRLLFSQAGPTSMSLQAKNWLPGPCYRQQRLSKQANDNNNSNFPWTAATKYHLNGRDSLVNPGPAMASHKDDEEKFFPMHGTLIFGKQGTNANDADLEHVMITDEEEIRTTNPVATEQYGNVSNNLQNSNTGPTTENVNHQGALPGMVWQDRDVYLQGPIWAKIPHTDGHFHPSPLMGGFGLKHPPPQIMIKNTPVPANPPTNFSAAKFASFITQYSTGQVSVEIEWELQKENSKRWNPEIQYTSNYNKSVNVDFTVDANGVYSEPRPIGTRYLTRNL

SEQ ID NO: 2733 - protein, 735 aa, Artificial Sequence
  Description of Artificial Sequence: Synthetic polypeptide
MAADGYLPDWLEDTLSEGIRQWWKLKPGPPPPRPAERHQDDSRGLVLPGYKYLGPFNGLDKGEPVNEADAAALEHDKAYDRQLDSGDNPYLKYNHADAEFQERLKEDTSFGGNLGRAVSQAKKRVLEPLGLVEEPVKTAPGKKRPVEHSPAEPDSSSGTGKAGQQPARKRLNFGQTGDADSVPDPQPLGQPPAAPTSLGSTTMATGSGAPMADNNEGADGVGNSSGNWHCDSQWLGDRVITTSTRTWALPTYNNHLYKQISSQSGASNDNHYFGYSTPWGYFDFNRFHCHFSPRDWQRLINNNWGFRPKRLNFKLFNIQVKEVTQNDGTTTIANNLTSTVQVFTDSEYQLPYVLGSAHQGCLPPFPADVFMVPQYGYLTLNNGSQAVGRSSFYCLEYFPSQMLRTGNNFTFSYTFEDVPFHSSYAHSQSLDRLMNPLIDQYLYYLNRTQSNSGTLQQSRLLFSQAGPTSMSLQAKNWLPGPCYRQQRLSKQANDNNNSNFPWTAATKYHLNGRDSLVNPGPAMASHKDDEEKFFPMHGTLIFGKQGTNANDADLEHVMITDEEEIRTTNPVATEQYGNVSNNLQNSNTGPTTENVNHQGALPGMVWQDRDVYLQGPIWAKIPHTDGHFHPSPLMGGFGLKHPPPQIMIKNTPVPANPPTNFSAAKFASFITQYSTGQVSVEIEWELQKENSKRWNPEIQYTSNYNKSVNVDFTVDANGVYSEPRPIGTRYLTRNL

SEQ ID NO: 2734 - protein, 735 aa, Artificial Sequence
  Description of Artificial Sequence: Synthetic polypeptide
MAADGYLPDWLEDTLSEGIRQWWKLKPGPPPPRPAERHQDDSRGLVLPGYKYLGPFNGLDKGEPVNEADAAALEHDKAYDRQLDSGDNPYLKYNHADAEFQERLKEDTSFGGNLGRAVFQAKKRVLEPLGLVEEPVKTAPGKKRPVEHSPAEPDSSSGTGKAGQQPARKRLNFGQTGDADSVPDPQPLGQPPAAPTSLGSTTMATGSGAPMADNNEGADGVGNSSGNWHCDSQWLGDRVITTSTRTWALPTYNNHLYKQISSQSGASNDNHYFGYSTPWGYFDFNRFHCHFSPRDWQRLINNNWGFRPKRLNFKLFNIQVKEVTQNDGTTTIANNLTSTVQVFTDSEYQLPYVLGSAHQGCLPPFPADVFMVPQYGYLTLNNGSQAVGRSSFYCLEYFPSQMLRTGNNFTFSYTFEDVPFHSSYAHSQSLDRLMSPLIDQYLYYLNRTQSNSGTLQQSRLLFSQAGPTSMSLQAKNWLPGPCYRQQRLSKQANDNNNSNFPWTAATKYHLNGRDSLVNPGPAMASHKDDEEKFFPMHGTLIFGKQGTNANDADLEHVMITDEEEIRTTNPVATEQYGNVSNNLQNSNTGPTTENVNHQGALPGMVWQDRDVYLQGPIWAKIPHTDGHFHPSPLMGGFGLKHPPPQIMIKNTPVPANPPTNFSAAKFASFITQYSTGQVSVEIEWELQKENSKRWNPEIQYTSNYNKSVNVDFTVDANGVYSEPRPIGTRYLTRNL

SEQ ID NO: 2735 - protein, 735 aa, Artificial Sequence
  Description of Artificial Sequence: Synthetic polypeptide
MAADGYLPDWLEDTLSEGIRQWWKLKPGPPPPRPAERHQDDSRGLVLPGYKYLGPFNGLDKGEPVNEADAAALEHDKAYDRQLDSGDNPYLKYNHADAEFQERLKEDTSFGGNLGRAVFQAKKRVLEPLGLVEEPVKTAPGKKRPVEHSPAEPDSSSGTGKAGQQPARKRLNFGQTGDADSVPDPQPLGQPPAAPTSLGSTTMATGSGAPMAGNNEGADGVGNSSGNWHCDSQWLGDRVITTSTRTWALPTYNNHLYKQISSQSGASNDNHYFGYSTPWGYFDFNRFHCHFSPRDWQRLINNNWGFRPKRLNFKLFNIQVKEVTQNDGTTTIANNLTSTVQVFTDSEYQLPYVLGSAHQGCLPPFPADVFMVPQYGYLTLNNGSQAVGRSSFYCLEYFPSQMLRTGNNFTFSYTFEDVPFHSSYAHSQSLDRLMNPLIDQYLYYLNRTQSNSGTLQQSRLLFSQAGPTSMSLQAKNWLPGPCYRQQRLSKQANDNNNSNFPWTAATKYHLNGRDSLVNPGPAMASHKDDEEKFFPMHGTLIFGKQGTNANDADLEHVMITDEEEIRTTNPVATEQYGNVSNNLQNSNTGPTTENVNHQGALPGMVWQDRDVYLQGPIWAKIPHTDGHFHPSPLMGGFGLKHPPPQIMIKNTPVPANPPTNFSAAKFASFITQYSTGQVSVEIEWELQKENSKRWNPEIQYTSNYNKSVNVDFTVDANGVYSEPRPIGTRYLTRNL

SEQ ID NO: 2736 - protein, 735 aa, Artificial Sequence
  Description of Artificial Sequence: Synthetic polypeptide
MAADGYLPDWLEDTLSEGIRQWWKLKPGPPPPRPAERHQDDSRGLVLPGYKYLGPFNGLDKGEPVNEADAAALEHDKAYDRQLDSGDNPYLKYNHADAEFQERLKEDTSFGGNLGRAVFQAKKRVLEPLGLVEEPVKTAPGKKRPVEHSPAEPDSSSGTGKAGQQPARKRLNFGQTGDADSVPDPQPLGQPPAAPTSLGSTTMATGSGAPMADSNEGADGVGNSSGNWHCDSQWLGDRVITTSTRTWALPTYNNHLYKQISSQSGASNDNHYFGYSTPWGYFDFNRFHCHFSPRDWQRLINNNWGFRPKRLNFKLFNIQVKEVTQNDGTTTIANNLTSTVQVFTDSEYQLPYVLGSAHQGCLPPFPADVFMVPQYGYLTLNNGSQAVGRSSFYCLEYFPSQMLRTGNNFTFSYTFEDVPFHSSYAHSQSLDRLMNPLIDQYLYYLNRTQSNSGTLQQSRLLFSQAGPTSMSLQAKNWLPGPCYRQQRLSKQANDNNNSNFPWTAATKYHLNGRDSLVNPGPAMASHKDDEEKFFPMHGTLIFGKQGTNANDADLEHVMITDEEEIRTTNPVATEQYGNVSNNLQNSNTGPTTENVNHQGALPGMVWQDRDVYLQGPIWAKIPHTDGHFHPSPLMGGFGLKHPPPQIMIKNTPVPANPPTNFSAAKFASFITQYSTGQVSVEIEWELQKENSKRWNPEIQYTSNYNKSVNVDFTVDANGVYSEPRPIGTRYLTRNL

SEQ ID NO: 2737 - protein, 735 aa, Artificial Sequence
  Description of Artificial Sequence: Synthetic polypeptide
MAADGYLPDWLEDTLSEGIRQWWKLKPGPPPPRPAERHQDDSRGLVLPGYKYLGPFNGLDKGEPVNEADAAALEHDKAYDRQLDSGDNPYLKYNHADAEFQERLKEDTSFGGNLGRAVFQAKKRVLEPLGLVEEPVKTAPGKKRPVEHSPAEPDSSSGTGKAGQQPARKRLNFGQTGDADSVPDPQPLGQPPAAPTSLGSTTMATGSGAPMADNNEGADGVGNSSGNWHCDSQWLGDRVITTSTRTWALPTYNNHHYKQISSQSGASNDNHYFGYSTPWGYFDFNRFHCHFSPRDWQRLINNNWGFRPKRLNFKLFNIQVKEVTQNDGTTTIANNLTSTVQVFTDSEYQLPYVLGSAHQGCLPPFPADVFMVPQYGYLTLNNGSQAVGRSSFYCLEYFPSQMLRTGNNFTFSYTFEDVPFHSSYAHSQSLDRLMNPLIDQYLYYLNRTQSNSGTLQQSRLLFSQAGPTSMSLQAKNWLPGPCYRQQRLSKQANDNNNSNFPWTAATKYHLNGRDSLVNPGPAMASHKDDEEKFFPMHGTLIFGKQGTNANDADLEHVMITDEEEIRTTNPVATEQYGNVSNNLQNSNTGPTTENVNHQGALPGMVWQDRDVYLQGPIWAKIPHTDGHFHPSPLMGGFGLKHPPPQIMIKNTPVPANPPTNFSAAKFASFITQYSTGQVSVEIEWELQKENSKRWNPEIQYTSNYNKSVNVDFTVDANGVYSEPRPIGTRYLTRNL

SEQ ID NO: 2738 - protein, 735 aa, Artificial Sequence
  Description of Artificial Sequence: Synthetic polypeptide
MAADGYLPDWLEDTLSEGIRQWWKLKPGPPPPRPAERHQDDSRGLVLPGYKYLGPFNGLDKGEPVNEADAAALEHDKAYDRQLDSGDNPYLKYNHADAEFQERLKEDTSFGGNLGRAVFQAKKRVLEPLGLVEEPVKTAPGKKRPVEHSPAEPDSSSGTGKAGQQPARKRLNFGQTGDADSVPDPQPLGQPPAAPTSLGSTTMATGSGAPMADNNEGADGVGNSSGNWHCDSQWLGDRVITTSTRTWALPTYNNHLYKQISSQSGASNDNHYFGYSTPWGYFDFNRFHCHFSPRDWQRLINNNWGFRPKRLNFKLFNIQVKEVTQNDGTTTIANNLTSTVRVFTDSEYQLPYVLGSAHQGCLPPFPADVFMVPQYGYLTLNNGSQAVGRSSFYCLEYFPSQMLRTGNNFTFSYTFEDVPFHSSYAHSQSLDRLMNPLIDQYLYYLNRTQSNSGTLQQSRLLFSQAGPTSMSLQAKNWLPGPCYRQQRLSKQANDNNNSNFPWTAATKYHLNGRDSLVNPGPAMASHKDDEEKFFPMHGTLIFGKQGTNANDADLEHVMITDEEEIRTTNPVATEQYGNVSNNLQNSNTGPTTENVNHQGALPGMVWQDRDVYLQGPIWAKIPHTDGHFHPSPLMGGFGLKHPPPQIMIKNTPVPANPPTNFSAAKFASFITQYSTGQVSVEIERELQKENSKRWNPEIQYTSNYNKSVNVDFTVDANGVYSEPRPIGTRYLTRNL

SEQ ID NO: 2739 - protein, 735 aa, Artificial Sequence
  Description of Artificial Sequence: Synthetic polypeptide
MAADGYLPDWLEDTLSEGIRQWWKLKPGPPPPRPAERHQDDSRGLVLPGYKYLGPFNGLDKGEPVNEADAAALEHDKAYDRQLDSGDNPYLKYNHADAEFQERLKEDTSFGGNLGRAVFQAKKRVLEPLGLVEEPVKTAPGKKRPVEHSPAEPDSSSGTGKAGQQPARKRLNFGQTGDADSVPDPQPLGQPPAAPTSLGSTTMATGSGAPMADNNEGADGVGNSSGNWHCDSQWLGDRVITTSTRTWALPTYNNHLYKQISSQSGASNDNHYFGYSTPWGYFDFNRFHCHFSPRDWQRLINNNWGFRPKRLNFKLFNIQVKEVTQNDGTTTIANNLTSTVQVFTDSEYQLPYVLGSAHQGCLPPFPADVFMVPQYGYLTLNNGSQAVGRSSFYCLEYFPSQMLRTGNNFTFSYTFEDVPSHSSYAHSQSLDRLMNPLIDQYLYYLNRTQSNSGTLQQSRLLFSQAGPTSMSLQAKNWLPGPCYRQQRLSKQANDNNNSNFPWTAATKYHLNGRDSLVNPGPAMASHKDDEEKFFPMHGTLIFGKQGTNANDADLEHVMITDEEEIRTTNPVATEQYGNVSNNLQNSNTGPTTENVNHQGALPGMVWQDRDVYLQGPIWAKIPHTDGHFHPSPLMGGFGLKHPPPQIMIKNTPVPANPPTNFSAAKFASFITQYSTGQVSVEIEWELQKENSKRWNPEIQYTSNYNKSVNVDFTVDANGVYSEPRPIGTRYLTRNL

SEQ ID NO: 2740 - protein, 735 aa, Artificial Sequence
  Description of Artificial Sequence: Synthetic polypeptide
MAADGYLPDWLEDTLSEGIRQWWKLKPGPPPPRPAERHQDDSRGLVLPGYKYLGPFNGLDKGEPVNEADAAALEHDKAYDRQLDSGDNPYLKYNHADAEFQERLKEDTSFGGNLGRAVFQAKKRVLEPLGLVEEPVKTAPGKKRPVEHSPAEPDSSSGTGKAGQRPARKRLNFGQTGDADSVPDPQPLGQPPAAPTSLGSTTMATGSGAPMADNNEGADGVGNSSGNWHCDSQWLGDRVITTSTRTWALPTYNNHLYKQISSQSGASNDNHYFGYSTPWGYFDFNRFHCHFSPRDWQRLINNNWGFRPKRLNFKLFNIQVKEVTQNDGTTTIANNLTSTVQVFTDSEYQLPYVLGSAHQGCLPPFPADVFMVPQYGYLTLNNGSQAVGRSSFYCLEYFPSQMLRTGNNFTFSYTFEDVPFHSSYAHSQSLDRLMNPLIDQYLYYLNRTQSNSGTLQQSRLLFSQAGPTSMSLQAKNWLPGPCYRQQRLSKQANDNNNSNFPWTAATKYHLNGRDSLVNPGPAMASHKDDEEKFFPMHGTLIFGKQGTNANDADLEHVMITDEEEIRTTNPVATEQYGNVSNNLQNSNTGPTTENVNHQGALPGMVWQDRDVYLQGPIWAKIPHTDGHFHPSPLMGGFGLKHPPPQIMIKNTPVPANPPTNFSAAKFASFITQYSTGQVSVEIEWELQKENSKRWNPEIQYTSNYNKSVNVDFTVDANGVYSEPRPIGTRYLTRNL

SEQ ID NO: 2741 - protein, 735 aa, Artificial Sequence
  Description of Artificial Sequence: Synthetic polypeptide
MAADGYLPDWLEDTLSEGIRQWWKLKPGPPPPKPAERHKDDSRGLVLPGYKYLGPFNGLDKGEPVNEADAAALEHDKAYDRQLDSGDNPYLKYNHADAEFQERLKEDTSFGGNLARAVFQAKKRVLEPLGLVEEPVKTAPGKKRPVEHSPAEPDSSSGTGKSGQQPARKRLNFGQTGDADSVPDPQPLGQPPAAPSGLGTNTMASGSGAPMADNNEGADGVGNSSGNWHCDSTWMGDRVITTSTRTWALPTYNNHLYKQISSQSGAANDNHYFGYSTPWGYFDFNRFHCHFSPRDWQRLINNNWGFRPKRLNFKLFNIQVKEVTQNDGTTTIANNLTSTVQVFTDSEYQLPYVLGSAHQGCLPPFPADVFMVPQYGYLTLNNGSQAVGRSSFYCLEYFPSQMLRTGNNFTFSYTFEDVPFHSSYAHSQSLDRLMNPLIDQYLYYLNRTQSNSGTLQQSRLLFSQAGPTSMSLQAKNWLPGPCYRQQRLSKQANDNNNSNFPWTAATKYHLNGRDSLVNPGPAMASHKDDEEKFFPMHGTLIFGKQGTNANDADLEHVMITDEEEIRTTNPVATEQYGNVSNNLQNSNTGPTTENVNHQGALPGMVWQDRDVYLQGPIWAKIPHTDGHFHPSPLMGGFGLKHPPPQIMIKNTPVPANPPTNFSAAKFASFITQYSTGQVSVEIEWELQKENSKRWNPEIQYTSNYNKSVNVDFTVDANGVYSEPRPIGTRYLTRNL

SEQ ID NO: 2742 - protein, 735 aa, Artificial Sequence
  Description of Artificial Sequence: Synthetic polypeptide
MAADGYLPDWLEDTLSEGIRQWWKLKPGPPPPRPAERHQDDSRGLVLPGYKYLGPFNGLDKGEPVNEADAAALEHDKAYDRQLDSGDNPYLKYNHADAEFQERLKEDTSFGGNLGRAVFQAKKRVLEPLGLVEEPVKTAPGKKRPVEHSPAEPDSSSGTGKAGQQPARKRLNFGQTGDADSVPDPRPLGQPPAAPTSLGSTTMATGSGAPMADNNEGADGVGNSSGNWHCDSQWLGDRVITTSTRTWALPTYNNHLYKQISSQSGASNDNHYFGYSTPWGYFDFNRFHCHFSPRDWQRLINNNWGFRPKRLNFKLFNIQVKEVTQNDGTTTIANNLTSTVQVFTDSEYQLPYVLGSAHQGCLPPFPADVFMVPQYGYLTLNNGSQAVGRSSFYCLEYFPSQMLRTGNNFTFSYTFEDVPFHSSYAHSQSLDRLMNPLIDQYLYYLNRTQSNSGTLQQSRLLFSQAGPTSMSLQAKNWLPGPCYRQQRLSKQANDNNNSNFPWTAATKYHLNGRDSLVNPGPAMASHKDDEEKFFPMHGTLIFGKQGTNANDADLEHVMITDEEEIRTTNPVATEQYGNVSNNLQNSNTGPTTENVNHQGALPGMVWQDRDVYLQGPIWAKIPHTDGHFHPSPLMGGFGLKHPPPQIMIKNTPVPANPPTNFSAAKFASFITQYSTGQVSVEIEWELQKENSKRWNPEIQYTSNYNKSVNVDFTVDANGVYSEPRPIGTRYLTRNL

SEQ ID NO: 2743 - protein, 735 aa, Artificial Sequence
  Description of Artificial Sequence: Synthetic polypeptide
MAADGYLPDWLEDTLSEGIRQWWKLKPGPPPPKPAERHKDDSRGLVLPGYKYLGPFNGLDKGEPVNEADAAALEHDKAYDRQLDSGDNPYLKYNHADAEFQERLKEDTSFGGNLARAVFQAKKRVLEPLGLVEEPVKTAPGKKRPVEHSPAEPDSSSGTGKSGQQPARKRLNFGQTGDADSVPDPQPLGQPPAAPTSLGSTTMATGSGAPMADNNEGADGVGNSSGNWHCDSQWLGDRVITTSTRTWALPTYNNHLYKQISSQSGASNDNHYFGYSTPWGYFDFNRFHCHFSPRDWQRLINNNWGFRPKRLNFKLFNIQVKEVTQNDGTTTIANNLTSTVQVFTDSEYQLPYVLGSAHQGCLPPFPADVFMVPQYGYLTLNNGSQAVGRSSFYCLEYFPSQMLRTGNNFTFSYTFEDVPFHSSYAHSQSLDRLMNPLIDQYLYYLNRTQSNSGTLQQSRLLFSQAGPTSMSLQAKNWLPGPCYRQQRLSKQANDNNNSNFPWTAATKYHLNGRDSLVNPGPAMASHKDDEEKFFPMHGTLIFGKQGTNANDADLEHVMITDEEEIRTTNPVATEQYGNVSNNLQNSNTGPTTENVNHQGALPGMVWQDRDVYLQGPIWAKIPHTDGHFHPSPLMGGFGLKHPPPQIMIKNTPVPANPPTNFSAAKFASFITQYSTGQVSVEIEWELQKENSKRWNPEIQYTSNYNKSVNVDFTVDANGVYSEPRPIGTRYLTRNL

SEQ ID NO: 2744 - protein, 735 aa, Artificial Sequence
  Description of Artificial Sequence: Synthetic polypeptide
MAADGYLPDWLEDTLSEGIRQWWKLKPGPPPPRPAERHQDDSRGLVLPGYKYLGPFNGLDKGEPVNEADAAALEHDKAYDRQLDSGDNPYLKYNHADAEFQERLKEDTSFGGNLGRAVFQAKKRVLEPLGLVEEPVKTAPGKKRPVEHSPAEPDSSSGTGKAGQQPARKRLNFGQTGDADSVPDPQPLGQPPAAPTSLGSTTMATGSGAPMADNNEGADGVGNSSGNWHCDSQWLGDRVITTSTRTWALPTYNNHLYKQISSQSGASNDNHYFGYSTPWGYFDFNRFHCHFSPRDWQRLINNNWGFRPKRLNFKLFNIQVKEVTQNDGTTTIANNLTSTVRVFTDSEYQLPYVLGSAHQGCLPPFPADVFMVPQYGYLTLNNGSQAVGRSSFYCLEYFPSQMLRTGNNFTFSYTFEDVPFHSSYAHSQSLDRLMNPLIDQYLYYLNRTQSNSGTLQQSRLLFSQAGPTSMSLQAKNWLPGPCYRQQRLSKQANDNNNSNFPWTAATKYHLNGRDSLVNPGPAMASHKDDEEKFFPMHGTLIFGKQGTNANDADLEHVMITDEEEIRTTNPVATEQYGNVSNNLQNSNTGPTTENVNHQGALPGMVWQDRDVYLQGPIWAKIPHTDGHFHPSPLMGGFGLKHPPPQIMIKNTPVPANPPTNFSAAKFASFITQYSTGQVSVEIERELQKENSKRWNPEIQYTSNYNKSVNVDFTVGANGVYSEPRPIGTRYLTRNL

SEQ ID NO: 2745 - protein, 735 aa, Artificial Sequence
  Description of Artificial Sequence: Synthetic polypeptide
MAADGYLPDWLEDTLSEGIRQWWKLKPGPPPPKPAERHKDDSRGLVLPGYKYLGPFNGLDKGEPVNEADAAALEHDKAYDRQLDSGDNPYLKYNHADAEFQERLKEDTSFGGNLARAVFQAKKRVLEPLGLVEEPVKTAPGKKRPVEHSPAEPDSSSGTGKSGQQPARKRLNFGQTGDADSVPDPQPLGQPPAAPSGLGTNTMASGSGAPMADNNEGADGVGNSSGNWHCDSQWLGDRVITTSTRTWALPTYNNHLYKQISSQSGASNDNHYFGYSTPWGYFDFNRFHCHFSPRDWQRLINNNWGFRPKRLNFKLFNIQVKEVTQNDGTTTIANNLTSTVQVFTDSEYQLPYVLGSAHQGCLPPFPADVFMVPQYGYLTLNNGSQAVGRSSFYCLEYFPSQMLRTGNNFTFSYTFEDVPFHSSYAHSQSLDRLMNPLIDQYLYYLNRTQSNSGTLQQSRLLFSQAGPTSMSLQAKNWLPGPCYRQQRLSKQANDNNNSNFPWTAATKYHLNGRDSLVNPGPAMASHKDDEEKFFPMHGTLIFGKQGTNANDADLEHVMITDEEEIRTTNPVATEQYGNVSNNLQNSNTGPTTENVNHQGALPGMVWQDRDVYLQGPIWAKIPHTDGHFHPSPLMGGFGLKHPPPQIMIKNTPVPANPPTNFSAAKFASFITQYSTGQVSVEIEWELQKENSKRWNPEIQYTSNYNKSVNVDFTVDANGVYSEPRPIGTRYLTRNL

SEQ ID NO: 2746 - protein, 735 aa, Artificial Sequence
  Description of Artificial Sequence: Synthetic polypeptide
MAADGYLPDWLEDTLSEGIRQWWKLKPGPPPPRPAERHQDDSRGLVLPGYKYLGPFNGLDKGEPVNEADAAALEHDKAYDRQLDSGDNPYLKYNHADAEFQERLKEDTSFGGNLGRAVFQAKKRVLEPLGLVEEPVKTAPGKKRPVEHSPAEPDSSSGTGKAGQQPARKRLNFGQTGDADSVPDPQPLGQPPAAPTSLGSTTMATGSGAPMADNNEGADGVGNSSGNWHCDSQWLGDRVITTSTRTWALPTYNNHLYKQISSQSGASNDNHYFGYSTPWGYFDFNRFHCHFSPRDWQRLINNNWGFRPKRLNFKLFNIQVKEVTQNDGTTTIANNLTSTVQVFTDSEYQLPYVLGSAHQGCLPPFPADVFMVPQYGYLTLNNGSQAVGRSSFYCLEYFPSQMLRTGNNFTFSYTFEDVPFHSSYAHSQSLDRLMNPLIDQYLYYLNRTQSNSGTLQQSRLLFSQAGPTSMSLQAKNWLPGPCYRQQRLSKQANDNNNSNFPWTAATKYHLNGRDSLVNPGPAMASHKDDEEKFFPMHGTLIFGKQGTNANDADLEHVMITDEEEIRTTNPVATEQYGNVSNNLQNSNTGPTTENVNHQGALPGMVWQDRDVYLQGPIWAKIPHTDGHFHPSPLMGGFGLKHPPPQILIKNTPVPANPSTTFSAAKFASFITQYSTGQVSVEIEWELQKENSKRWNPEIQYTSNYNKSVNVDFTVDTNGVYSEPRPIGTRYLTRNL

SEQ ID NO: 2747 - protein, 735 aa, Artificial Sequence
  Description of Artificial Sequence: Synthetic polypeptide
MAADGYLPDWLEDTLSEGIRQWWKLKPGPPPPRPAERHQDDSRGLVLPGYKYLGPFNGLDKGEPVNEADAAALEHDKAYDRQLDSGDNPYLKYNHADAEFQERLKEDTSFGGNLGRAVFQAKKRVLEPLGLVEEPVKTAPGKKRPVEHSPAEPDSSSGTGKAGQQPARKRLNFGQTGDADSVPDPQPLGQPPAAPTSLGSTTMATGSGAPMADNNEGADGVGNSSGNWHCDSQWLGDRVITTSTRTWALPTYNNHLYKQISSQSGASNDNHYFGYSTPWGYFDFNRFHCHFSPRDWQRLINNNWGFRPKRLNFKLFNIQVKEVTQNDGTTTIANNLTSTVQVFTDSEYQLPYVLGSAHQGCLPPFPADVFMVPQYGYLTLNNGSQAVGRSSFYCLEYFPSQMLRTGNNFTFSYTFEDVPFHSSYAHSQSLDRLMNPLIDQYLYYLNRTQSNSGTLQQSRLLFSQAGPTSMSLQAKNWLPGPCYRQQRLSKQANDNNNSNFPWTAATKYHLNGRDSSVNPGPAMASHKDDEEKFFSMHGTLIFGKQGTNANDADLEHVMITDEEEIRTTNPVATEQYGNVSNNLQNSNTGPTTENVNHQGALPGMVWQDRDVYLQGPIWAKIPHTDGHFHPSPLMGGFGLKHPPPQIMIKNTPVPANPPTNFSAAKFASFITQYSTGQVSVEIEWELQKENSKRWNPEIQYTSNYNKSVNVDFTVDANGVYSEPRPIGTRYLTRNL

SEQ ID NO: 2748 - protein, 735 aa, Artificial Sequence
  Description of Artificial Sequence: Synthetic polypeptide
MAADGYLPDWLEDTLSEGIRQWWKLKPGPPPPRPAERHQDDSRGLVLPGYKYLGPFNGLDKGEPVNEADAAALEHDKAYDRQLDSGDNPYLKYNHADAEFQERLKEDTSFGGNLGRAVFQAKKRVLEPLGLVEEPVKTAPGKKRPVEHSPAEPDSSSGTGKAGQQPARKRLNFGQTGDADSVPDPQPLGQPPAAPTSLGSTTMATGSGAPMADNNEGADGVGNSSGNWHCDSQWLGDRVITTSTRTWALPTYNNHLYKQISSQSGASNDNHYFGYSTPWGYFDFNRFHCHFSPRDWQRLINNNWGFRPKRLNFKLFNIQVKEVTQNDGTTTIANNLTSTVQVFTDSEYQLPYVLGSAHQGCLPPFPAGVFMVPQYGYLTLNNGSQAVGRSSFYCLEYFPSQMLRTGNNFTFSYTFEDVPFHSSYAHSQSLDRLMNPLIDQYLYYLNRTQSNSGTLQQSRLLFSQAGPTSMSLQAKNWLPGPCCRQQRLSKQANDNNNSNFPWTAATKYHLNGRDSLVNPGPAMASHKDDEEKFFPMHGTLIFGKQGTNANDADLEHVMITDEEEIRTTNPVATEQYGNVSNNLQNSNTGPTTENVNHQGALPGMVWQDRDVYLQGPIWAKIPHTDGHFHPSPLMGGFGLKHPPPQIMIKNTPVPANPPTNFSAAKFASFITQYSTGQVSVEIEWELQKENSKRWNPEIQYTSNYNKSVNVDFTVDANGVYSEPRPIGTRYLTRNL

SEQ ID NO: 2749 - protein, 735 aa, Artificial Sequence
  Description of Artificial Sequence: Synthetic polypeptide
MAADGYLPDWLEDTLSEGIRQWWKLKPGPPPPRPAERHQDDSRGLVLPGYKYLGPFNGLDKGEPVNEADAAALEHDKAYDRQLDSGDNPYLKYNHADAEFQERLKEDTSFGGNLGRAVFQAKKRVLEPLGLVEEPVKTAPGKKRPVEHSPAEPDSSSGTGKAGQQPARKRLNFGQTGDADSVPDPQPPGQPPAAPTSLGSTTMATGSGAPMADNNEGADGVGNSSGNWHCDSQWLGDRVITTSTRTWALPTYNNHLYKQISSQSGASNDNHYFGYSTPWGYFDFNRFHCHFSPRDWQRLINNNWGFRPKRLNFKLFNIQVKEVTQNDGTTTIANNLTSTVQVFTDSEYQLPYVLGSAHQGCLPPFPADVFMVPQYGYLTLNNGSQAVGRSSFYCLEYFPSQMLRTGNNFTFSYTFEDVPFHSSYAHSQSLDRLMNPLIDQYLYYLNRTQSNSGTLQQSRLLFSQAGPTSMSLQAKNWLPGPCYRQQRLSKQANDNNNSNFPWTAATKYHLNGRDSLVNPGPAMASHKDDEEKFFPMHGTLIFGKQGTNANDADLEHVMITDEEEIRTTNPVATEQYGNVSNNLQNSNTGPTTENVNHQGALPGMVWQDRDVYLQGPIWAKIPHTDGHFHPSPLMGGFGLKHPPPQIMIKNTPVPANPPTNFSAAKFASFITQYSTGQVSVEIEWELQKENSKRWNPEIQYTSNYNKSVNVDFTVDANGVYSEPRPIGTRYLTRNL

SEQ ID NO: 2750 - protein, 735 aa, Artificial Sequence
  Description of Artificial Sequence: Synthetic polypeptide
MAADGYLPDWLEDTLSEGIRQWWKLKPGPPPPRPAERHQDDSRGLVLPGYKYLGPFNGLDKGEPVNEADAAALEHDKAYDRQLDSGDNPYLKYNHADAEFQERLKEDTSFGGNLGRAVFQAKKRVLEPLGLVEEPVKTAPGKKRPVEHSPAEPDSSSGTGKAGQQPARKRLNFGQTGDADSVPDPQPLGQPPAAPTSLGSTTMATGSGAPMADNNEGADGVGNSSGNWHCDSQWLGDRVITTSTRTWALPTYNNHHYKQISSQSGASNDNHYFGYSTPWGYFDFNRFHCHFSPRDWQRLINNNWGFRPKRLNFKLFNIQVKEVTQNDGTTTIANNLTSTVQVFTDSEYQLPYVLGSAHQGCLPPFPADVFMVPQYGYLTLNNGSQAVGRSSFYCLEYFPSQMLRTGNNFTFSYTFEDVPFHSSYAHSQSLDRLMNPLIDQYLYYLNRTQSNSGTLQQSRLLFSQAGPTSMSLQAKNWLPGPCYRQQRLSKQANDNNNSNFPWTAATKYHLNGRDSLVNPGPAMASHKDDEEKFFPMHGTLIFGKQGTNANDADLEHVMITDEEEIRTTNPVATEQYGNVSNNLQNSNTGPTTEDVNHQGALPGMVWQDRDVYLQGPIWAKIPHTDGHFHPSPLMGGFGLKHPPPQIMIKNTPVPANPPTNFSAAKFASFITQYSTGQVSVEIEWELQKENSKRWNPEIQYTSNYNKSVNVDFTVDANGVYSEPRPIGTRYLTRNL

SEQ ID NO: 2751 - protein, 735 aa, Artificial Sequence
  Description of Artificial Sequence: Synthetic polypeptide
MAADGYLPDWLEDTLSEGIRQWWKLKPGPPPPRPAERHQDDSRGLVLPGYKYLGPFNGLDKGEPVNEADAAALEHDKAYDRQLDSGDNPYLKYNHADAEFQERLKEDTSFGGNLGRAVFQAKKRVLEPLGLVEEPVKTAPGKKRPVEHSPAEPDSSSGTGKAGQQPARKRLNFGQTGDADSVPDPRPLGQPPAAPTSLGSTTMATGSGAPMADNNEGADGVGNSSGNWHCDSQWLGDRVITTSTRTWALPTYNNHLYKQISSQSGASNDNHYFGYSTPWGYFDFNRFHCHFSPRDWQRLINNNWGFRPKRLNFKLFNIQVKEVTQNDGTTTIANNLTSTVQVFTDSEYQLPYVLGSAHQGCLPPFPADVFMVPQYGYLTLNNGSQAVGRSSFYCLEYFPSQMLRTGNNFTFSYTFEDVPFHSSYAHSQSLDRLMNPLIDQYLYYLNRTQSNSGTLQQSRLLFSQAGPTSMSLQAKNWLPGPCYRQQRLSKQANDNNNSNFPWTAATKYHLNGRDSLVNPGPAMASHKDDEEKFFPMHGTLIFGKQGTNANDADLEHVMITDEEEIRTTDPVATEQYGNVSNNLQNSNTGPTTENVNHQGALPGMVWQDRDVYLQGPIWAKIPHTDGHFHPSPLMGGFGLKHPPPQIMIKNTPVPANPPTNFSAAKFASFITQYSTGQVSVEIEWELQKENSKRWNPEIQYTSNYNKSVNVDFTVDANGVYSEPRPIGTRYLTRNL

SEQ ID NO: 2752 - protein, 735 aa, Artificial Sequence
  Description of Artificial Sequence: Synthetic polypeptide
MAADGYLPDWLEDTLSEGIRQWWKLKPGPPPPRPAERHQDDSRGLVLPGYKYLGPFNGLDKGEPVNEADAAALEHDKAYDRQLDSGDNPYLKYNHADAEFQERLKEDTSFGGNLGRAVFQAKKRVLEPLGLVEEPVKTAPGKKRPVEHSPAEPDSSSGTGKAGQQPARKRLNFGQTGDADSVPDPQPLGQPPAAPTSLGSTTMATGSGAPMADNNEGADGVGNSSGNWHCDSQWLGDRVITTSTRTWALPTYNNHLYKQISSQSGASNDNHYFGYSTPWGYFDFNRFHCHFSPRDWQRLINNNWGFRPKRLNFKLFNIQVKEVTQNDGTTTIANNLTSTVQVFTDSEYQLPYVLGSAHQGCLPPFPADVFMVPQYGYLTLNNGSQAVGRSSFYCLEYFPSQMLRTGNNFTFSYTFEDVPFHSSYAHSQSLDRLMNPLIDQYLYYLNRTQSNSGTLQQSRLLFSQAGPTSMSLQAKNWLPGPCYRQQRLSKQANDNNNSNFPWTAATKYHLNGRDSLVNPGPAMASHKDDEEKFFPMHGTLIFGKQGTNANDADLEHVMITDEEEIRTTNPVATEQYGNVSNNLQNSNTGPTTGNVNHQGALPGMVWQDRDVYLQGPIWAKIPHTDGHFHPSPLMGGFGLKHPPPQIMIKNTPVPANPPTNFSAAKFASFITQYSTGQVSVEIEWELQKENSKRWNPEIQYTSNYNKSVNVDFTVDANGVYSEPRPIGTRYLTRNL

SEQ ID NO: 2753 - protein, 735 aa, Artificial Sequence
  Description of Artificial Sequence: Synthetic polypeptide
MAADGYLPDWLEDTLSEGIRQWWKLKPGPPPPRPAERHQDDSRGLVLPGYKYLGPFNGLDKGEPVNEADAAALEHDKAYDRQLDSGDNPYLKYNHADAEFQERLKEDTSFGGNLGRAVFQAKKRVLEPLGLVEEPVKTAPGKKRPVEHSPAEPDSSSGTGKAGQQPARKRLNFGQTGDADSVPDPQPLGQPPAAPTSLGSTTMATGSGAPMADNNEGADGVGNSSGDWHCDSQWLGDRVITTSTRTWALPTYNNHLYKQISSQSGASNDNHYFGYSTPWGYFDFNRFHCHFSPRDWQRLINNNWGFRPKRLNFKLFNIQVKEVTQNDGTTTIANNLTSTVQVFTDSEYQLPYVLGSAHQGCLPPFPADVFMVPQYGYLTLNNGSQAVGRSSFYCLEYFPSQMLRTGNNFTFSYTFEDVPFHSSYAHSQSLDRLMNPLIDQYLYYLNRTQSNSGTLQQSRLLFSQAGPTSMSLQAKNWLPGPCYRQQRLSKQANDNNNSNFPWTAATKYHLNGRDSLVNPGPAMASHKDDEEKFFPMHGTLIFGKQGTNANDADLEHVMITDEEEIRTTNPVATEQYGNVSNSLQNSNTGPTTENVNHQGALPGMVWQDRDVYLQGPIWAKIPHTDGHFHPSPLMGGFGLKHPPPQIMIKNTPVPANPPTNFSAAKFASFITQYSTGQVSVEIEWELQKENSKRWNPEIQYTSNYNKSVNVDFTVDANGVYSEPRPIGTRYLTRNL

SEQ ID NO: 2754 - protein, 735 aa, Artificial Sequence
  Description of Artificial Sequence: Synthetic polypeptide
MAADGYLPDWLEDILSEGIRQWWKLKPGPPPPKPAERHKDDSRGLVLPGYKYLGPFNGLDKGEPVNEADAAALEHDKAYDRQLDSGDNPYLKYNHADAEFQERLKEDTSFGGNLGRAVFQAKKRVLEPLGLVEEPVKTTPGKKRPVEQSPAEPDSSSGTGKAGNQPARKRLNFGQTGDADSVPDPQPLGQPPAAPSGLGSTTMATGSGAPMADNNEGADGVGNSSGNWHCDSQWLGDRVITTSTRTWALPTYNNHLYKQISSQSGASNDNHYFGYSTPWGYFDFNRFHCHFSPRDWQRLINNNWGFRPKRLNFKLFNIQVKEVTQNDGTTTIANNLTSTVQVFTDSEYQLPYVLGSAHQGCLPPFPADVFMVPQYGYLTLNNGSQAVGRSSFYCLEYFPSQMLRTGNNFTFSYTFEDVPFHSSYAHSQSLDRLMNPLIDQYLYYLNKTQSNSGTLQQSRLLFSQAGPTSMSLQAKNWLPGPCYRQQRLSKQANDNNNSNFPWTAATKYHLNGRDSLVNPGPAMASHKDDEEKFFPMHGTLIFGKQGTNANDADLDNVMITDEEEIRTTNPVATEQYGTVSNNLQNSNTGPTTGTVNHQGALPGMVWQDRDVYLQGPIWAKIPHTDGHFHPSPLMGGFGLKHPPPQIMIKNTPVPANPPTNFSSAKFASFITQYSTGQVSVEIEWELQKENSKRWNPEIQYTSNYNKSVNVDFTVDTNGVYSEPRPIGTRYLTRNL

SEQ ID NO: 2755 - protein, 735 aa, Artificial Sequence
  Description of Artificial Sequence: Synthetic polypeptide
MAADGYLPDWLEDILSEGIRQWWKLKPGPPPPKPAERHKDDSRGLVLPGYKYLGPFNGLDKGEPVNEADAAALEHDKAYDRQLDSGDNPYLKYNHADAEFQERLKEDTSFGGNLGRAVFQAKKRVLEPLGLVEEPVKTAPGKKRPVEQSPAEPDSSSGTGKAGNQPARKRLNFGQTGDADSVPDPQPLGQPPAAPSGLGSTTMATGSGAPMADNNEGADGVGNSSGNWHCDSQWLGDRVITTSTRTWALPTYNNHLYKQISSQSGASNDNHYFGYSTPWGYFDFNRFHCHFSPRDWQRLINNNWGFRPKRLNFKLFNIQVKEVTQNDGTTTIANNLTSTVQVFTDSEYQLPYVLGSAHQGCLPPFPADVFMVPQYGYLTLNNGSQAVGRSSFYCLEYFPSQMLRTGNNFTFSYTFEDVPFHSSYAHSQSLDRLMNPLIDQYLYYLNKTQSNSGTLQQSRLLFSQAGPTSMSLQAKNWLPGPCYRQQRLSKQANDNNNSNFPWTAATKYHLNGRDSLVNPGPAMASHKDDEEKFFPMHGTLIFGKQGTNANDADLDNVMITDEEEIRTTNPVATEQYGTVSNNLQNSNTGPTTGTVNHQGALPGMVWQDRDVYLQGPIWAKIPHTDGHFHPSPLMGGFGLKHPPPQIMIKNTPVPANPPTNFSSAKFASFITQYSTGQVSVEIEWELQKENSKRWNPEIQYTSNYNKSVNVDFTVDTNGVYSEPRPIGTRYLTRNL

SEQ ID NO: 2756 - protein, 735 aa, Artificial Sequence
  Description of Artificial Sequence: Synthetic polypeptide
MAADGYLPDWLEDILSEGIRQWWKLKPGPPPPKPAERHKDDSRGLVLPGYKYLGPFNGLDKGEPVNEADAAALEHDKAYDRQLDSGDNPYLKYNHADAEFQERLKEDTSFGGNLGRAVFQAKKRVLEPLGLVEEPVKTAPGKKRPVEQSPAEPDSSSGTGKAGNQPARKRLNFGQTGDADSVPDPQPLGQPPAAPSGLGSTTMATGSGAPMADNNEGADGVGNSSGNWHCDSQWLGDRVITTSTRTWALPTYNNHLYKQISSQSGASNDNHYFGYSTPWGYFDFNRFHCHFSPRDWQRLINNNWGFRPKRLNFKLFNIQVKEVTQNDGTTTIANNLTSTVQVFTDSEYQLPYVLGSAHQGCLPPFPADVFMVPQYGYLTLNNGSQAVGRSSFYCLEYFPSQMLRTGNNFTFSYTFEDVPFHSGYAHSQSLDRLMNPLIDQYLYYLNKTQSNSGTLQQSRLLFSQAGPTSMSLQAKNWLPGPCYRQQRLSKQANDNNNSNFPWTAATKYHLNGRDSLVNPGPAMASHKDDEEKFFPMHGTLIFGKQGTNANDADLDNVMITDEEEIRTTNPVATEQYGTVSNNLQNSNTGPTTGTVNHQGALPGMVWQDRDVYLQGPIWAKIPHTDGHFHPSPLMGGFGLKHPPPQIMIKNTPVPANPPTNFSSAKFASFITQYSTGQVSVEIEWELQKENSKRWNPEIQYTSNYNKSVNVDFTVDTNGVYSEPRPIGTRYLTRNL

SEQ ID NO: 2757 - protein, 734 aa, Artificial Sequence
  Description of Artificial Sequence: Synthetic polypeptide
MAADGYLPDWLEDILSEGIRQWWKLKPGPPPKPAERHKDDSRGLVLPGYKYLGPFNGLDKGEPVNEADAAALEHDKAYDRQLDSGDNPYLKYNHADAEFQERLKEDTSFGGNLGRAVFQAKKRVLEPLGLVEEPVKTAPGKKRPVEQSPAEPDSSSGTGKAGNQPARKRLNFGQTGDADSVPDPQPLGQPPAAPSGLGSTTMATGSGAPMADNNEGADGVGNSSGNWHCDSQWLGDRVITTSTRTWALPTYNNHLYKQISSQSGASNDNHYFGYSTPWGYFDFNRFHCHFSPRDWQRLINNNWGFRPKRLNFKLFNIQVKEVTQNDGTTTIANNLTSTVQVFTDSEYQLPYVLGSAHQGCLPPFPADVFMVPQYGYLTLNNGSQAVGRSSFYCLEYFPSQMLRTGNNFTFSYTFEDVPFHSSYAHSQSLDRLMNPLIDQYLYYLNKTQSNSGTLQQSRLLFSQAGPTSMSLQAKNWLPGPCYRQQRLSKQANDNNNSNFPWTAATKYHLNGRDSLVNPGPAMASHKDDEEKFFPMHGTLIFGKQGTNANDADLDNVMITDEEEIRTTNPVATEQYGTVSNNLQNSNTGPTTGTVNHQGALPGMVWQDRDVYLQGPIWAKIPHTDGHFHPSPLMGGFGLKHPPPQIMIKNTPVPANPPTNFSSAKFASFITQYSTGQVSVEIEWELQKENSKRWNPEIQYTSNYNKSVNVDFTVDTNGVYSEPRPIGTRYLTRNL

SEQ ID NO: 2758 - protein, 735 aa, Artificial Sequence
  Description of Artificial Sequence: Synthetic polypeptide
MAADGYLPDWLEDTLSEGIRQWWKLKPGPPPPRPAERHQDDSRGLVLPGYKYLGPFNGLDKGEPVNEADAAALEHDKAYDRQLDSGDNPYLKYNHADAEFQERLKEDTSFGGNLGRAVFQAKKRVLEPLGLVEEPVKTAPGKKRPVEHSPAEPDSSSGTGKAGQQPARKRLNFGQTGDADSVPDPQPLGQPPAAPTSLGSTTMATGSGAPMADNNEGADGVGNSSGNWHCDSQWLGDRVITTSTRTWALPTYNNHLYKQISSQSGASNDNHYFGYSTPWGYFDFNRFHCHFSPRDWQRLINNNWGFRPKRLNFKLFNIQVKEVTQNDGTTTIANNLTSTVQVFTDSEYQLPYVLGSAHQGCLPPFPADVFMVPQYGYLTLNNGSQAVGHSSSYCLEYFPSQMLRTGNNFTFSYTFEDVPFHSSYAHSQSLDRLMNPLIDQYLYYLNRTQSNSGTLQQSRLLFSQAGPTSMSLQAKNWLPGPCYRQQRLSKQANDNNNSNFPWTAATKYHLNGRDSLVNPGPAMASHKDDEEKFFPMHGTLIFGKQGTNANDADLEHVMITDEEEIRTTNPVATEQYGNVSNNLQNSNTGPTTENVNHQGALPGMVWQDRDVYLQGPIWAKIPHTDGHFHPSPLMGGFGLKHPPPQIMIKNTPVPANPPTNFSAAKFASFITQYSTGQVSVEIEWELQKENSKRWNPEIQYTSNYNKSVNVDFTVDTNGVYSEPRPIGTRYLTRNL

SEQ ID NO: 2759 - protein, 735 aa, Artificial Sequence
  Description of Artificial Sequence: Synthetic polypeptide
MAADGYLPDWLEDTLSEGIRQWWKLKPGPPPPKPAERHQDDSRGLVLPGHKYLGPFNGLDKGEPVNEADAAALEHDKAYDRQLDSGDNPYLKYNHADAEFQERLKEDTSFGGNLGRAVFQAKKRVLEPLGLVEEPVKTAPGKKRPVEHSPAEPDSSSGTGKAGQQPARKRLNFGQTGDADSVPDPQPLGQPPAAPTSLGSTTMATGSGAPMADNNEGADGVGNSSGNWHCDSQWLGDRVITTSTRTWALPTYNNHLYKQISSQSGASNDNHYFGYSTPWGYFDFNRFHCHFSPRDWQRLINNNWGFRPKRLNFKLFNIQVKEVTQNDGTTTIANNLTSTVQVFTDSEYQLPYVLGSAHQGCLPPFPADVFMVPQYGYLTLNNGSQAVGRSSFYCLEYFPSQMLRTGNNFTFSYTFEDVPFHSSYAHSQSLDRLMNPLIDQYLYYLNRTQSNSGTLQQSRLLFSQAGPTSMSLQAKNWLPGPCYRQQRLSKQANDNNNSNFPWTAATKYHLNGRDSLVNPGPAMASHKDDEEKFFPMHGTLIFGKQGTNANDADLEHVMITDEEEIRTTNPVATEQYGNVSNNLQNSNTGPTTENVNHQGALPGMVWQDRDVYLQGPIWAKIPHTDGHFHPSPLMGGFGLKHPPPQIMIKNTPVPANPPTNFSAAKFASFITQYSTGQVSVEIEWELQKENSKRWNPEIQYTSNYNKSVNVDFTVDANGVYSEPRPIGTRYLTRNL

SEQ ID NO: 2760 - protein, 735 aa, Artificial Sequence
  Description of Artificial Sequence: Synthetic polypeptide
MAADGYLPDWLEDTLSEGIRQWWKLKPGPPPPKPAERHKDDSRGLVLPGYKYLGPFNGLDKGEPVNEADAAALEHDKAYDRQLDSGDNPYLKYNHADAEFQERLKEDTSFGGNLGRAVFQAKKRVLEPLGLVEEPVKTAPGKKRPVEHSPAEPDSSSGTGKAGQQPARKRLNFGQTGDADSVPDPQPLGQPPAAPTSLGSTTMATGSGAPMADNNEGADGVGNSSGNWHCDSQWLGDRVITTSTRTWALPTYNNHLYKQISSQSGASNDNHYFGYSTPWGYFDFNRFHCHFSPRDWQRLINNNWGFRPKRLNFKLFNIQVKEVTQNDGTTTIANNLTSTVQVFTDSEYQLPYVLGSAHQGCLPPFPADVFMVPQYGYLTLNNGSQAVGRSSFYCLEYFPSQMLRTGNNFTFSYTFEDVPFHSSYAHSQSLDRLMNPLIDQYLYYLNRTQSNSGTLQQSRLLFSQAGPTSMSLQAKNWLPGPCYRQQRLSKQANDNNNSNFPWTAATKYHLNGRDSLVNPGPAMASHKDDEEKFFPMHGTLIFGKQGTNANDADLEHVMITDEEEIRTTNPVATEQYGNVSNNLQNSNTGPTTENVNHQGALPGMVWQDRDVYLQGPIWAKIPHTDGHFHPSPLMGGFGLKHPPPQIMIKNTPVPANPPTNFSAAKFASFITQYSTGQVSVEIEWELQKENSKRWNPEIQYTSNYNKSVNVDFTVDANGVYSEPRPIGTRYLTRNL

SEQ ID NO: 2761 - protein, 735 aa, Artificial Sequence
  Description of Artificial Sequence: Synthetic polypeptide
MAADGYLPDWLEDTLSEGIRQWWKLKPGPPPPRPAERHQDDSRGLVLPGYKYLGPFNGLDKGEPVNEADAAALEHDKAYDRQLDSGDNPYLKYNHADAEFQERLKEDTSFGGNLGRAVFQAKKRVLEPLGLVEEPVKTAPGKKRPVEHSPAEPDSSSGTGKAGQQPARKRLNFGQTGDADSVPDPQPLGQPPAAPTSLGSTTMATGSGAPMADNNEGADGVGNSSGNWHCDSQWLGDRVITTSTRTWALPTYNNHLYKQISSQSGASNDNHYFGYSTPWGYFDFNRFHCHFSPRDWQRLINNNWGFRPKRLNFKLFNIQVKEVTQNDGTTTIANNLTSTVQVFTDSEYQLPYVLGSAHQGCLPPFPADVFMVPQYGYLTLNNGSQAVGRSSSYCLEYFPSQMLRTGNNFTFSYTFEDVPFHSSYAHSQSLDRLMNPLIDQYLYYLNRTQSNSGTLQQSRLLFSQAGPTSMSLQAKNWLPGPCYRQQRLSKQANDNNNSNFPWTAATKYHLNGRDSLVNPGPAMASHKDDEEKFFPMHGTLIFGKQGTNANDADLEHVMITDEEEIRTTNPVATEQYGNVSNNLQNSNTGPTTENVNHQGALPGMVWQDRDVYLQGPIWAKIPHTDGHFHPSPLMGGFGLKHPPPQIMIKNTPVPANPPTNFSAAKFASFITQYSTGQVSVEIEWELQKENSKRWNPEIQYTSNYNKSVNVDFTVDANGVYSEPRPIGTRYLTRNL

SEQ ID NO: 2762 - protein, 735 aa, Artificial Sequence
  Description of Artificial Sequence: Synthetic polypeptide
MAADGYLPDWLEDTLSEGIRQWWKLKPGPPPPRPAERHQDDSRGLVLPGYKYLGPFNGLDKGEPVNEADAAALEHDKAYDRQLDSGDNPYLKYNHADAEFQERLKEDTSFGGNLGRAVFQAKKRVLEPLGLVEEPVKTAPGKKRPVEHSPAEPDSSSGTGKAGQQPARKRLNFGQTGDADSVPDPQPLGQPPAAPTSLGSTTMATGSGAPMADNNEGADGVGNSSGNWHCDSQWLGDRVITTSTRTWALPTYNNHLYKQISSQSGASNDNHYFGYSTPWGYFDFNRFHCHFSPRDWQRLINNNWGFRPKRLNFKLFNIQVKEVTQNDGTTTIANNLTSTVQVFTDSEYQLPYVLGSAHQGCLPPFPADVFMVPQYGYLTLNNGSQAVGRSSFYCLEYFPSQMLRTGNNFTFSYTFEDVPFHSSYAHSQSLDRLMNPLIDQYLYYPNRTQSNSGTLQQSRLLFSQAGPTSMSLQAKNWLPGPCYRQQRLSKQANDNNNSNFPWTAATKYHLNGRDSLVNPGPAMASHKDDEEKFFPMHGTLIFGKQGTNANDADLEHVMITDEEEIRTTNPVATEQYGNVSNNLQNSNTGPTTENVNHQGALPGMVWQDRDVYLQGPIWAKIPHTDGHFHPSPLMGGFGLKHPPPQIMIKNTPVPANPPTNFSAAKFASFITQYSTGQVSVEIEWELQKENSKRWNPEIQYTSNYNKSVNVDFTVDANGVYSEPRPIGTRYLTRNL

SEQ ID NO: 2763 - protein, 735 aa, Artificial Sequence
  Description of Artificial Sequence: Synthetic polypeptide
MAADGYLPDWLEDTLSEGIRQWWKLKPGPPPPRPAERHQDDSRGLVLPGYKYLGPFNGLDKGEPVNEADAAALEHDKAYDRQLDSGDNPYLKYNHADAEFQERLKEDTSFGGNLGRAVFQAKKRVLEPLGLVEEPVKTAPGKKRPVEHSPAEPDSSSGTGKAGQQPARKRLNFGQTGDADSVPDPQPLGQPPAAPTSLGSTTMATGSGAPMADNNEGADGVGNSSGNWHCDSQWLGDRVITTSTRTWALPTYNNHLYKQISSQSGASNDNHYFGYSTPWGYFDFNRFHCHFSPRDWQRLINNNWGFRPKRLNFKLFNIQVKEVTQNDGTTTIANNLTSTVQVFTDSEYQLPYVLGSAHQGCLPPFPADVFMVPQYGYLTLNNGSQAVGRSSFYCLEYFPSQMLRTGNNFTFSYTFEDVPFHSSYAHSQSLDRLMNPLIDQYLYYLNKTQSNSGTLQQSRLLFSQAGPTSMSLQAKNWLPGPCYRQQRLSKQANDNNNSNFPWTAATKYHLNGRDSLVNPGPAMASHKDDEEKFFPMHGTLIFGKQGTNANDADLDNVMITDEEEIRTTNPVATEQYGTVSNNLQNSNTGPTTGTVNHQGALPGMVWQDRDVYLQGPIWAKIPHTDGHFHPSPLMGGFGLKHPPPQIMIKNTPVPANPPTNFSSAKFASFITQYSTGQVSVEIEWELQKENSKRWNPEIQYTSNYNKSVNVDFTVDTNGVYSEPRPIGTRYLTRNL

SEQ ID NO: 2764 - protein, 735 aa, Artificial Sequence
  Description of Artificial Sequence: Synthetic polypeptide
MAADGYLPDWLEDTLSEGIRQWWKLKPGPPPPKPAERHQDDSRGLVLPGHKYLGPFNGLDKGEPVNEADAAALEHDKAYDRQLDSGDNPYLKYNHADAEFQERLKEDTSFGGNLGRAVFQAKKRVLEPLGLVEEPVKTAPGKKRPVEHSPAEPDSSSGTGKAGQQPARKRLNFGQTGDADSVPDPQPLGQPPAAPTSLGSTTMATGSGAPMADNNEGADGVGNSSGNWHCDSQWLGDRVITTSTRTWALPTYNNHLYKQISSQSGASNDNHYFGYSTPWGYFDFNRFHCHFSPRDWQRLINNNWGFRPKRLNFKLFNIQVKEVTQNDGTTTIANNLTSTVQVFTDSEYQLPYVLGSAHQGCLPPFPADVFMVPQYGYLTLNNGSQAVGHSSSYCLEYFPSQMLRTGNNFTFSYTFEDVPFHSSYAHSQSLDRLMNPLIDQYLYYLNRTQSNSGTLQQSRLLFSQAGPTSMSLQAKNWLPGPCYRQQRLSKQANDNNNSNFPWTAATKYHLNGRDSLVNPGPAMASHKDDEEKFFPMHGTLIFGKQGTNANDADLEHVMITDEEEIRTTNPVATEQYGNVSNNLQNSNTGPTTENVNHQGALPGMVWQDRDVYLQGPIWAKIPHTDGHFHPSPLMGGFGLKHPPPQIMIKNTPVPANPPTNFSAAKFASFITQYSTGQVSVEIEWELQKENSKRWNPEIQYTSNYNKSVNVDFTVDTNGVYSEPRPIGTRYLTRNL

SEQ ID NO: 2765 - protein, 735 aa, Artificial Sequence
  Description of Artificial Sequence: Synthetic polypeptide
MAADGYLPDWLEDTLSEGIRQWWKLKPGPPPPRPAERHQDDSRGLVLPGYKYLGPFNGLDKGEPVNEVDAAALEHDKAYDRQLDSGDNPYLKYNHADAEFQERLKEDTSFGGNLGRAVFQAKKRVLEPLGLVEEPVKTAPGKKRPVEHSPAEPDSSSGTGKAGQQPARKRLNFGQTGDADSVPDPQPLGQPPAAPTSLGSTTMATGSGAPMADNNEGADGVGNSSGNWHCDSQWLGDRVITTSTRTWALPTYNNHLYKQISSQSGASNDNHYFGYSTPWGYFDFNRFHCHFSPRDWQRLINNNWGFRPKRLNFKLFNIQVKEVTQSDGTTTIANNLTSTVQVFTDSEYQLPYVLGSAHQGCLPPFPADVFMVPQYGYLTLNNGSQAVGRSSFYCLEYFPSQMLRTGNNFTFSYTFEDVPFHSSYAHSQSLDRLMNPLIDQYLYYLNRTQSNSGTLQQSRLLFSQAGPTSMSLQAKNWLPGPCYRQQRLSKQANDNNNSNFPWTAATKYHLNGRDSLVNPGPAMASHKDDEEKFFPMHGTLIFGKQGTNANDADLEHVMITDEEEIRTTNPVATEQYGNVSNNLQNSNTGPTTENVNHQGALPGMVWQDRDVYLQGPIWAKIPHTDGHFHPSPLMGGFGLKHPPPQIMIKNTPVPANPPTNFSAAKFASFITQYSTGQVSVEIEWELQKENSKRWNPEIQYTSNYNKSVNVDFTVDANGVYSEPRPIGTRYLTRNL

SEQ ID NO: 2766 - protein, 735 aa, Artificial Sequence
  Description of Artificial Sequence: Synthetic polypeptide
MAADGYLPDWLEDTLSEGIRQWWKLKPGPPPPRPAERHQDDSRGLVLPGYKYLGPFNGLDKGEPVNEADAAALEHDKAYDRQLDSGDNPYLKYNHADAEFQERLKEDTSFGGNLGRAVFQAKKRVLEPLGLVEEPVKTAPGKKRPVEHSPAEPDSSSGTGKAGQQPARKRLNFGQTGDADSVPDPQPLGQPPAAPTSLGSTTMATGSGAPMADNNEGADGVGNSSGNWHCDSQWLGDRVITTSTRTWALPTYNNHLYKQISSQSGASNDNHYFGYSTPWGYFDFNRFHCHFSPRDWQRLINNNWGFRPKRLNFKLFNIQVKEVTQNDGTTTIANNLTSTVQVFTDSEYQLPYVLGSAHQGCLPPFPADVFMVPQYGYLTLNNGSQAVGRSSFYCLEYFPSQMLRTGNNFTFSYTFEDVPFHSSYAHSQSLDRLMNPLIDQYLYYLNRTQSNSGTLQQSRLLFSQAGPTSMSLQAKNWLPGPCYRQQRLSKQANDNNNSNFPWTAATKYHLNGRDSLVNPGPAMASHKDDEEKFFPMHGTLIFGKQGTNANDADLEHVMITDEEEIRTTNPVATEQYGNVSNNLQNSNTGPTTENVNHQGALPGMVWQDRDVYLQGPIWAKIPHTDGHFHPSPLMGGFGLKHPPPQIMIKNTPVPANPPTNFSAAKFASFITQYSTGQVSVEIEWELQKENSKRWNPEIQYTSNYNKSVNVDFTVDTNGVYSEPRPIGTRYLTRNL

SEQ ID NO: 2767 - protein, 735 aa, Artificial Sequence
  Description of Artificial Sequence: Synthetic polypeptide
MAADGYLPDWLEDTLSEGIRQWWKLKPGPPPPKPAERHQDDSRGLVLPGHKYLGPFNGLDKGEPVNEADAAALEHDKAYDRQLDSGDNPYLKYNHADAEFQERLKEDTSFGGNLGRAVFQAKKRVLEPLGLVEEPVKTAPGKKRPVEHSPAEPDSSSGTGKAGQQPARKRLNFGQTGDADSVPDPQPLGQPPAAPTSLGSTTMATGSGAPMADNNEGADGVGNSSGNWHCDSQWLGDRVITTSTRTWALPTYNNHLYKQISSQSGASNDNHYFGYSTPWGYFDFNRFHCHFSPRDWQRLINNNWGFRPKRLNFKLFNIQVKEVTQNDGTTTIANNLTSTVQVFTDSEYQLPYVLGSAHQGCLPPFPADVFMVPQYGYLTLNNGSQAVGHSSSYCLEYFPSQMLRTGNNFTFSYTFEDVPFHSSYAHSQSLDRLMNPLIDQYLYYLNRTQSNSGTLQQSRLLFSQAGPTSMSLQAKNWLPGPCYRQQRLSKQANDNNNSNFPWTAATKYHLNGRDSLVNPGPAMASHKDDEEKFFPMHGTLIFGKQGTNANDADLEHVMITDEEEIRTTNPVATEQYGNVSNNLQNSNTGPTTENVNHQGALPGMVWQDRDVYLQGPIWAKIPHTDGHFHPSPLMGGFGLKHPPPQIMIKNTPVPANPPTNFSAAKFASFITQYSTGQVSVEIEWELQKENSKRWNPEIQYTSNYNKSVNVDFTVDANGVYSEPRPIGTRYLTRNL

SEQ ID NO: 2768 - protein, 735 aa, Artificial Sequence
  Description of Artificial Sequence: Synthetic polypeptide
MAADGYLPDWLEDTLSEGIRQWWKLKPGPPPPRPAERHQDDSRGLVLPGYKYLGPFNGLDKGEPVNEADAAALEHDKAYDRQLDSGDNPYLKYNHADAEFQERLKEDTSFGGNLGRAVFQAKKRVLEPLGLVEEPVKTAPGKKRPVEHSPAEPDSSSGTGKAGQQPARKRLNFGQTGDADSVPDPQPLGQPPAAPTSLGSTTMATGSGAPMADNNEGADGVGNSSGNWHCDSQWLGDRVITTSTRTWALPTYNNHLYKQISSQSGASNDNHYFGYSTPWGYFDFNRFHCHFSPRDWQRLINNNWGFRPKRLNFKLFNIQVKEVTQNDGTTTIANNLTSTVQVFTDSEYQLPYVLGSAHQGCLPPFPADVFMVPQYGYLTLNNGSQAVGRSSFYCLEYFPSQMLRTGNNFTFSYTFEDVPFHSSYAHSQSLDRLMNPLIDQYLYYLNRTQSNSGTLQQSRLLFSQAGPTSMSLQAKNWLPGPCYRQQRLSKQANDNNNSNFPWTAATKYHLNGRDSLVNPGPAMASHKDDEEKFFPMHGTLIFGKQGTNANDADLEHVMITDEEEIRTTNPVATEQYGNVSNNLQNSNTGPTTENVNHQGALPGMVWQDRDVYLQGPIWAKIPHTDGHFHPSPLMGGFGLKHPPPQIMIKNTPVPANPPTNFSAAKFASFITQYSTGQASVEIEWELQKENSKRWNPEIQYTSNYNKSVNVDFTVDANGVYSEPRPIGTRYLTRNL

SEQ ID NO: 2769 - protein, 735 aa, Artificial Sequence
  Description of Artificial Sequence: Synthetic polypeptide
MAADGYLPDWLEDTLSEGIRQWWKLKPGPPPPKPAGRHKDDSRGLVLPGYKYLGPFNGLDKGEPVNEADAAALEHDKAYDRQLDSGDNPYLKYNHAGAEFQERLKEDTSFGGNLGRAVFQAKKRVLEPLGLVEEPVKTAPGKKRPVEHSPVEPDSSSGTGKAGQQPARKRLNFGQTGDADSVPDPQPLGQPPAAPTSLGSTTMATGSGAPMADNNEGADGVGNSSGNWHCDSQWLGDRVITTSTRTWALPTYNNHLYKQISSQSGAANDNHYFGYSTPWGYFDFNRFHCHFSPRDWQRLINNNWGFRPKRLNFKLFNIQVKEVTQNDGTTTIANNLTSTVQVFTDSEYQLPYVLGSAHQGCLPPFPADVFMVPQYGYLTLNNGSQAVGRSSFYCLEYFPSQMLRTGNNFTFSYTFEDVPFHSSYAHSQSLDRLMNPLIDQYLYYLNRTQSNSGTLQQSRLLFSQAGPTSMSLQAKNWLPGPCYRQQRLSKQANDNNNSNFPWTAATKYHLNGRDSLVNPGPAMASHKDDEEKFFPMHGTLIFGKQGTNANDADLEHVMITDEEEIRTTNPVATEQYGNVSNNLQNSNTGPTTENVNHQGALPGMVWQDRDVYLQGPIWAKIPHTDGHFHPSPLMGGFGLKHPPPQIMIKNTPVPANPPTNFSAAKFASFITQYSTGQVSVEIEWELQKENSKRWNPEIQYTSNYNKSVNVDFTVDANGVYSEPRPIGTRYLTRNL

SEQ ID NO: 2770 - protein, 735 aa, Artificial Sequence
  Description of Artificial Sequence: Synthetic polypeptide
MAADGYLPDWLEDTLSEGIRQWWKLKPGPPPPRPAERHQDDSRGLVLPGYKYLGPFNGLDKGEPVNEADAAALEHDKAYDRQLDSGDNPYLKYNHADAEFQERLKEDTSFGGNLGRAVFQAKKRVLEPLGLVEEPVKTAPGKKRPVEHSPAEPDSSSGTGKAGQQPARKRLNFGQTGDADSVPDPQPLGQPPAAPTSLGSTTMATGSGAPMADNNEGADGVGNSSGNWHCDSQWLGDRVITTSTRTWALPTYNNHLYKQISSQSGASNDNHYFGYSTPWGYFDFNRFHCHFSPRDWQRLINNNWGFRPKRLNFKLFNIQVKEVTQNDGTTTIANNLTSTVQVFTDSEYQLPYVLGSAHQGCLPPFPADVFMVPQYGYLTLNNGSQAVGRSSFYCLEYFPSQMLRTGNNFTFSYTFEDVPFHSSYAHSQSLDRLMNPLIDQYLYYLNRTQSNSGTLQQSRLLFSQAGPTSMSLQAKNWLPGPCYRQQRLSKQANDNNNSNFPWTAATKYHLNGRDSLVNPGPAMASHKDDEEKFFPMHGTLIFGKQGTNANDADLEHVMITDEEEIRTTNPVATEQYGNVSNNLQNSNTGPTTENVNHQGALPGMVWQDRDVYLQGPIWAKIPHTDGHFHPSPLMGGFGLKHPPPQIMIKNTPVPAYPPTNFSAAKFASFITQYSTRQVSVEIEWELQKENSKRWNPEIQYTSNYNKSVNVDFTVDANGVYSEPRPIGTRYLTRNL

SEQ ID NO: 2771 - protein, 735 aa, Artificial Sequence
  Description of Artificial Sequence: Synthetic polypeptide
MAADGYLPDWLEDTLSEGIRQWWKLKPGPPPPRPAERHQDDSRGLVLPGYKYLGPFNGLDKGEPVNEADAAALEHDKAYDRQLDSGDNPYLKYNHADAEFQERLKEDTSFGGNLGRAVFQAKKRVLEPLGLVEEPVKTAPGKKRPVEHSPAEPDSSSGTGKAGQQPARKRLNFGQTGDADSVPDPQPLGQPPAAPTSLGSTTMATGSGAPMADNNEGADGVGNSSGNWHCDSQWLGDRVITTSTRTWALPTYNNHLYKQISSQSGASNDNHYFGYSTPWGYFDFNRFHCHFSPRDWQRLINNNWGFRPKRLNFKLFNIQVKEVTQNDGTTTIANNLTSTVQVFTDSEYQLPYVLGSAHQGCLPPFPADVFMVPQYGYLTLNNGSQAVGRSSFYCLEYFPSQMLRTGNNFTFSYTFEDVPFHSSYAHSQSLDRLMNPLIDQYLYYLNRTQSNSGTLQQSRLLFSQAGPTSMSLQAKNWLPGPCYRQQRLSKQANDNNNSNFPWTAATKYHLNGRDSLVNPGPAMASHKDDEEKFFPMHGTLIFGKQGTNANDADLDNVMITDEEEIRTTNPVATEQYGTVSNNLQNSNTGPTTGTVNHQGALPGMVWQDRDVYLQGPIWAKIPHTDGHFHPSPLMGGFGLKHPPPQIMIKNTPVPANPPTNFSSAKFASFITQYSTGQVSVEIEWELQKENSKRWNPEIQYTSNYNKSVNVDFTVDTNGVYSEPRPIGTRYLTRNL

SEQ ID NO: 2772 - protein, 735 aa, Artificial Sequence
  Description of Artificial Sequence: Synthetic polypeptide
MAADGYLPDWLEDILSEGIRQWWKLKPGPPPPKPAERHKDDSRGLVLPGYKYLGPFNGLDKGEPVNEADAAALEHDKAYDRQLDSGDNPYLKYNHADAEFQERLKEDTSFGGNLGRAVFQAKKRVLEPLGLVEEPVKTAPGKKRPVEQSPAEPDSSSGTGKAGNQPARKRLNFGQTGDADSVPDPQPLGQPPAAPSGLGSTTMATGSGAPMADNNEGADGVGNSSGNWHCDSQWLGDRVITTSTRTWALPTYNNHLYKQISSQSGAANDNHYFGYSTPWGYFDFNRFHCHFSPRDWQRLINNNWGFRPKRLNFKLFNIQVKEVTQNDGTTTIANNLTSTVQVFTDSEYQLPYVLGSAHQGCLPPFPADVFMVPQYGYLTLNNGSQAVGRSSFYCLEYFPSQMLRTGNNFTFSYTFEDVPFHSSYAHSQSLDRLMNPLIDQYLYYLNKTQSNSGTLQQSRLLFSQAGPTSMSLQAKNWLPGPCYRQQRLSKQANDNNNSNFPWTAATKYHLNGRDSLVNPGPAMASHKDDEEKFFPMHGTLIFGKQGTNANDADLDNVMITDEEEIRTTNPVATEQYGTVSNNLQNSNTGPTTGTVNHQGALPGMVWQDRDVYLQGPIWAKIPHTDGHFHPSPLMGGFGLKHPPPQIMIKNTPVPANPPTNFSSAKFASFITQYSTGQVSVEIEWELQKENSKRWNPEIQYTSNYNKSVNVDFTVDTNGVYSEPRPIGTRYLTRNL

SEQ ID NO: 2773 - protein, 735 aa, Artificial Sequence
  Description of Artificial Sequence: Synthetic polypeptide
MAADGYLPDWLEDTLSEGIRQWWKLKPGPPPPRPAERHQDDSRGLVLPGYKYLGPFNGLDKGEPVNEADAAALEHDKAYDRQLDSGDNPYLKYNHAGAEFQERLKEDTSFGGNLGRAVFQAKKRVLEPLGLVEEPVKTAPGKKRPVEHSPVEPDSSSGTGKAGQQPARKRLNFGQTGDADSVPDPQPLGQPPAAPTSLGSTTMATGSGAPMADNNEGADGVGNSSGNWHCDSQWLGDRVITTSTRTWALPTYNNHLYKQISSQSGAANDNHYFGYSTPWGYFDFNRFHCHFSPRDWQRLINNNWGFRPKRLNFKLFNIQVKEVTQNDGTTTIANNLTSTVPVFTDSEYQLPYVLGSAHQGCLPPFPADVFMVPQYGYLTLNNGSQAVGRSSFYCLEYFPSQMLRTGNNFTFSYTFEDVPFHSSYAHSQSLDRLMNPLIDQYLYYLNKTQSNSGTLQQSRLLFSQAGPTSMSLQAKNWLPGPCYRQQRLSKQANDNNNSNFPWTAATKYHLNGRDSLVNPGPAMASHKDDEEKFFPMHGTLIFGKQGTNANDADLDNVMITDEEEIRTTNPVATEQYGTVSNNLQNSNTGPTTGTVNHQGALPGMVWQDRDVYLQGPIWAKIPHTDGHFHPSPLMGGFGLKHPPPQIMIKNTPVPANPPTNFSSAKFASFITQYSTGQVSVEIEWELQKENSKRWNPEIQYTSNYNKSVNVDFTVDTNGVYSEPRPIGTRYLTRNL

SEQ ID NO: 2774 - protein, 734 aa, Artificial Sequence
  Description of Artificial Sequence: Synthetic polypeptide
MAADGYLPDWLEDTLSEGIRQWWKLKPGPPPRPAERHQDDSRGLVLPGYKYLGPFNGLDKGEPVNEADAAALEHDKAYDRQLDSGDNPYLKYNHADAEFQERLKEDTSFGGNLGRAVFQAKKRVLEPLGLVEEPVKTAPGKKRPVEHSPAEPDSSSGTGKAGQQPARKRLNFGQTGDADSVPDPQPLGQPPAAPTSLGSTTMATGSGAPMADNNEGADGVGNSSGNWHCDSQWLGDRVITTSTRTWALPTYNNHLYKQISSQSGASNDNHYFGYSTPWGYFDFNRFHCHFSPRDWQRLINNNWGFRPKRLNFKLFNIQVKEVTQNDGTTTIANNLTSTVQVFTDSEYQLPYVLGSAHQGCLPPFPADVFMVPQYGYLTLNNGSQAVGRSSFYCLEYFPSQMLRTGNNFTFSYTFEDVPFHSSYAHSQSLDRLMNPLIDQYLYYLNRTQSNSGTLQQSRLLFSQAGPTSMSLQAKNWLPGPCYRQQRLSKQANDNNNSNFPWTAATKYHLNGRDSLVNPGPAMASHKDDEEKFFPMHGTLIFGKQGTNANDADLEHVMITDEEEIRTTNPVATEQYGNVSNNLQNSNTGPTTENVNHQGALPGMVWQDRDVYLQGPIWAKIPHTDGHFHPSPLMGGFGLKHPPPQIMIKNTPVPANPPTNFSAAKFASFITQYSTGQVSVEIEWELQKENSKRWNPEIQYTSNYNKSVNVDFTVDANGVYSEPRPIGTRYLTRNL

SEQ ID NO: 2775 - protein, 735 aa, Artificial Sequence
  Description of Artificial Sequence: Synthetic polypeptide
MAADGYLPDWLEDTLSEGIRQWWKLKPGPPPPKPAERHQDDSRGLVLPGHKYLGPFNGLDKGEPVNEADAAALEHDKAYDRQLDSGDNPYLKYNHADAEFQERLKEDTSFGGNLGRAVFQAKKRVLEPLGLVEEPVKTAPGKKRPVEHSPAEPDSSSGTGKAGQQPARKRLNFGQTGDADSVPDPQPLGQPPAAPTSLGSTTMATGSGAPMADNNEGADGVGNSSGNWHCDSQWLGDRVITTSTRTWALPTYNNHLYKQISSQSGASNDNHYFGYSTPWGYFDFNRFHCHFSPRDWQRLINNNWGFRPKRLNFKLFNIQVKEVTQNDGTTTIANNLTSTVQVFTDSEYQLPYVLGSAHQGCLPPFPADVFMVPQYGYLTLNNGSQAVGRSSFYCLEYFPSQMLRTGNNFTFSYTFEDVPFHSSYAHSQSLDRLMNPLIDQYLYYLNRTQSNSGTLQQSRLLFSQAGPTSMSLQAKNWLPGPCYRQQRLSKQANDNNNSNFPWTAATKYHLNGRDSLVNPGPAMASHKDDEEKFFPMHGTLIFGKQGTNANDADLEHVMITDEEEIRTTNPVATEQYGNVSNNLQNSNTGPTTENVNHQGALPGMVWQDRDVYLQGPIWAKIPHTDGHFHPSPLMGGFGLKHPPPQIMIKNTPVPANPPTNFSAAKFASFITQYSTGQVSVEIEWELQKENSKRWNPEIQYTSNYNKSVNVDFTVDTNGVYSEPRPIGTRYLTRNL

SEQ ID NO: 2776 - protein, 735 aa, Artificial Sequence
  Description of Artificial Sequence: Synthetic polypeptide
MAADGYLPDWLEDTLSEGIRQWWKLKPGPPPPRPAERHQDDSRGLVLPGYKYLGPFNGLDKGEPVNEADAAALEHDKAYDRQLDSGDNPYLKYNHADAEFQERLKEDTSFGGNLGRAVFQAKKRVLEPLGLVEEPVKTAPGKKRPVEHSPAEPDSSSGTGKAGQQPARKRLNFGQTGDADSVPDPQPLGQPPAAPTSLGSTTMATGSGAPMADNNEGADGVGNSSGNWHCDSQWLGDRVITTSTRTWALPTYNNHLYKQISSQSGASNDNHYFGYSTPWGYFDFNRFHCHFSPRDWQRLINNNWGFRPKRLNFKLFNIQVKEVTQNDGTTTIANNLTSTVQVFTDSEYQLPYVLGSAHQGCLPPFPADVFMVPQYGYLTLNNGSQAVGHSSSYCLEYFPSQMLRTGNNFTFSYTFEDVPFHSSYAHSQSLDRLMNPLIDQYLYYLNRTQSNSGTLQQSRLLFSQAGPTSMSLQAKNWLPGPCYRQQRLSKQANDNNNSNFPWTAATKYHLNGRDSLVNPGPAMASHKDDEEKFFPMHGTLIFGKQGTNANDADLEHVMITDEEEIRTTNPVATEQYGNVSNNLQNSNTGPTTENVNHQGALPGMVWQDRDVYLQGPIWAKIPHTDGHFHPSPLMGGFGLKHPPPQIMIKNTPVPANPPTNFSAAKFASFITQYSTGQVSVEIEWELQKENSKRWNPEIQYTSNYNKSVNVDFTVDANGVYSEPRPIGTRYLTRNL

SEQ ID NO: 2777 - protein, 735 aa, Artificial Sequence
  Description of Artificial Sequence: Synthetic polypeptide
MAADGYLPDWLEDTLSEGIRQWWKLKPGPPPPRPAERHQDDSRGLVLPGYKYLGPFNGLDKGEPVNEADAAALEHDKAYDRQLDSGDNPYLKYNHADAEFQERLKEDTSFGGNLGRAVFQAKKRVLEPLGLVEEPVKTAPGKKRPVEHSPAEPDSSSGTGKAGQQPARKRLNFGQTGDADSVPDPQPLGQPPAAPTSLGSTTMATGSGAPMADNNEGADGVGNSSGNWHCDSQWLGDRVITTSTRTRALPTYNNHLYKQISSQSGASNDNHYFGYSTPWGYFDFNRFHCHFSPRDWQRLTNNNWGFRPKRLNFKLFNIQVKEVTQNDGTTTIANNLTSTVQVFTDSEYQLPYVLGSAHQGCLPPFPADVFMVPQYGYLTLNNGSQAVGRSSFYCLEYFPSQMLRTGNNFTFSYTFEDVPFHSSYAHSQSLDRLMNPLIDQYLYYLNRTQSNSGTLQQSRLLFSQAGPTSMSLQAKNWLPGPCYRQQRLSKQANDNNNSNFPWTAATKYHLNGRDSLVNPGPAMASHKDDEEKFFPMHGTLIFGKQGTNANDADLEHVMITDEEEIRTTNPVATEQYGNVSNNLQNSNTGPTTENVNHQGALPGMVWQDRDVYLQGPIWAKIPHTDGHFHPSPLMGGFGLKHPPPQIMIKNTPVPANPPTNFSAAKFASFITQYSTGQVSVEIEWELQKENSKRWNPEIQYTSNYNKSVNVDFTVDANGVYSEPRPIGTRYLTRNL

SEQ ID NO: 2778 - protein, 735 aa, Artificial Sequence
  Description of Artificial Sequence: Synthetic polypeptide
MAADGYLPDWLEDTLSEGIRQWWKLKPGPPPPKPAERHKDDSRGLVLPGYKYLGPFNGLDKGEPVNEADAAALEHDKAYDRQLDSGDNPYLKYNHADAEFQERLKEDTSFGGNLARAVFQAKKRVLEPLGLVEEPVKTAPGKKRPVEHSPAGPDSSSGTGKSGQQPARKRLNFGQTGDADSVPDPQPLGQPPAAPSGLGTNTMASGSGAPMADNNEGADGVGNSSGNWHCDSTWMGDRVITTSTRTWALPTYNNHLYKQISSQSGAANDNHYFGYSTPWGYFDFNRFHCHFSPRDWQRLINNNWGFRPKRLNFKLFNIQVKEVTQNDGTTTIANNLTSTVQVFTDSEYQLPYVLGSAHQGCLPPFPADVFMVPQYGYLTLNNGSQAVGRSSFYCLEYFPSQMLRTGNNFTFSYTFEDVPFHSSYAHSQSLDRLMNPLIDQYLYYLNRTQSNSGTLQQSRLLFSQAGPTSMSLQAKNWLPGPCYRQQRLSKQANDNNNSNFPWTAATKYHLNGRDSLVNPGPAMASHKDDEEKFFPMHGTLIFGKQGTNANDADLEHVMITDEEEIRTTNPVATEQYGNVSNNLQNSNTGPTTENVNHQGALPGMVWQDRDVYLQGPIWAKIPHTDGHFHPSPLMGGFGLKHPPPQIMIKNTPVPANPPTNFSAAKFASFITQYSTGQVSVEIEWELQKENSKRWNPEIQYTSNYNKSVNVDFTVDANGVYSEPRPIGTRYLTRNL

SEQ ID NO: 2779 - protein, 734 aa, Artificial Sequence
  Description of Artificial Sequence: Synthetic polypeptide
MAADGYLPDWLEDTLSEGIRQWWKLKPGPPPPRPAERHQDDSRGLVLPGYKYLGPFNGLDKGEPVNEADAAALEHDKAYDRQLDSGDNPYLKYNHADAEFQERLKEDTSFGGNLGRAVFQAKKRVLEPLGLVEEPVKTAPGKKRPVEHSPAEPDSSSGTGKAGQQPARKRLNFGQTGDADSVPDPQPLGQPPAAPTSLGSTTMATGSGAPMADNNEGADGVGNSSGNWHCDSQWLGDRVITTSTRTWALPTYNNHLYKQISSQSGASNDNHYFGYSTPWGYFDFNRFHCHFSPRDWQRLINNNWGFRPKRLNFKLFNIQVKEVTQNDGTTTIANNLTSTVQVFTDSEYQLPYVLGSAHQGCLPPFPADVFMVPQYGYLTLNNGSQAVGRSSFYCLEYFPSQMLRTGNNFTFSYTFEDVPFHSSYAHSQSLDRLMNPLIDQYLYYLNRTQSNSGTLQQSRLLFSQAGPTSMSLQAKNWLPGPCYRQQRLSKQANDNNSNFPWTAATKYHLNGRDSLVNPGPAMASHKDDEEKFFPMHGTLIFGKQGTNANDADLEHVMITDEEEIRTTNPVATEQYGNVSNNLQNSNTGPTTENVNHQGALPGMVWQDRDVYLQGPIWAKIPHTDGHFHPSPLMGGFGLKHPPPQIMIKNTPVPANPPTNFSAAKFASFITQYSTGQVSVEIEWELQKENSKRWNPEIQYTSNYNKSVNVDFTVDANGVYSEPRPIGTRYLTRNL

SEQ ID NO: 2780 - protein, 735 aa, Artificial Sequence
  Description of Artificial Sequence: Synthetic polypeptide
MAADGYLPDWLEDTLSEGIRQWWKLKPGPPPPKPAERHKDDSRGLVLPGYKYLGPFNGLDKGEPVNEADAAALEHDKAYDRQLDSGDNPYLKYNHADAEFQERLKEDTSFGGNLARAVFQAKKRVLEPLGLVEEPVKTAPGKKRPVEHSPAGPDSSSGTGKSGQQPARKRLNFGQTGDADSVPDPQPLGQPPAAPTSLGSTTMATGSGAPMADNNEGADGVGNSSGNWHCDSQWLGDRVITTSTRTWALPTYNNHLYKQISSQSGASNDNHYFGYSTPWGYFDFNRFHCHFSPRDWQRLINNNWGFRPKRLNFKLFNIQVKEVTQNDGTTTIANNLTSTVQVFTDSEYQLPYVLGSAHQGCLPPFPADVFMVPQYGYLTLNNGSQAVGRSSFYCLEYFPSQMLRTGNNFTFSYTFEDVPFHSSYAHSQSLDRLMNPLIDQYLYYLNRTQSNSGTLQQSRLLFSQAGPTSMSLQAKNWLPGPCYRQQRLSKQANDNNNSNFPWTAATKYHLNGRDSLVNPGPAMASHKDDEEKFFPMHGTLIFGKQGTNANDADLEHVMITDEEEIRTTNPVATEQYGNVSNNLQNSNTGPTTENVNHQGALPGMVWQDRDVYLQGPIWAKIPHTDGHFHPSPLMGGFGLKHPPPQIMIKNTPVPANPPTNFSAAKFASFITQYSTGQVSVEIEWELQKENSKRWNPEIQYTSNYNKSVNVDFTVDANGVYSEPRPIGTRYLTRNL

SEQ ID NO: 2781 - protein, 735 aa, Artificial Sequence
  Description of Artificial Sequence: Synthetic polypeptide
MAADGYLPDWLEDTLSEGIRQWWKLKPGPPPPKPAGRHKDDSRGLVLPGYKYLGPFNGLDKGEPVNEADAAALEHDKAYDRQLDSGDNPYLKYNHAGAEFQERLKEDTSFGGNLGRAVFQAKKRVLEPLGLVEEPVKTAPGKKRPVEHSPVEPDSSSGTGKAGQQPARKRLNFGQTGDADSVPDPQPLGQPPAAPTSLGSTTMATGSGAPMADNNEGADGVGNSSGNWHCDSQWLGDRVITTSTRTWALPTYNNHLYKQISSQSGAANDNHYFGYSTPWGYFDFNRFHCHFSPRDWQRLINNNWGFRPKRLNFKLFNIQVKEVTQNDGTTTIANNLTSTVPVFTDSEYQLPYVLGSAHQGCLPPFPADVFMVPQYGYLTLNNGSQAVGRSSFYCLEYFPSQMLRTGNNFTFSYTFEDVPFHSSYAHSQSLDRLMNPLIDQYLYYLNKTQSNSGTLQQSRLLFSQAGPTSMSLQAKNWLPGPCYRQQRLSKQANDNNNSNFPWTAATKYHLNGRDSLVNPGPAMASHKDDEEKFFPMHGTLIFGKQGTNANDADLEHVMITDEEEIRTTNPVATEQYGNVSNNLQNSNTGPTTENVNHQGALPGMVWQDRDVYLQGPIWAKIPHTDGHFHPSPLMGGFGLKHPPPQIMIKNTPVPANPPTNFSAAKFASFITQYSTGQVSVEIEWELQKENSKRWNPEIQYTSNYNKSVNVDFTVDANGVYSEPRPIGTRYLTRNL

SEQ ID NO: 2782 - protein, 735 aa, Artificial Sequence
  Description of Artificial Sequence: Synthetic polypeptide
MAADGYLPDWLEDTLSEGIRQWWKLKPGPPPPKPAGRHKDDSRGLVLPGYKYLGPFNGLDKGEPVNEADAAALEHDKAYDRQLDSGDNPYLKYNHAGAEFQERLKEDTSFGGNLGRAVFQAKKRVLEPLGLVEEPVKTAPGKKRPVEHSPVEPDSSSGTGKAGQQPARKRLNFGQTGDADSVPDPQPLGQPPAAPTSLGSTTMATGSGAPMADNNEGADGVGNSSGNWHCDSQWLGDRVITTSTRTWALPTYNNHLYKQISSQSGAANDNHYFGYSTPWGYFDFNRFHCHFSPRDWQRLINNNWGFRPKRLNFKLFNIQVKEVTQNDGTTTIANNLTSTVPVFTDSEYQLPYVLGSAHQGCLPPFPADVFMVPQYGYLTLNNGSQAVGRSSFYCLEYFPSQMLRTGNNFTFSYTFEDVPFHSSYAHSQSLDRLMNPLIDQYLYYLNKTQSNSGTLQQSRLLFSQAGPTSMSLQAKNWLPGPCYRQQRLSKQANDNNNSNFPWTAATKYHLNGRDSLVNPGPAMASHKDDEEKFFPMHGTLIFGKQGTNANDADLDNVMITDEEEIRTTNPVATEQYGTVSNNLQNSNTGPTTGTVNHQGALPGMVWQDRDVYLQGPIWAKIPHTDGHFHPSPLMGGFGLKHPPPQIMIKNTPVPANPPTNFSAAKFASFITQYSTGQVSVEIEWELQKENSKRWNPEIQYTSNYNKSVNVDFTVDANGVYSEPRPIGTRYLTRNL

SEQ ID NO: 2783 - protein, 735 aa, Artificial Sequence
  Description of Artificial Sequence: Synthetic polypeptide
MAADGYLPDWLEDTLSEGIRQWWKLKPGPPPPRPAERHQDDSRGLVLPGYKYLGPFNGLDKGEPVNEADAAALEHDKAYDRQLDSGDNPYLKYNHADAEFQERLKEDTSFGGNLGRAVFQAKKRVLEPLGLVEEPVKTAPGKKRPVEHSPAEPDSSSGTGKAGQQPARKRLNFGQTGDADSVPDPQPLGQPPAAPTSLGSTTMATGSGAPMADNNEGADGVGNSSGNWHCDSQWLGDRVITTSTRTWALPTYNNHLYKQISSQSGASNDNHYFGYSTPWGYFDFNRFHCHFSPRDWQRLINNNWGFRPKRLNFKLFNIQVKEVTQNDGTTTIANNLTSTVQVFTDSEYQLPYVLGSAHQGCLPPFPADVFMVPQYGYLTLNNGSQAVGRSSFYCLEYFPSQMLRTGNNFTFSYTFEDVPFHSSYAHSQSLDRLMNPLIDQYLYYLNRTQSNSGTLQQSRLLFSQAGPTSMSLQAKNWLPGPCYRQQRLSKQANDNNNSNFPWTAATKYHLNGRDSLVNPGPAMASHKDDEEKFFPMHGTLIFGKQGTNANDADLEHVMITDEEEIRTTNPVATEQYGNVSNNLQNSNTGPTTENVNHQGALPGMVWQDRDVYLQGPIWAKIPHTDGHFHPSPLMGGFGLKHPPPQIMIKNTPVPANPPTNFSSAKFASFITQYSTGQVSVEIEWELQKENSKRWNPEIQYTSNYNKSVNVDFTVDTNGVYSEPRPIGTRYLTRNL

SEQ ID NO: 2784 - protein, 735 aa, Artificial Sequence
  Description of Artificial Sequence: Synthetic polypeptide
MAADGYLPDWLEDTLSEGIRQWWKLKPGPPPPKPAERHQDDSRGLVLPGYKYLGPFNGLDKGEPVNEADAAALEHDKAYDRQLDSGDNPYLKYNHADAEFQERLKEDTSFGGNLGRAVFQAKKRVLEPLGLVEEPVKTAPGKKRPVEHSPAEPDSSSGTGKAGQQPARKRLNFGQTGDADSVPDPQPLGQPPAAPTSLGSTTMATGSGAPMADNNEGADGVGNSSGNWHCDSQWLGDRVITTSTRTWALPTYNNHLYKQISSQSGAANDNHYFGYSTPWGYFDFNRFHCHFSPRDWQRLINNNWGFRPKRLNFKLFNIQVKEVTQNDGTTTIANNLTSTVPVFTDSEYQLPYVLGSAHQGCLPPFPADVFMVPQYGYLTLNNGSQAVGRSSFYCLEYFPSQMLRTGNNFTFSYTFEDVPFHSSYAHSQSLDRLMNPLIDQYLYYLNKTQSNSGTLQQSRLLFSQAGPTSMSLQAKNWLPGPCYRQQRLSKQANDNNNSNFPWTAATKYHLNGRDSLVNPGPAMASHKDDEEKFFPMHGTLIFGKQGTNANDADLDNVMITDEEEIRTTNPVATEQYGTVSNNLQNSNTGPTTGTVNHQGALPGMVWQDRDVYLQGPIWAKIPHTDGHFHPSPLMGGFGLKHPPPQIMIKNTPVPANPPTNFSSAKFASFITQYSTGQVSVEIEWELQKENSKRWNPEIQYTSNYNKSVNVDFTVDTNGVYSEPRPIGTRYLTRNL

SEQ ID NO: 2785 - protein, 735 aa, Artificial Sequence
  Description of Artificial Sequence: Synthetic polypeptide
MAADGYLPDWLEDTLSEGIRQWWKLKPGPPPPKPAERHKDDSRGLVLPGYKYLGPFNGLDKGEPVNEADAAALEHDKAYDRQLDSGDNPYLKYNHADAEFQERLKEDTSFGGNLARAVFQAKKRVLEPLGLVEEPVKTAPGKKRPVEHSPAGPDSSSGTGKSGQQPARKRLNFGQTGDADSVPDPQPLGQPPAAPSGLGTNTMASGSGAPMADNNEGADGVGNSSGNWHCDSTWMGDRVITTSTRTWALPTYNNHLYKQISSQSGAANDNHYFGYSTPWGYFDFNRFHCHFSPRDWQRLINNNWGFRPKRLNFELFNIQVKEVTQNDGTTTIANNLTSTVQVFTDSEYQLPYVLGSAHQGCLPPFPADVFMVPQYGYLTLNNGSQAVGRSSFYCLEYFPSQMLRTGNNFTFSYTFEDVPFHSSYAHSQSLDRLMNPLIDQYLYYLNRTQSNSGTLQQSRLLFSQAGPTSMSLQAKNWLPGPCYRQQRLSKQANDNNNSNFPWTAATKYHLNGRDSLVNPGPAMASHKDDEEKFFPMHGTLIFGKQGTNANDADLEHVMITDEEEIRTTNPVATEQYGNVSNNLQNSNTGPTTENVNHQGALPGMVWQDRDVYLQGPIWAKIPHTDGHFHPSPLMGGFGLKHPPPQIMIKNTPVPANPPTNFSAAKFASFITQYSTGQVSVEIEWELQKENSKRWNPEIQYTSNYNKSVNVDFTVDANGVYSEPRPIGTRYLTRNL

SEQ ID NO: 2786 - protein, 735 aa, Artificial Sequence
  Description of Artificial Sequence: Synthetic polypeptide
MAADGYLPDWLEDILSEGIRQWWKLKPGPPPPKPAERHKDDSRGLVLPGYKYLGPFNGLDKGEPVNEADAAALEHDKAYDRQLDSGDNPYLKYNHADAEFQERLKEDTSFGGNLGRAVFQAKKRVLEPLGLVEEPVKTAPGKKRPVEHSPAEPDSSSGTGKAGQQPARKRLNFGQTGDADSVPDPQPLGQPPAAPTSLGSTTMATGSGAPMADNNEGADGVGNSSGNWHCDSQWLGDRVITTSTRTWALPTYNNHLYKQISSQSGASNDNHYFGYSTPWGYFDFNRFHCHFSPRDWQRLINNNWGFRPKRLNFKLFNIQVKEVTQNDGTTTIANNLTSTVQVFTDSEYQLPYVLGSAHQGCLPPFPADVFMVPQYGYLTLNNGSQAVGRSSFYCLEYFPSQMLRTGNNFTFSYTFEDVPFHSSYAHSQSLDRLMNPLIDQYLYYLNRTQSNSGTLQQSRLLFSQAGPTSMSLQAKNWLPGPCYRQQRLSKQANDNNNSNFPWTAATKYHLNGRDSLVNPGPAMASHKDDEEKFFPMHGTLIFGKQGTNANDADLEHVMITDEEEIRTTNPVATEQYGNVSNNLQNSNTGPTTENVNHQGALPGMVWQDRDVYLQGPIWAKIPHTDGHFHPSPLMGGFGLKHPPPQIMIKNTPVPANPPTNFSAAKFASFITQYSTGQVSVEIEWELQKENSKRWNPEIQYTSNYNKSVNVDFTVDANGVYSEPRPIGTRYLTRNL

SEQ ID NO: 2787 - protein, 735 aa, Artificial Sequence
  Description of Artificial Sequence: Synthetic polypeptide
MAADGYLPDWLEDTLSEGIRQWWKLKPGPPPPRPAERHQDDSRGLVLPGYKYLGPFNGLDKGEPVNEADAAALEHDKAYDRQLDSGDNPYLKYNHADAEFQERLKEDTSFGGNLGRAVFQAKKRVLEPLGLVEEPVKTAPGKKRPVEHSPVEPDSSSGTGKAGQQPARKRLNFGQTGDADSVPDPQPLGQPPAAPTSLGSTTMATGSGAPMADNNEGADGVGNSSGNWHCDSQWLGDRVITTSTRTWALPTYNNHLYKQISSQSGAANDNHYFGYSTPWGYFDFNRFHCHFSPRDWQRLINNNWGFRPKRLNFKLFNIQVKEVTQNDGTTTIANNLTSTVPVFTDSEYQLPYVLGSAHQGCLPPFPADVFMVPQYGYLTLNNGSQAVGRSSFYCLEYFPSQMLRTGNNFTFSYTFEDVPFHSSYAHSQSLDRLMNPLIDQYLYYLNKTQSNSGTLQQSRLLFSQAGPTSMSLQAKNWLPGPCYRQQRLSKQANDNNNSNFPWTAATKYHLNGRDSLVNPGPAMASHKDDEEKFFPMHGTLIFGKQGTNANDADLDNVMITDEEEIRTTNPVATEQYGTVSNNLQNSNTGPTTGTVNHQGALPGMVWQDRDVYLQGPIWAKIPHTDGHFHPSPLMGGFGLKHPPPQIMIKNTPVPANPPTNFSSAKFASFITQYSTGQVSVEIEWELQKENSKRWNPEIQYTSNYNKSVNVDFTVDTNGVYSEPRPIGTRYLTRNL

SEQ ID NO: 2788 - protein, 735 aa, Artificial Sequence
  Description of Artificial Sequence: Synthetic polypeptide
MAADGYLPDWLEDTLSEGIRQWWKLKPGPPPPKPAERHKDDSRGLVLPGYKYLGPFNGLDKGEPVNEADAAALEHDKAYDRQLDSGDNPYLKYNHADAEFQERLKEDTSFGGNLARAVFQAKKRVLEPLGLVEEPVKTAPGKKRPVEHSPAEPDSSSGTGKAGQQPARKRLNFGQTGDADSVPDPQPLGQPPAAPTSLGSTTMATGSGAPMADNNEGADGVGNSSGNWHCDSQWLGDRVITTSTRTWALPTYNNHLYKQISSQSGASNDNHYFGYSTPWGYFDFNRFHCHFSPRDWQRLINNNWGFRPKRLNFKLFNIQVKEVTQNDGTTTIANNLTSTVQVFTDSEYQLPYVLGSAHQGCLPPFPADVFMVPQYGYLTLNNGSQAVGRSSFYCLEYFPSQMLRTGNNFTFSYTFEDVPFHSSYAHSQSLDRLMNPLIDQYLYYLNRTQSNSGTLQQSRLLFSQAGPTSMSLQAKNWLPGPCYRQQRLSKQANDNNNSNFPWTAATKYHLNGRDSLVNPGPAMASHKDDEEKFFPMHGTLIFGKQGTNANDADLEHVMITDEEEIRTTNPVATEQYGNVSNNLQNSNTGPTTENVNHQGALPGMVWQDRDVYLQGPIWAKIPHTDGHFHPSPLMGGFGLKHPPPQIMIKNTPVPANPPTNFSAAKFASFITQYSTGQVSVEIEWELQKENSKRWNPEIQYTSNYNKSVNVDFTVDANGVYSEPRPIGTRYLTRNL

SEQ ID NO: 2789 - protein, 735 aa, Artificial Sequence
  Description of Artificial Sequence: Synthetic polypeptide
MAADGYLPDWLEDTLSEGIRQWWKLKPGPPPPRPAERHQDDSRGLVLPGYKYLGPFNGLDKGEPVNEADAAALEHDKAYDRQLDSGDNPYLKYNHADAEFQERLKEDTSFGGNLGRAVFQAKKRVLEPLGLVEEPVKTAPGKKRPVEHSPAEPDSSSGTGKAGQQPARKRLNFGQTGDADSVPDPQPLGQPPAAPTSLGSTTMATGSGAPMADNNEGADGVGNSSGNWHCDSQWLGDRVITTSTRTWALPTYNNHLYKQISSQSGAANDNHYFGYSTPWGYFDFNRFHCHFSPRDWQRLINNNWGFRPKRLNFKLFNIQVKEVTQNDGTTTIANNLTSTVPVFTDSEYQLPYVLGSAHQGCLPPFPADVFMVPQYGYLTLNNGSQAVGRSSFYCLEYFPSQMLRTGNNFTFSYTFEDVPFHSSYAHSQSLDRLMNPLIDQYLYYLNKTQSNSGTLQQSRLLFSQAGPTSMSLQAKNWLPGPCYRQQRLSKQANDNNNSNFPWTAATKYHLNGRDSLVNPGPAMASHKDDEEKFFPMHGTLIFGKQGTNANDADLDNVMITDEEEIRTTNPVATEQYGTVSNNLQNSNTGPTTGTVNHQGALPGMVWQDRDVYLQGPIWAKIPHTDGHFHPSPLMGGFGLKHPPPQIMIKNTPVPANPPTNFSSAKFASFITQYSTGQVSVEIEWELQKENSKRWNPEIQYTSNYNKSVNVDFTVDTNGVYSEPRPIGTRYLTRNL

SEQ ID NO: 2790 - protein, 735 aa, Artificial Sequence
  Description of Artificial Sequence: Synthetic polypeptide
MAADGYLPDWLEDTLSEGIRQWWKLKPGPPPPKPAGRHKDDSRGLVLPGYKYLGPFNGLDKGEPVNEADAAALEHDKAYDRQLDSGDNPYLKYNHAGAEFQERLKEDTSFGGNLGRAVFQAKKRVLEPLGLVEEPVKTAPGKKRPVEHSPVEPDSSSGTGKAGQQPARKRLNFGQTGDADSVPDPQPLGQPPAAPTSLGSTTMATGSGAPMADNNEGADGVGNSSGNWHCDSQWLGDRVITTSTRTWALPTYNNHLYKQISSQSGAANDNHYFGYSTPWGYFDFNRFHCHFSPRDWQRLINNNWGFRPKRLNFKLFNIQVKEVTQNDGTTTIANNLTSTVPVFTDSEYQLPYVLGSAHQGCLPPFPADVFMVPQYGYLTLNNGSQAVGRSSFYCLEYFPSQMLRTGNNFTFSYTFEDVPFHSSYAHSQSLDRLMNPLIDQYLYYLNKTQSNSGTLQQSRLLFSQAGPTSMSLQAKNWLPGPCYRQQRLSKQANDNNNSNFPWTAATKYHLNGRDSLVNPGPAMASHKDDEEKFFPMHGTLIFGKQGTNANDADLDNVMITDEEEIRTTNPVATEQYGTVSNNLQNSNTGPTTGTVNHQGALPGMVWQDRDVYLQGPIWAKIPHTDGHFHPSPLMGGFGLKHPPPQIMIKNTPVPANPPTNFSSAKFASFITQYSTGQVSVEIEWELQKENSKRWNPEIQYTSNYNKSVNVDFTVDTNGVYSEPRPIGTRYLTRNL

SEQ ID NO: 2791 - protein, 735 aa, Artificial Sequence
  Description of Artificial Sequence: Synthetic polypeptide
MAADGYLPDWLEDTLSEGIRQWWKLKPGPPPPRPAERHQDDSRGLVLPGYKYLGPFNGLDKGEPVNEADAAALEHDKAYDRQLDSGDNPYLKYNHADAEFQERLKEDTSFGGNLGRAVFQAKKRVLEPLGLVEEPVKTAPGKKRPVEHSPAEPDSSSGTGKAGQQPARKRLNFGQTGDADSVPDPQPLGQPPAAPTSLGSTTMATGSGAPMADNNEGADGVGNSSGNWHCDSQWLGDRVITTSTRTWALPTYNNHLYKQISSQSGASNDNHYFGYSTPLGYFDFNRFHCHFSPRDWQRLINNNWGFRPKRLNFKLFNIQVKEVTQNDGTTTIANNLTSTVQVFTDSEYQLPYVLGSAHQGCLPPFPADVFMVPQYGYLTLNNGSQAVGRSSFYCLEYFPSQMLRTGNNFTFSYTFEDVPFHSSYAHSQSLDRLMNPLIDQYLYYLNRTQSNSGTLQQSRLLFSQAGPTSMSLQAKNWLPGPCYRQQRLSKQANDNNNSNFPWTAATKYHLNGRDSLVNPGPAMASHKDDEEKFFPMHGTLIFGKQGTNANDADLEHVMITDEEEIRTTNPVATEQYGNVSNNLQNSNTGPTTENVNHQGALPGMVWQDRDVYLQGPIWAKIPHTDGHFHPSPLMGGFGLKHPPPQIMIKNTPVPANPPTNFSAAKFASFITQYSTGQVSVEIEWELQKENSKRWNPEIQYTSNYNKSVNVDFTVDANGVYSEPRPIGTRYLTRNL

SEQ ID NO: 2792 - protein, 735 aa, Artificial Sequence
  Description of Artificial Sequence: Synthetic polypeptide
MAADGYLPDWLEDTLSEGIRQWWKLKPGPPPPKPAGRHKDDSRGLVLPGYKYLGPFNGLDKGEPVNEADAAALEHDKAYDRQLDSGDNPYLKYNHAGAEFQERLKEDTSFGGNLGRAVFQAKKRVLEPLGLVEEPVKTAPGKKRPVEHSPVEPDSSSGTGKAGQQPARKRLNFGQTGDADSVPDPQPLGQPPAAPTSLGSTTMATGSGAPMADNNEGADGVGNSSGNWHCDSQWLGDRVITTSTRTWALPTYNNHLYKQISSQSGAANDNHYFGYSTPWGYFDFNRFHCHFSPRDWQRLINNNWGFRPKRLNFKLFNIQVKEVTQNDGTTTIANNLTSTVPVFTDSEYQLPYVLGSAHQGCLPPFPADVFMVPQYGYLTLNNGSQAVGRSSFYCLEYFPSQMLRTGNNFTFSYTFEDVPFHSSYAHSQSLDRLMNPLIDQYLYYLNRTQSNSGTLQQSRLLFSQAGPTSMSLQAKNWLPGPCYRQQRLSKQANDNNNSNFPWTAATKYHLNGRDSLVNPGPAMASHKDDEEKFFPMHGTLIFGKQGTNANDADLEHVMITDEEEIRTTNPVATEQYGNVSNNLQNSNTGPTTENVNHQGALPGMVWQDRDVYLQGPIWAKIPHTDGHFHPSPLMGGFGLKHPPPQIMIKNTPVPANPPTNFSAAKFASFITQYSTGQVSVEIEWELQKENSKRWNPEIQYTSNYNKSVNVDFTVDANGVYSEPRPIGTRYLTRNL

SEQ ID NO: 2793 - protein, 735 aa, Artificial Sequence
  Description of Artificial Sequence: Synthetic polypeptide
MAADGYLPDWLEDILSEGIRQWWKLKPGPPPPKPAERHKDDSRGLVLPGYKYLGPFNGLDKGEPVNEADAAALEHDKAYDRQLDSGDNPYLKYNHADAEFQERLKEDTSFGGNLGRAVFQAKKRVLEPLGLVEEPVKTAPGKKRPVEQSPAEPDSSSGTGKAGNQPARKRLNFGQTGDADSVPDPQPLGQPPAAPSGLGSTTMATGSGAPMADNNEGADGVGNSSGNWHCDSQWLGDRVITTSTRTWALPTYNNHLYKQISSQSGAANDNHYFGYSTPWGYFDFNRFHCHFSPRDWQRLINNNWGFRPKRLNFKLFNIQVKEVTQNDGTTTIANNLTSTVPVFTDSEYQLPYVLGSAHQGCLPPFPADVFMVPQYGYLTLNNGSQAVGRSSFYCLEYFPSQMLRTGNNFTFSYTFEDVPFHSSYAHSQSLDRLMNPLIDQYLYYLNKTQSNSGTLQQSRLLFSQAGPTSMSLQAKNWLPGPCYRQQRLSKQANDNNNSNFPWTAATKYHLNGRDSLVNPGPAMASHKDDEEKFFPMHGTLIFGKQGTNANDADLDNVMITDEEEIRTTNPVATEQYGTVSNNLQNSNTGPTTGTVNHQGALPGMVWQDRDVYLQGPIWAKIPHTDGHFHPSPLMGGFGLKHPPPQIMIKNTPVPANPPTNFSSAKFASFITQYSTGQVSVEIEWELQKENSKRWNPEIQYTSNYNKSVNVDFTVDTNGVYSEPRPIGTRYLTRNL

SEQ ID NO: 2794 - protein, 735 aa, Artificial Sequence
  Description of Artificial Sequence: Synthetic polypeptide
MAADGYLPDWLEDTLSEGIRQWWKLKPGPPPPRPAERHQDDSRGLVLPGYKYLGPFNGLDKGEPVNEADAAALEHDKAYDRQLDSGDNPYLKYNHADAEFQERLKEDTSFGGNLGRAVFQAKKRVLEPLGLVEEPVKTAPGKKRPVEHSPAEPDSSSGTGKAGQQPARKRLNFGQTGDADSVPDPQPLGQPPAAPTSLGSTTMATGSGAPMADNNEGADGVGNSSGNWHCDSQWLGDRVITTSTRTWALPTYNNHLYKQISSQSGASNDNHYFGYSTPWGYFDFNRFHCHFSPRDWQRLINNNWGFRPKRLNFKLFNIQVKEVTQNDGTTTIANNLTSTVQVFTDSEYQLPYVLGSAHQGCLPPFPADVFMVPQYGYLTLNNGSQAVGRSSFYCLEYFPSQMLRTGNNFTFSYTFEDVPFHSSYAHSQSLDRLMNPLIDQYLYYLNRTQSNSGTLQQSRLLFSQAGPTSMSLQAKNWLPGPCYRQQRLSKQANDNNNSNFPWTAATKYHLNGRDSLVNPGPAMASHKDDEEKFFPMHGTLIFGKQGTNANDADLEHVMITDEEEIRTTNPVATEQYGNVSNNLQNSNTGPTTENVNHQGALPGMVWQDRDVYLQGPIWAKIPHTDGHFHPSPLMGGFGLKHPPPQIMIKNTPVPANPPTNFSAAKFASFITQYSTGQVSVEIEWELQKENSKRWNPEIQYTSNYNKSVNVDFTVDANGVYSEPRPIGTRYLTRNL

SEQ ID NO: 2795 - protein, 735 aa, Artificial Sequence
  Description of Artificial Sequence: Synthetic polypeptide
MAADGYLPDWLEDTLSEGIRQWWKLKPGPPPPKPAGRHKDDSRGLVLPGYKYLGPFNGLDKGEPVNEADAAALEHDKAYDRQLDSGDNPYLKYNHAGAEFQERLKEDTSFGGNLGRAVFQAKKRVLEPLGLVEEPVKTAPGKKRPVEHSPVEPDSSSGTGKAGQQPARKRLNFGQTGDADSVPDPQPLGQPPAAPTSLGSTTMATGSGAPMADNNEGADGVGNSSGNWHCDSQWLGDRVITTSTRTWALPTYNNHLYKQISSQSGASNDNHYFGYSTPWGYFDFNRFHCHFSPRDWQRLINNNWGFRPKRLNFKLFNIQVKEVTQNDGTTTIANNLTSTVQVFTDSEYQLPYVLGSAHQGCLPPFPADVFMVPQYGYLTLNNGSQAVGHSSFYCLEYFPSQMLRTGNNFTFSYTFEDVPFHSSYAHSQSLDRLMNPLIDQYLYYLNRTQSNSGTLQQSRLLFSQAGPTSMSLQAKNWLPGPCYRQQRLSKQANDNNNSNFPWTAATKYHLNGRDSLVNPGPAMASHKDDEEKFFPMHGTLIFGKQGTNANDADLEHVMITDEEEIRTTNPVATEQYGNVSNNLQNSNTGPTTENVNHQGALPGMVWQDRDVYLQGPIWAKIPHTDGHFHPSPLMGGFGLKHPPPQIMIKNTPVPANPPTNFSAAKFASFITQYSTGQVSVEIEWELQKENSKRWNPEIQYTSNYNKSVNVDFTVDTNGVYSEPRPIGTRYLTRNL

SEQ ID NO: 2796 - protein, 735 aa, Artificial Sequence
  Description of Artificial Sequence: Synthetic polypeptide
MAADGYLPDWLEDTLSEGIRQWWKLKPGPPPPKPAERHKDDSRGLVLPGYKYLGPFNGLDKGEPVNEADAAALEHDKAYDRQLDSGDNPYLKYNHADAEFQERLKEDTSFGGNLGRAVFQAKKRVLEPLGLVEEPVKTAPGKKRPVEHSPAEPDSSSGTGKAGQQPARKRLNFGQTGDADSVPDPQPLGQPPAAPTSLGSTTMATGSGAPMADNNEGADGVGNSSGNWHCDSQWLGDRVITTSTRTWALPTYNNHLYKQISSQSGASNDNHYFGYSTPWGYFDFNRFHCHFSPRDWQRLINNNWGFRPKRLNFKLFNIQVKEVTQNDGTTTIANNLTSTVQVFTDSEYQLPYVLGSAHQGCLPPFPADVFMVPQYGYLTLNNGSQAVGRSSFYCLEYFPSQMLRTGNNFTFSYTFEDVPFHSSYAHSQSLDRLMNPLIDQYLYYLNRTQSNSGTLQQSRLLFSQAGPTSMSLQAKNWLPGPCYRQQRLSKQANDNNNSNFPWTAATKYHLNGRDSLVNPGPAMASHKDDEEKFFPMHGTLIFGKQGTNANDADLEHVMITDEEEIRTTNPVATEQYGNVSNNLQNSNTGPTTENVNHQGALPGMVWQDRDVYLQGPIWAKIPHTDGHFHPSPLMGGFGLKHPPPQIMIKNTPVPANPPTNFSAAKFASFITQYSTGQVSVEIEWELQKENSKRWNPEIQYTSNYNKSVNVDFTVDTNGVYSEPRPIGTRYLTRNL

SEQ ID NO: 2797 - protein, 735 aa, Artificial Sequence
  Description of Artificial Sequence: Synthetic polypeptide
MAADGYLPDWLEDTLSEGIRQWWKLKPGPPPPKPAERHQDDSRGLVLPGHKYLGPFNGLDKGEPVNEADAAALEHDKAYDRQLDSGDNPYLKYNHADAEFQERLKEDTSFGGNLGRAVFQAKKRVLEPLGLVEEPVKTAPGKKRPVEHSPAEPDSSSGTGKAGQQPARKRLNFGQTGDADSVPDPQPLGQPPAAPTSLGSTTMATGSGAPMADNNEGADGVGNSSGNWHCDSQWLGDRVITTSTRTWALPTYNNHLYKQISSQSGASNDNHYFGYSTPWGYFDFNRFHCHFSPRDWQRLINNNWGFRPKRLNFKLFNIQVKEVTQNDGTTTIANNLTSTVQVFTDSEYQLPYVLGSAHQGCLPPFPADVFMVPQYGYLTLNNGSQAVGHSSSYCLEYFPSQMLRTGNNFTFSYTFEDVPFHSSYAHSQSLDRLMNPLIDQYLYYLNRTQSNSGTLQQSRLLFSQAGPTSMSLQAKNWLPGPCYRQQRLSKQANDNNNSNFPWTAATKYHLNGRDSLVNPGPAMASHKDDEEKFFPMHGTLIFGKQGTNANDADLEHVMITDEEEIRTTNPVATEQYGNVSNNLQNSNTGPTTENVNHQGALPGMVWQDRDVYLQGPIWAKIPHTDGHFHPSPLMGGFGLKHPPPQILIKNTPVPANPSTTFSAAKFASFITQYSTGQVSVEIEWELQKENSKRWNPEIQYTSNYNKSVNVDFTVDTNGVYSEPRPIGTRYLTRNL

SEQ ID NO: 2798 - protein, 735 aa, Artificial Sequence
  Description of Artificial Sequence: Synthetic polypeptide
MAADGYLPDWLEDTLSEGIRQWWKLKPGPPPPKPAERHKDDSRGLVLPGYKYLGPFNGLDKGEPVNEADAAALEHDKAYDRQLDSGDNPYLKYNHADAEFQERLKEDTSFGGNLARAVFQAKKRVLEPLGLVEEPVKTAPGKKRPVEHSPAEPDSSSGTGKSGQQPARKRLNFGQTGDADSVPDPQPLGQPPAAPSGLGTNTMASGSGAPMADNNEGADGVGNSSGNWHCDSTWMGDRVITTSTRTWALPTYNNHLYKQISSQSGASNDNHYFGYSTPWGYFDFNRFHCHFSPRDWQRLINNNWGFRPKRLNFKLFNIQVKEVTQNDGTTTIANNLTSTVQVFTDSEYQLPYVLGSAHQGCLPPFPADVFMVPQYGYLTLNNGSQAVGRSSFYCLEYFPSQMLRTGNNFTFSYTFEDVPFHSSYAHSQSLDRLMNPLIDQYLYYLNRTQSNSGTLQQSRLLFSQAGPTSMSLQAKNWLPGPCYRQQRLSKQANDNNNSNFPWTAATKYHLNGRDSLVNPGPAMASHKDDEEKFFPMHGTLIFGKQGTNANDADLEHVMITDEEEIRTTNPVATEQYGNVSNNLQNSNTGPTTENVNHQGALPGMVWQDRDVYLQGPIWAKIPHTDGHFHPSPLMGGFGLKHPPPQIMIKNTPVPANPPTNFSAAKFASFITQYSTGQVSVEIEWELQKENSKRWNPEIQYTSNYNKSVNVDFTVDANGVYSEPRPIGTRYLTRNL

SEQ ID NO: 2799 - protein, 735 aa, Artificial Sequence
  Description of Artificial Sequence: Synthetic polypeptide
MAADGYLPDWLEDILSEGIRQWWKLKPGPPPPKPAERHKDDSRGLVLPGYKYLGPFNGLDKGEPVNEADAAALEHDKAYDRQLDSGDNPYLKYNHADAEFQERLKEDTSFGGNLGRAVFQAKKRVLEPLGLVEEPVKTAPGKKRPVEQSPAEPDSSSGTGKAGNQPARKRLNFGQTGDADSVPDPQPLGQPPAAPSGLGSTTMATGSGAPMADNNEGADGVGNSSGNWHCDSQWLGDRVITTSTRTWALPTYNNHLYKQISSQSGAANDNHYFGYSTPWGYFDFNRFHCHFSPRDWQRLINNNWGFRPKRLNFKLFNIQVKEVTQNDGTTTIANNLTSTVQVFTDSEYQLPYVLGSAHQGCLPPFPADVFMVPQYGYLTLNNGSQAVGRSSFYCLEYFPSQMLRTGNNFTFSYTFEDVPFHSSYAHSQSLDRLMNPLIDQYLYYLNRTQSNSGTLQQSRLLFSQAGPTSMSLQAKNWLPGPCYRQQRLSKQANDNNNSNFPWTAATKYHLNGRDSLVNPGPAMASHKDDEEKFFPMHGTLIFGKQGTNANDADLEHVMITDEEEIRTTNPVATEQYGNVSNNLQNSNTGPTTENVNHQGALPGMVWQDRDVYLQGPIWAKIPHTDGHFHPSPLMGGFGLKHPPPQIMIKNTPVPANPPTNFSAAKFASFITQYSTGQVSVEIEWELQKENSKRWNPEIQYTSNYNKSVNVDFTVDANGVYSEPRPIGTRYLTRNL

SEQ ID NO: 2800 - protein, 735 aa, Artificial Sequence
  Description of Artificial Sequence: Synthetic polypeptide
MAADGYLPDWLEDTLSEGIRQWWKLKPGPPPPRPAERHQDDSRGLVLPGYKYLGPFNGLDKGEPVNEADAAALEHDKAYDRQLDSGDNPYLKYNHADAEFQERLKEDTSFGGNLGRAVFQAKKRVLEPLGLVEEPVKTAPGKKRPVEHSPAEPDSSSGTGKAGQQPARKRLNFGQTGDADSVPDPQPLGQPPAAPTSLGSTTMATGSGAPMADNNEGADGVGNSSGNWHCDSQWLGDRVITTSTRTWALPTYNNHLYKQISSQSGASNDNHYFGYSTPWGYFDFNRFHCHFSPRDWQRLINNNWGFRPKRLNFKLFNIQVKEVTQNDGTTTIANNLTSTVQVFTDSEYQLPYVLGSAHQGCLPPFPADVFMVPQYGYLTLNNGSQAVGRSSFYCLEYFPSQMLRTGNNFTFSYTFEDVPFHSSYAHSQSLDRLMNPLIDQYLYYLNRTQSNSGTLQQSRLLFSQAGPTSMSLQAKNWLPGPCYRQQRLSKQANDNNNSNFPWTAATKYHLNGRDSLVNPGPAMASHKDDEEKFFPMHGTLIFGKQGTNANDADLEHVMITDEEEIRTTNPVATEQYGNVSNNLQNSNTGPTTENVNHQGALPGMVWQDRDVYLQGPIWAKIPHTDGHFHPSPLMGGFGLKHPPPQILIKSTPVPANPSTTFSAAKFASFITQYSTGQVSVEIEWELQKENSKRWNPEIQYTSNYNKSVNVDFTVDTNGVYSEPRPIGTRYLTRNL

SEQ ID NO: 2801 - protein, 735 aa, Artificial Sequence
  Description of Artificial Sequence: Synthetic polypeptide
MAADGYLPDWLEDTLSEGIRQWWKLKPGPPPPRPAERHQDDSRGLVLPGYKYLGPFNGLDKGEPVNEADAAALEHDKAYDRQLDSGDNPYLKYNHADAEFQERLKEDTSFGGNLGRAVFQAKKRVLEPLGLVEEPVKTAPGKKRPVEHSPAEPDSSSGTGKAGQQPARKRLNFGQTGDADSVPDPQPLGQPPAAPTSLGSTTMATGSGAPMADNNEGADGVGNSSGNWHCDSQWLGDRVITTSTRTWALPTYNNHLYKQISSQSGASNDNHYFGYSTPWGYFDFNRFHCHFSPRDWQRLTNNNWGFRPKRLNFKLFNIQVKEVTQNDGTTTIANNLTSTVQVFTDSEYQLPYVLGSAHQGCLPPFPADVFMVPQYGYLTLNNGSQAVGRSSFYCLEYFPSQMLRTGNNFTFSYTFEDVPFHSSYAHSQSLDRLMNPLIDQYLYYLNRTQSNSGTLQQSRLLFSQAGPTSMSLQAKNWLPGPCYRQQRLSKQANDNNNSNFPWTAATKYHLNGRDSLVNPGPAMASHKDDEEKFFPMHGTLIFGKQGTNANDADLEHVMITDEEEIRTTNPVATEQYGNVSNNLQNSNTGPTTENVNHQGALPGMVWQDRDVYLQGPIWAKIPHTDGHFHPSPLMGGFGLKHPPPQIMIKNTPVPANPPTNFSAAKFASFITQYSTGQVSVEIEWELQKENSKRWNPEIQYTSNYNKSVNVDFTVDANGVYSEPRPIGTRYLTRNL

SEQ ID NO: 2802 - protein, 735 aa, Artificial Sequence
  Description of Artificial Sequence: Synthetic polypeptide
MAADGYLPDWLEDTLSEGIRQWWKLKPGPPPPKPAGRHKDDSRGLVLPGYKYLGPFNGLDKGEPVNEADAAALEHDKAYDRQLDSGDNPYLKYNHAGAEFQERLKEDTSFGGNLGRAVFQAKKRVLEPLGLVEEPVKTAPGKKRPVEHSPVEPDSSSGTGKAGQQPARKRLNFGQTGDADSVPDPQPLGQPPAAPTSLGSTTMATGSGAPMADNNEGADGVGNSSGNWHCDSQWLGDRVITTSTRTWALPTYNNHLYKQISSQSGASNDNHYFGYSTPWGYFDFNRFHCHFSPRDWQRLINNNWGFRPKRLNFKLFNIQVKEVTQNDGTTTIANNLTSTVPVFTDSEYQLPYVLGSAHQGCLPPFPADVFMVPQYGYLTLNNGSQAVGRSSFYCLEYFPSQMLRTGNNFTFSYTFEDVPFHSSYAHSQSLDRLMNPLIDQYLYYLNKTQSNSGTLQQSRLLFSQAGPTSMSLQAKNWLPGPCYRQQRLSKQANDNNNSNFPWTAATKYHLNGRDSLVNPGPAMASHKDDEEKFFPMHGTLIFGKQGTNANDADLDNVMITDEEEIRTTNPVATEQYGTVSNNLQNSNTGPTTGTVNHQRALPGMVWQDRDVYLQGPIWAKIPHTDGHFHPSPLMGGFGLKHPPPQIMIKNTPVPANPPTNFSSAKFASFITQYSTGQVSVEIEWELQKENSKRWNPEIQYTSNYNKSVNVDFTVDTNGVYSEPRPIGTRYLTRNL

SEQ ID NO: 2803 - protein, 735 aa, Artificial Sequence
  Description of Artificial Sequence: Synthetic polypeptide
MAADGYLPDWLEDTLSEGIRQWWKLKPGPPPPKPAGRHKDDSRGLVLPGYKYLGPFNGLDKGEPVNEADAAALEHDKAYDRQLDSGDNPYLKYNHAGAEFQERLKEDTSFGGNLGRAVFQAKKRVLEPLGLVEEPVKTAPGKKRPVEHSPVEPDSSSGTGKAGQQPARKRLNFGQTGDADSVPDPQPLGQPPAAPTSLGSTTMATGSGAPMADNNEGADGVGNSSGNWHCDSQWLGDRVITTSTRTWALPTYNNHLYKQISSQSGASNDNHYFGYSTPWGYFDFNRFHCHFSPRDWQRLINNNWGFRPKRLNFKLFNIQVKEVTQNDGTTTIANNLTSTVPVFTDSEYQLPYVLGSAHQGCLPPFPADVFMVPQYGYLTLNNGSQAVGRSSFYCLEHFPSQMLRTGNNFTFSYTFEDVPFHSSYAHSQSLDRLMNPLIDQYLYYLNKTQSNSGTLQQSRLLFSQAGPTSMSLQAKNWLPGPCYRQQRLSKQANDNNNSNFPWTAATKYHLNGRDSLVNPGPAMASHKDDEEKFFPMHGTLIFGKQGTNANDADLDNVMITDEEEIRTTNPVATEQYGTVSNNLQNSNTGPTTGTVNHQRALPGMVWQDRDVYLQGPIWAKIPHTDGHFHPSPLMGGFGLKHPPPQIMIKNTPVPANPPTNFSSAKFASFITQYSTGQVSVEIEWELQKENSKRWNPEIQYTSNYNKSVNVDFTVDTNGVYSEPRPIGTRYLTRNL

SEQ ID NO: 2804 - protein, 735 aa, Artificial Sequence
  Description of Artificial Sequence: Synthetic polypeptide
MAADGYLPDWLEDTLSEGIRQWWKLKPGPPPPKPAGRHKDDSRGLVLPGYKYLGPFNGLDKGEPVNEADAAALEHDKAYDRQLDSGDNPYLKYNHAGAEFQERLKEDTSFGGNLGRAVFQAKKRVLEPLGLVEEPVKTAPGKKRPVEHSPVEPDSSSGTGKAGQQPARKRLNFGQTGDADSVPDPQPLGQPPAAPTSLGSTTMATGSGAPMADSNEGADGVGNSSGNWHCDSQWLGDRVITTSTRTWALPTYNNHLYKQISSQSGASNDNHYFGYSTPWGYFDFNRFHCHFSPRDWQRLINNNWGFRPKRLNFKLFNIQVKEVTQNDGTTTIANNLTSTVPVFTDSEYQLPYVLGSAHQGCLPPFPADVFMVPQYGYLTLNNGSQAVGRSSFYCLEYFPSQMLRTGNNFTFSYTFEDVPFHSSYAHSQSLDRLMNPLIDQYLYYLNKTQSNSGTLQQSRLLFSQAGPTSMSLQAKNWLPGPCYRQQRLSKQANDNNNSNFPWTAATKYHLNGRDSLVNPGPAMASHKDDEEKFFPMHGTLIFGKQGTNANDADLDNVMITDEEEIRTTNPVATEQYGTVSNNLQNSNTGPTTGTVNHQRALPGMVWLDRDVYLQGPIWAKIPHTDGHFHPSPLMGGFGLKHPPPQIMIKNTPVPANPPTNFSSAKFASFITQYSTGQVSVEIEWELQKENSKRWNPEIQYTSNYNKSVNVDFTVDTNGVYSEPRPIGTRYLTRNL

SEQ ID NO: 2805 - protein, 735 aa, Artificial Sequence
  Description of Artificial Sequence: Synthetic polypeptide
MAADGYLPDWLEDTLSEGIRQWWRLKPGPPPPKPAGRHKDDSRGLVLPGYKYLGPFNGLDKGEPVNEADAAALEHDKAYDRQLDSGDNPYLKYNHAGAEFQERLKEDTSFGGNLGRAVFQAKKRVLEPLGLVEEPVKTAPGKKRPVEHSPVEPDSSSGTGKAGQQPARKRLNFGQTGDADSVPDPQPLGQPPAAPTSLGSTTMATGSGAPMADNNEGADGVGNSSGNWHCDSQWLGDRVITTSTRTWALPTYNNHLYKQISSQSGASNDNHYFGYSTPWGYFDFNRFHCHFSPRDWQRLINNNWGFRPKRLNFKLFNIQVKEVTQNDGTTTIANNLTSTVPVFTDSEYQLPYVLGSAHQGCLPPFPADVFMVPQYGYLTLNNGSQAVGRSSFYCLEYFPSQMLRTGNNFTFSYTFEDVPFHSSYAHSQSLDRLMNPLIDQYLYYLNKTQSNSGTLQQSRLLFSQAGPTSMSLQAKNWLPGPCYRQQRLSKQANDNNNSNFPWTAATKYHLNGRDSLVNPGPAMASHKDDEEKFFPMHGTLIFGKQGTNANDADLDNVMITDEEEIRTTNPVATEQYGTVSNNLQNSNTGPTTGTVNHQRALPGMVWQDRDVYLQGPIWAKIPHTDGHFHPSPLMGGFGLKHPPPQIMIKNTPVPANPPTNFSSAKFASFITQYSTGQVSVEIEWELQKENSKRWNPEIQYTSNYNKSVNVDFTVDTNGVYSEPRPIGTRYLTRNL

SEQ ID NO: 2806 - protein, 735 aa, Artificial Sequence
  Description of Artificial Sequence: Synthetic polypeptide
MAADGYLPDWLEDTLSEGIRQWWKLKPGPPPPKPAGRHKDDSRGLVLPGYKYLGPFNGLDKGEPVNEADAAALEHDKAYDRQLDSGDNPYLKYNHAGAEFQERLKEDTSFGGNLGRAVFQAKKRVLEPLGLVEEPVKTAPGKKRPVEHSPVEPDSSSGTGKAGQQPARKRLNFGQTGDADSVPDPQPLGQPPAAPTSLGSTTMATGSGAPMADNNEGADGVGNSSGNWHCDSQWLGDRVITTSTRTWALPTYNNHLYKQISSQSGASNDNHYFGYSTPWGYFDFNRFHCHFSPRDWQRLINNNWGFRPKRLNFKLFNIQVKEVTQNDGTTTIANNLTSTVPVFTDSEYQLPYVLGSAHQGCLPPFPADVFMVPQYGYLTLNNGSQAVGRSSFYCLEYFPSQMLRTGNNFTFSYTFEDVPFHSSYAHSQSLDRLMNPLIDQYLYYLNKTQSNSGTLQQSRLLFSQAGPTSMSLQAKNWLPGPCYRQQRLSKQANDNNNSNFPWTAATKYHLNGRDSLVNPGPAMASHKDDEEKFFPMHGTLIFGKQGTNANDADLDNVMITDEEEIRTTNPVATEQYGTVSNNLQNSNTGPTTGTVNHQRALPGMVWQDRDVYLQGPIWAKIPHTDGHFHPSPLMGGFGLKHPPPQIMIKNTPVPANPPTNFSSAKFASFITQYSTGQVSVEIEWELQKENSKRWNPEIQYTSNYNKSVNVDLTVDTNGVYSEPRPIGTRYLTRNL

SEQ ID NO: 2807 - protein, 735 aa, Artificial Sequence
  Description of Artificial Sequence: Synthetic polypeptide
MAADGYLPDWLEDTLSEGIRQWWKLKPGPPPPKPAGRHKDDSRGLVLPGYKYLGPFNGLDKGEPVNEADAAALEHDKAYDRQLDSGDNPYLKYNHAGAEFQERLKEDTSFGGNLGRAVFQAKKRVLEPLGLVEEPVKTAPGKKRPVEHSPVEPDSSSGTGKAGQQPARKRLNFGQTGDADSVPDPQPLGQPPAAPTSLGSTTMATGSGAPMADNNEGADGVGNSSGNWHCDSQWLGDRVITTSTRTWALPTYNNHLYKQISSQSGASNDNHYFGYSTPWGYFDFNRFHCHFSPRDWQRLINNNWGFRPKRLNFKLFNIQVKEVTQNDGTTTIANNLTSTVPVFTDSEYQLPYVLGSAHQGCLPPFPADVFMVPQYGYPTLNNGSQAVGRSSFYCLEYFPSQMLRTGNNFTFSYTFEDVPFHSSYAHSQSLDRLMNPLIDQYLYYLNKTQSNSGTLQQSRLLFSQAGPTSMSLQAKNWLPGPCYRQQRLSKQANDNNNSNFPWAAATKYHLNGRDSLVNPGPAMASHKDDEEKFFPMHGTLIFGKQGTNANDADLDNVMITDEEEIRTTNPVATEQYGTVSNNLQNSNTGPTTGTVNHQRALPGMVWQDRDVYLQGPIWAKIPHTDGHFHPSPLMGGFGLKHPPPQIMIKNTPVPANPPTNFSSAKFASFITQYSTGQVSVEIEWELQKENSKRWNPEIQYTSNYNKSVNVDFTVDTNGVYSEPRPIGTRYLTRNL

SEQ ID NO: 2808 - protein, 735 aa, Artificial Sequence
  Description of Artificial Sequence: Synthetic polypeptide
MAADGYLPDWLEDTLSEGIRQWWKLKPGPPPPKPAERHQDDSRGLVLPGYKYLGPFNGLDKGEPVNEADAAALEHDKAYDRQLDSGDNPYLKYNHADAEFQERLKEDTSFGGNLGRAVFQAKKRVLEPLGLVEEPVKTAPGKKRPVEHSPAEPDSSSGTGKAGQQPARKRLNFGQTGDADSVPDPQPLGQPPAAPTSLGSTTMATGSGAPMADNNEGADGVGNSSGNWHCDSQWLGDRVITTSTRTWALPTYNNHLYKQISSQSGASNDNHYFGYSTPWGYFDFNRFHCHFSPRDWQRLINNNWGFRPKRLNFKLFNIQVKEVTQNDGTTTIANNLTSTVQVFTDSEYQLPYVLGSAHQGCLPPFPADVFMVPQYGYLTLNNGSQAVGRSSFYCLEYFPSQMLRTGNNFTFSYTFEDVPFHSSYAHSQSLDRLMNPLIDQYLYYLNRTQSNSGTLQQSRLLFSQAGPTSMSLQAKNWLPGPCYRQQRLSKQANDNNNSNFPWTAATKYHLNGRDSLVNPGPAMASHKDDEEKFFPMHGTLIFGKQGTNANDADLEHVMITDEEEIRTTNPVATEQYGNVSNNLQNSNTGPTTENVNHQGALPGMVWQDRDVYLQGPIWAKIPHTDGHFHPSPLMGGFGLKHPPPQIMIKNTPVPANPPTNFSAAKFASFITQYSTGQVSVEIEWELQKENSKRWNPEIQYTSNYNKSVNVDFTVDTNGVYSEPRPIGTRYLTRNL

SEQ ID NO: 2809 - protein, 734 aa, Artificial Sequence
  Description of Artificial Sequence: Synthetic polypeptide
MAADGYLPDWLEDTLSEGIRQWWKLKPGPPPPKPAERHQDDSRGLVLPGYKYLGPFNGLDKGEPVNEADAAALEHDKAYDRQLDSGDNPYLKYNHADAEFQERLKEDTSFGGNLGRAVFQAKKRVLEPLGLVEEPVKTAPGKKRPVEHSPAEPDSSSGTGKAGQQPARKRLNFGQTGDADSVPDPQPLGQPPAAPTSLGSTTMATGSGAPMADNNEGADGVGNSSGNWHCDSQWLGDRVITTSTRTWALPTYNNHLYKQISSQSGASNDNHYFGYSTPWGYFDFNRFHCHFSPRDWQRLINNNWGFRPKRLNFKLFNIQVKEVTQNDGTTTIANNLTSTVQVFTDSEYQLPYVLGSAHQGCLPPFPADVFMVPQYGYLTLNNGSQAVGRSSFYCLEYFPSQMLRTGNNFTFSYTFEDVPFHSSYAHSQSLDRLMNPLIDQYLYYLNRTQSNSGTLQQSRLLFSQAGPTSMSLQAKNWLPGPCYRQQRLSKQANDNNSNFPWTAATKYHLNGRDSLVNPGPAMASHKDDEEKFFPMHGTLIFGKQGTNANDADLEHVMITDEEEIRTTNPVATEQYGNVSNNLQNSNTGPTTENVNHQGALPGMVWQDRDVYLQGPIWAKIPHTDGHFHPSPLMGGFGLKHPPPQIMIKNTPVPANPPTNFSAAKFASFITQYSTGQVSVEIEWELQKENSKRWNPEIQYTSNYNKSVNVDFTVDTNGVYSEPRPIGTRYLTRNL

SEQ ID NO: 2810 - protein, 734 aa, Artificial Sequence
  Description of Artificial Sequence: Synthetic polypeptide
MAADGYLPDWLEDTLSEGIRQWWKLKPGPPPKPAERHQDDSRGLVLPGYKYLGPFNGLDKGEPVNEADAAALEHDKAYDRQLDSGDNPYLKYNHADAEFQERLKEDTSFGGNLGRAVFQAKKRVLEPLGLVEEPVKTAPGKKRPVEHSPAEPDSSSGTGKAGQQPARKRLNFGQTGDADSVPDPQPLGQPPAAPTSLGSTTMATGSGAPMADNNEGADGVGNSSGNWHCDSQWLGDRVITTSTRTWALPTYNNHLYKQISSQSGASNDNHYFGYSTPWGYFDFNRFHCHFSPRDWQRLINNNWGFRPKRLNFKLFNIQVKEVTQNDGTTTIANNLTSTVQVFTDSEYQLPYVLGSAHQGCLPPFPADVFMVPQYGYLTLNNGSQAVGRSSFYCLEYFPSQMLRTGNNFTFSYTFEDVPFHSSYAHSQSLDRLMNPLIDQYLYYLNRTQSNSGTLQQSRLLFSQAGPTSMSLQAKNWLPGPCYRQQRLSKQANDNNNSNFPWTAATKYHLNGRDSLVNPGPAMASHKDDEEKFFPMHGTLIFGKQGTNANDADLEHVMITDEEEIRTTNPVATEQYGNVSNNLQNSNTGPTTENVNHQGALPGMVWQDRDVYLQGPIWAKIPHTDGHFHPSPLMGGFGLKHPPPQIMIKNTPVPANPPTNFSAAKFASFITQYSTGQVSVEIEWELQKENSKRWNPEIQYTSNYNKSVNVDFTVDTNGVYSEPRPIGTRYLTRNL

SEQ ID NO: 2811 - protein, 735 aa, Artificial Sequence
  Description of Artificial Sequence: Synthetic polypeptide
MAADGYLPDWLEDTLSEGIRQWWKLKPGPPPPKPAERHQDDSRGLVLPGYKYLGPFNGLDKGEPVNEADAAALEHDKAYDRQLDSGDNPYLKYNHADAEFQERLKEDTSFGGNLGRAVFQAKKRVLEPLGLVEEPVKTAPGKKRPVEHSPAEPDSSSGTGKAGQQPARKRLNFGQTGDADSVPDPQPLGQPPAAPTSLGSTTMATGSGAPMADNNEGADGVGNSSGNWHCDSQWLGDRVITTSTRTWALPTYNNHLYKQISSQSGASNDNHYFGYSTPWGYFDFNRFHCHFSPRDWQRLINNNWGFRPKRLNFKLFNIQVKEVTQNDGTTTIANNLTSTVQVFTDSEYQLPYVLGSAHQGCLPPFPADVFMVPQYGYLTLNNGSQAVGRSSFYCLEYFPSQMLRTGNNFTFSYTFEDVPFHSSYAHSQSLDRLMNPLIDQYLYYLNRTQSNSGTLQQSRLLFSQAGPTSMSLQAKNWLPGPCYRQQRLSKQANDNNNSNFPWTAATKYHLNGRDSLVNPGPAMASHKDDEEKFFPMHGTLIFGKQGTNANDADLEHVMITDEEEIRTTNPVATEQYGNVSNNLQNSNTGPTTENVNHQGALPGMVWQDRDAYLQGPIWAKIPHTDGHFHPSPLMGGFGLKHPPPQIMIKNTPVPANPPTNFSAAKFASFITQYSTGQVSVEIEWELQKENSKRWNPEIQYTSNYNKSVNVDFTVDTNGVYSEPRPIGTRYLTRNL

SEQ ID NO: 2812 - protein, 735 aa, Artificial Sequence
  Description of Artificial Sequence: Synthetic polypeptide
MAADGYLPDWLEDTLSEGIRQWWKLKPGPPPPKPAERHQDDSRGLVLPGYKYLGPFNGLDKGEPVNEADAAALEHDKAYDRQLDSGDNPYLKYNHADAEFQERLKEDTSFGGNLGRAVFQAKKRVLEPLGLVEEPAKTAPGKKRPVEHSPAEPDSSSGTGKAGQQPARKRLNFGQTGDADSVPDPQPLGQPPAAPTSLGSTTMATGSGAPMADNNEGADGVGNSSGNWHCDSQWLGDRVITTSTRTWALPTYNNHLYKQISSQSGASNDNHYFGYSTPWGYFDFNRFHCHFSPRDWQRLINNNWGFRPKRLNFKLFNIQVKEVTQNDGTTTIANNLTSTVQVFTDSEYQLPYVLGSAHQGCLPPFPADVFMVPQYGYLTLNNGSQAVGRSSFYCLEYFPSQMLRTGNNFTFSYTFEDVPFHSSYAHSQSLDRLMNPLIDQYLYYLNRTQSNSGTLQQSRLLFSQAGPTSMSLQAKNWLPGPCYRQQRLSKQANDNNNSNFPWTAATKYHLNGRDSLVNPGPAMASHKDDEEKFFPMHGTLIFGKQGTNANDADLEHVMITDEEEIRTTNPVATEQYGNVSNNLQNSNTGPTTENVNHQGALPGMVWQDRDVYLQGPIWAKIPHTDGHFHPSPLMGGFGLKHPPPQIMIKNTPVPANPPTNFSAAKFASFITQYSTGQVSVEIEWELQKENSKRWNPEIQYTSNYNKSVNVDFTVDTNGVYSEPRPIGTRYLTRNL

SEQ ID NO: 2813 - protein, 735 aa, Artificial Sequence
  Description of Artificial Sequence: Synthetic polypeptide
MAADGYLPDWLEDTLSEGIRQWWKLKPGPPPPKPAERHQDDSRGLVLPGYKYLGPFNGLDKGEPVNEADAAALEHDKAYDRQLDSGDNPYLKYNHADAEFQERLKEDTSFGGNLGRAVFQAKKRVLEPLGLVEEPVKTAPGKKRPVEHSPAEPDSSSGTGKAGQQPARKRLNFGQTGDADSVPDPQPLGQPPAAPTSLGSTTMATGSGAPMADNNEGADGVGNSSGNWHCDSQWLGDRVITTSTRTWALPTYNNHLYKQISSQSGASNDNHYFGYSTPWGYFDFNRFHCHFSPRDWQRLINNNWGFRPKRLNFKLFNIQVKEVTQNDGTTTIANNLTSTVQVFTDSEYQLPYVLGSAHQGCLPPFPADVFMVPQYGYLTLNNGSQAVGRSSFYCLEYFPSQMLRTGNNFTFSYTFEDVPFHSSYAHSQSLDRLMNPLIDQYLYYLNRTQSNSGTLQQSRLLFSQAGPTSMSLQAKNWLPGPCYRQQRLSKQANDNNNSNFPWTAATKYHLNGRDSLVNPGPAMASHKDDEEKFFPMHGTLIFGKQGTNANDADLEHVMITDEEEIRTTNPVATEQYGNVSNNLQNSNTGPTTENVNHQGALPGMVWQDRDVYLQGPIWAKIPHTDGHFHPSPLMGGFGLKHPPPQIMIKNTPVPANPPTNFSAAKFASFITQYSTGQVSVEIEWELQKENSKRWNPEIQYTSNYNKSVNVDFTVDTNGAYSEPRPIGTRYLTRNL

SEQ ID NO: 2814 - protein, 735 aa, Artificial Sequence
  Description of Artificial Sequence: Synthetic polypeptide
MAADGYLPDWLEDTLSEGIRQWWKLKPGPPPPKPAERHKDDSRGLVLPGYKYLGPFNGLDKGEPVNEADAAALEHDKAYDRQLDSGDNPYLKYNHADAEFQERLKEDTSFGGNLGRAVFQAKKRVLEPLGLVEEPVKTAPGKKRPVEHSPVEPDSSSGTGKAGQQPARKRLNFGQTGDADSVPDPQPLGQPPAAPTSLGSTTMATGSGAPMADNNEGADGVGNSSGNWHCDSQWSGDRVITTSTRTWALPTYNNHLYKQISSQSGASNDNHYFGYSTPWGYFDFNRFHCHFSPRDWQRLINNNWGFRPKRLNFKLFNIQVKEVTQNDGTTTIANNLTSTVQVFTDSEYQLPYVLGSAHQGCLPPFPADVFMVPQYGYLTLNNGSQAVGRSSFYCLEYFPSQMLRTGNNFTFSYTFEDVPFHSSYAHSQSLDRLMNPLIDQYLYYLNKTQSNSGTLQQSRLLFSQAGPTSMSLQAKNWLPGPCYRQQRLSKQANDNNNSNFPWTAATKYHLNGRDSLVNPGPAMASHKDDEEKFFPMHGTLIFGKQGTNANDADLDNVMITDEEEIRTTNPVATEQYGTVSNNLQNSNTGPTTGTVNHQGALPGMVWQDRDVYLQGPIWAKIPHTDGHFHPSPLMGGFGLKHPPPQIMIKNTPVPANPPTNFSSAKFASFITQYSTGQVSVEIEWELQKENSKRWNPEIQYTSNYNKSVNVDFTVDTNGVYSEPRPIGTRYLTRNL

SEQ ID NO: 2815 - protein, 735 aa, Artificial Sequence
  Description of Artificial Sequence: Synthetic polypeptide
MAADGYLPDWLEDALSEGIRQWWKLKPGPPPPKPAERHKDDSRGLVLPGYKYLGPFNGLDKGEPVNEADAAALEHDKAYDRQLDSGDNPYLKYNHADAEFQERLKEDTSFGGNLGRAVFQAKKRVLEPLGLVEEPVKTAPGKKRPVEHSPVEPDSSSGTGKAGQQPARKRLNFGQTGDADSVPDPQPLGQPPAAPTSLGSTTMATGSGAPMADNNEGADGVGNSSGNWHCDSQWSGDRVITTSTRTWALPTYNNHLYKQISSQSGASNDNHYFGYSTPWGYFDFNRFHCHFSPRDWQRLINNNWGFRPKRLNFKLFNIQVKEVTQNDSTTTIANNLTSTVQVFTDSEYQLPYVLGSAHQGCLPPFPADVFMVPQYGYLTLNNGSQAVGRSSFYCLEYFPSQMLRTGNNFTFSYTFEDVPFHSSYAHSQSLDRLMNPLIDQYLYYLNKTQSNSGTLQQSRLLFSQAGPTSMSPQAKNWLPGPCYRQQRLSKQANDNNNSNFPWTAATKYHLNGRDSLVNPGPAMASHKDDEEKFFPMHGTLIFGKQGTNANDADLDNVMITDEEEIRTTNPVATEQYGTVSNNLQNSNTGPTTGTVNHQGALPGMVWQDRDVYLQGPIWAKIPHTDGHFHPSPLMGGFGLKHPPPQIMIKNTPVPANPPTNFSSAKFASFITQYSTGQVSVEIEWELQKENSKRWNPEIQYTSNYNKSVNVDFTVDTNGVYSEPRPIGTRYLTRNL

SEQ ID NO: 2816 - protein, 735 aa, Artificial Sequence
  Description of Artificial Sequence: Synthetic polypeptide
MAADGYLPDWLEDTLSEGIRQWWKLKPGPPPPKPAERHKDDSRGLVLPGYKYLGPFNGLDKGEPVNEANAAALEHDKAYDRQLDSGDNPYLKYDHADAEFQERLKEDTSFGGNLGRAVFQAKKRVLEPLGLVEEPVKTAPGKKRSVEHSPVEPDSSSGTGKAGQQPARKRLNFGQTGDADSVPDPQPLGQPPAAPTSLGSTTMATGSGAPMADNNEGADGVGNSSGNWHCDSQWSGDRVITTSTRTWALPTYNNHLYKQISSQSGASNDNHYFGHSTPWGYFDFNRFHCHFSPRDWQRLINNNWGFRPKRLNFKLFNIQVKEVTQNDGTTTIANNLTSTVQVFTDSEYRLPYVLGSAHQGCLPPFPADVFMVPQYGYLTLNNGSQAVGRSSFYCLEYFPSQMLRTGNNFTFSYTFEDVPFHSSYAHSQSLDRLMNPLIDQYLYYLNKTQSNSGTLQQSRLLFSQAGPTSMSLQAKNWLPGPCYRQQRLSKQANDNNNSNFPWTVATKYHLNGRDSLVNPGPAMASHKDDEEKFFPMHGTLIFGKQGTNANDADLDNVMITDEEEIRTTNPVATEQYGTVSNNLQNSNTGPTTGTVNHQGALPGMVWQDRDVYLQGPIWAKIPHTDGHFHPSPLMGGFGLKHPPPQIMIKNTPVPANPPTNFSSAKFASFITQYSTGQVSVEIEWELQKENSKRWNPETQYTSNYNKSVNVDFTVDTNGVYSEPRPIGTRYLTRNL

SEQ ID NO: 2817 - protein, 735 aa, Artificial Sequence
  Description of Artificial Sequence: Synthetic polypeptide
MAADGYLPDWLEDTLSEGIRQWWKLKPGPPPPKPAERHKDDSRGLVLPGYKYLGPFNGLDKGEPVNEANAAALEHDKAYDRQLDSGDNPYLKYNHADAEFQERLKEDTSFGGNLGRAVFQAKKRVLEPLGLVEEPVKTAPGKKRPVEHSPVEPDSSSGTGKAGQQPARKRLNFGQTGDADSVPDPQPLGQPPAAPTSLGSTTMATGSGAPMADNNEGADGVGNSSGNWHCDSQWSGDRVITTSTRTWALPTYNNHLYKQISSQSGASNDNHYFGYSTPWGYFDFNRFHCRFSPRDWQRLINNNWGFRPKRLNFKLLNIQVKEVTQNDGTTTIANNLTSTVQVFTDSEYQLPYVLGSAHQGCLPPFPADVFMVPQYGYLTLNNGSQAVGRSSFYCLEYFPSQMLRTGNNFTFSYTFEDVPFHSSYAHSQSLDRLMNPLIDQYLYYLNKTQSNSGTLQQSRLLFSQAGPTSMSLQAKNWLPGPCYRQQRLSKQANDNNNSNFPWTAATKYHLNGRDSLVNPGPAMASHKDDEEKFFPMHGTLIFGKQGTNANDADLDNVMVTDEEEIRTTNPVATEQYGTVSNNLQNSNTGPTTGTVNHQGALPGMVWQDRDVYLQGPIWAKIPHTDGHFHPSPLMGGFGLKHPPPQIMIKNTPVPANPPTNFSSAKFASFITQYSTGQVSVEIEWELQKENSKRWNPETQYTSNYNKSVNVDFTVDTNGVYSEPRPIGTRYLTRNL

SEQ ID NO: 2818 - protein, 735 aa, Artificial Sequence
  Description of Artificial Sequence: Synthetic polypeptide
MAADGYLPDWLEDTLSEGIRQWWKLKPGPPPPKPAERHKDDSRGLVLPGYKYLGPFNGLDKGEPVNEADAAALEHDKAYDRQLDSGDNPYLKYNHADAEFQERLKEDTSFGGNLGRAVFQAKKRVLEPLGLVEEPVKTAPGKKRPVEHSPVEPDSSSGTGKAGQQPARKGLNFGQTGDADSVPDPRPLGQPPAAPASLGSTTMATGSGAPMADNNEGADGVGNSSGNWHCDSQWLGDRVITTSTRTWALPTYNNHLYKQISSQSGASNDNHYFGYSTPWGYFDFNRFHCHFSPRDWQRLINNNWGFRPKRLNFKLFNIQVKEVTQNDGTTTIANNLTSTVPVFTDSEYQLPYVLGSAHQGCLPPFPADVFMVPQYGYLTLNNGSQAVGRSSFYCLEYFPSQMLRTGNNFTFSYTFEDVPFHSSYAHSQSLDRLMNPLIDQYLYYLNKTQSNSGTLQQSRLLFSQAGPTSMSLQAKNWLPGPYYRQQRLSKQANDNNNSNFPWTAATKYHPNGRDSLVDPGPAMASHKDDEEKFFPMHGTLIFGKQGTNANDADLDNVMITDEEEIRTTNPVATGQYGTVSNNLQNSNTGPTTGTVNHQGALPGMVWQDRDVYLQGPIWAKIPHTDGHFHPSPLMGGFGLKHPPPQIMVKNTPVPANPPTNFSSAKFVSFITRYSTGQVSVEIEWELQKENSKRWNPEIQYTSNYNKSVNVDFTVDTNGVYSEPRPIGTRYLTRNL

SEQ ID NO: 2819 - protein, 735 aa, Artificial Sequence
  Description of Artificial Sequence: Synthetic polypeptide
MAADGYLPDWLEDTLSEGIRQWWKLKPGPPPPKPAERHKDDSRGLVLPGYKYLGPFNGPDKGEPVNEADAAALEHDKAYDRQLDSGDNPYLKYNHADAEFQERLKEDTSFGGNLGRAVFQAKKRVLEPLGLVEEPVKTAPGKKRPVEHSPVEPDSSSGTGKAGQQPARKRLNFGQTGDADSVPDPQPLGQPPAAPTSLGSTTMATGSGAPMADNNEGADGVGNSSGNWHCDSQWSGDRVITTSTRTWALPTYNNHLYKQISSQSGASNDNHYFGYSTPWGYFDFNRFHCHFSPRDWQRLINNNWGFRPKRLNFKLFNIQVKEVTQNDGTTTIANNLTSTVQVFTDSEYQLPYVLGSAHQGCLPPFPADVFMVPQYGYLTLNNGSQAVGRSSFYCLEYFPSQMLRTGNNFTFSYTFEDVPFHSSYAHSQSLDRLMNPLIDQYLYYLNKTQSNSGTLQQSRLLFSQAGPTSMSLQAKNWLPGPCYRQQRLSKQANDNNNSNFPWTAATKYHLNGRDSLVNPGPAMASHKDDEEKFFPMHGTLIFGKQGTNANDADLDNVMITDEEEIRTTNPVATEQYGTVSNNLQNSNTGPTTGTVNHQGALPGMVWQDRDVYLQGPIWAKIPHTDGHFHPSPLMGGFGLKHPPPQIMIKNTPVPANPPTNFSSAKFASFITQYSTGQVSVEIEWELQKENSKRWNPEIQYTSNYNKSVNVDFTVDTNGVYSEPRPIGTRYLTRNL

SEQ ID NO: 2820 - protein, 735 aa, Artificial Sequence
  Description of Artificial Sequence: Synthetic polypeptide
MAADGYLPDWLEDTLSEGIRQWWKLKPGPPPPKPAERHKDDSRGLVLPGYKYLGPFNGLDKGEPVNEADAAALEHDKAYDRQLDSGDNPYLKYNHADAEFQERLKEDTSFGGNLGRAVFQAKKRVLEPLGLVEEPVKTAPGKKRPVEHSPVEPDSSSGTGKAGQQPARKRLNFGQTGDADSVPDPQPLGQPPAAPTSLGSTTMATGSGAPMADNNEGADGVGNSSGNWHCDSQWSGDRVITTSTRTWALPTYNNHLYKQISSQSGASNDNHYFGYSTPWGYFDFNRFHCHFSPRDWQRLINNNWGFRPKRLNFKLFNIQVKEVTQNDGTTTIANNLTSTVQVFTDSEYQLPYVLGSAHQGCLPPFPADVFMVPQYGYLTLNNGSQAVGRSSFYCLEYFPSQMLRTGNNFTFSYTFEDVPFHSSYAHSQSLDRLMNPLIDQYLYYLNKTQSNSGTLQQSRLLFSQAGPTSMSLQAKNWLPGPCYRQQRLSKQANDNNNSNFPWTAATKYHLNGRDSLVNPGPAMASHKDDEEKFFPMHGTLIFGKQGTNANDADLDNVMITDEEEIRTTNPVATEQYGTVSNNLQNSNTGPTTGTVNHQGALPGMVWQDRDVYLQGPIWAKIPHTDGHFHPSPLMGGFGLKHPPPQIMIKNTPVPANPPTNFSSAKFASFITQYSTGQVSVEIEWELQKENSKRWNPETQYTSNYNKSVNVDFTVDTNGVYSEPRPIGTRYLTRNL

SEQ ID NO: 2821 - protein, 735 aa, Artificial Sequence
  Description of Artificial Sequence: Synthetic polypeptide
  MOD_RES (574)..(574): Any naturally occurring amino acid
MAADGYLPDWLEDTLSEGIRQWWKLKPGPPPPKPAERHKDDSRGLVLPGYKYLGPFNGLDKGEPVNEADAAALEHDKAYDRQLDSGDNPYLKYNHADAEFQERLKEDTSFGGNLGRAVFQAKKRVLEPLGLVEEPVKTAPGKKRPVEHSPVEPDSSSGTGKAGQQPARKGLNFGQTGDADSVPDPRPLGQPPAAPASLGSTTMATGSGAPMADNNEGADGVGNSSGNWHCDSQWLGDRVITTSTRTWALPTYNNHLYKQISSQSGASNDNHYFGYSTPWGYFDFNRFHCHFSPRDWQRLINNNWGFRPKRLNFKLFNIQVKEVTQNDGTTTIANNLTSTVPVFTDSEYQLPYVLGSAHQGCLPPFPADVFMVPQYGYLTLNNGSQAVGRSSFYCLEYFPSQMLRTGNNFTFSYTFEDVPFHSSYAHSQSLDRLMNPLIDQYLYYLNKTQSNSGTLQQSRLLFSQAGPTSMSLQAKNWLPGPYYRQQRLSKQANDNNNSNFPWTAATKYHPNGRDSLVDPGPAMASHKDDEEKFFPMHGTLIFGKQGTNANDADLDNVMITDEEEIRTTNPVATXQYGTVSNNLQNSNTGPTTGTVNHQGALPGMVWQDRDVYLQGPIWAKIPHTDGHFHPSPLMGGFGLKHPPPQIMVKNTPVPANPPTNFSSAKFASFITRYSTGQVSVEIEWELQKENSKRWNPEIQYTSNYNKSVNVDFTVDTNGVYSEPRPIGTRYLTRNL

SEQ ID NO: 2822 - protein, 735 aa, Artificial Sequence
  Description of Artificial Sequence: Synthetic polypeptide
MAADGYLPDWLEDTLSEGIRQWWKLKPGPPPPKPAERHKDDSRGLVLPGYKYLGPFNGLDKGEPVNEADAAAPEHDKAYDRQLDSGDNPYPKYNHADAEFQERLKEDTSFGGNLGRAVFQAKKRVLEPLGLVEEPVKTAPGKKRPVEHSPVEPDSSSGTGKAGQQPARKRLNFGQTGDADSVPDPQPLGQPPAAPTSLGSTTMATGSGAPMADNNEGADGVGNSSGNWHCDSQWSGDRVITTSTRTWALPTYNNHLYKQISSQSGASNDNHYFGYSTPWGYFDFNRFHCHFSPRDWQRLINNNWGFRPKRLNFKLFNIQVKEVTQNDGTTTIANNLTSTVQVFTDSEYQLPYVLGSAHQGCLPPFPADVFMVPQYGYLTLNNGSQAVGRSSFYCLEYFPSQMLRTGNNFTFSYTFEDVPFHSSYAHSQSLDRLMNPLIDQYLYYLNKTQSNSGTLQQSRLLFSQAGPTSMSLQAKNWLPGPCYRQQRLSKQANDNNNSNFPWTAATKYHLNGRDSLVNPGPAMASHKDDEEKFFPMHGTLIFGKQGTNANDADLDNVMITDEEEIRTTNPVATEQYGTVSNNLQNSNTGPTTGTVNHQGALPGMVWQDRDVYLQGPIWAKIPHTDGHFHPSPLMGGFGLKHPPPQIMIKNTPVPANPPTNFSSAKFASFITQYSTGQVSVEIEWELQKENSKRWNPEIQYTSNYNKSVNVDFTVDTNGVYSEPRPIGTRYLTRNL

SEQ ID NO: 2823 - protein, 735 aa, Artificial Sequence
  Description of Artificial Sequence: Synthetic polypeptide
MAADGYLPDWLEDTLSEGIRQWWKLKPGPPPPKPAERHKDDSRGLVLPGYKYLGPFNGLDKGEPVNEADAAALEHDKAYDRQLDSGDNPYLKYNHADAEFQERLKEDTSFGGNLGRAVFQAKKRVLEPLGLVVEPVKTAPGKKRPVEHSPVEPDSSSGTGKAGQQPARKRLNFGQTGDADSVPDPQPLGQPPAAPTSLGSTTMATGSGAPMADNNEGADGVGNSSGNWHCDSQWSGDRVITTSTRTWALPTYNNHLYKQISSRSGASNDNHYFGYSTPWGYFDFNGFHCHFSPRDWQRLINNNWGFRPKRLNFKLFNIQVKEVTQNDGTTTIANNLTSTVQVFTDSEYQLPHVLGSAHQGCLPPFPADVFMVPQYGYLTLNNGSQAVGRSSFYCPEYFPSQMLRTGNNFTFSYTFEDVPFHSSYAHSQSLDRLMNPLIDQYLYYLNKTQSNSGTLQQSRLLFSQAGPTSMSLQAKNWLPGPCYRQQRLSKQANGNNNSNFPWTAATKYHLNGRDSLVNPGPAMASHKDDEEKFFPMHGTLIFGKQGTNANDADLDNVMITDEEEIRTTNPVATEQYGTVSNNLQNSNTGPTTGTVNHQGALPGMVWQDRDVYLQGPIWAKIPHTDGHFHPSPLMGGFGLKHPPPQIMIKNTPVPANPPTNFSSAKFASFITQYSTGQVSVEIEWELQKENSKRWNPEIQYTSNYNKSVNVDFTVDTNGVYSEPRPIGTRYLTRNL

SEQ ID NO: 2824 - protein, 735 aa, Artificial Sequence
  Description of Artificial Sequence: Synthetic polypeptide
MAADGYLPDWLEDTLSEGIRQWWKLKPGPPPPKPAERHKDDSRGLVLPGYKYLGPFNGLDKGEPVNEADAAALEHDKAYDRQLDSGDNPYLKYNHADAEFQERLKEDTSFGGNLGRAVFQAKKRVLEPLGLVEEPVKTVPGKKRPVEHSPVEPDSSSGTGKAGQQPARKRLNFGQTGDADSVPDPQPLGQPPAAPTSLGSTTMATGSGAPMADNNEGADGVGNSSGNWHCDSQWSGDRVITTSTRTWALPTYNNHPYKQISSQSGASNDNHYFGYSTPWGYFDFNRFHCHFSPRDWQRLINNNWGFRPKRLNFKLFNIQVKEVTQNDGTTTIANNLTSTVQVFTDSEYQLPYVLGSAHQGRLPPFPADVFMVPQYGYLTLNNGSQAVGRSSFYCLEYFPSQMLRTGNNFTFSYTFEDVPFHSSYAHSQSLDRLMNPLIDQYLYYLNKTQSNSGTLQQSRLLFSQAGPTSMSLQAKNWLPGPCYRQQRLSKQADDNNNSNFPWTAATKYHLNGRDSLVNPGPAMASHKDDEEKFFPMHGTLIFGKQGTNANDADLDNVMITDEEEIRTTNPVATEQYGTVSNNLQNSNTGPTTGTVNHQGALPGMVWQDRDVYLQGPIWAKIPHTDGHFHPSPLMGGFGLKHPPPQIMIKNTPVPANPPTNFSSAKFASFITQYSTGQVSVEIEWELQKENSKRWNPEIQYTSNYNKSVNVDFTVDANGVYSEPRPIGTRYLTRNL

SEQ ID NO: 2825 - protein, 735 aa, Artificial Sequence
  Description of Artificial Sequence: Synthetic polypeptide
MAADGYLPDWLEDTLSEGIRQWWKLKPGPPPPKPAERHKDDSRGLVLSGYKYLGPFNGLDKGEPVNEADAAALEHDKAYDRQLDSGDNPYLKYNHADAEFQERLKEDTSFGGNLGRAVFQAKKRVLEPLGLVEEPVKTAPGKKRPVEHSPVEPDSSSGTGKAGQQPARKRLNFGQTGDADSVPDPQPLGQPPAAPTSLGSTTMATGSGAPMADNNEGADGVGNSSGNWHCDSQWSGDRVITTSTRTWALPTYNNHLYKQISSQSGASNDNHYFGYSTPWGYFDFNRFHCHFSPRDWQRLINNNWGFRPKRLNFKLFNIQVKEVTQNDGTTTIANNLTSTVQVFTDSEYQLPYVLGSAHQGCLPPFPADVFMVPQYGYLTLNNGSQAVGRSSFYCLEYFPSQMLRTGNNFTFSYTFEDVPFHSSYAHSQSLDRLMNPLIDQYLYYLNKTQSNSGTLQQSRLLFSQAGPTSMSLQAKNWLPGPCYRQQRLSKQANDNNNSNFPWTAATKYHLNGRDSLVNPGPAMASHKDDEEKFFPMHGTLIFGKQGTNANDADLDNVMITDEEEIRTTNPVATEQYGTVSNNLQNSNTGPTTGTVNHQGALPGMVWQDRDVYLQGPIWAKIPHTDGHFHPSPLMGGFGLKHPPPQIMIKNTPVPANPPTNFSSAKFASFITQYSTGQVSVEIEWELQKENSKRWNPEIQYTSNYNKSVNVDFTVDTNGVYSEPRPIGTRYLTRNL

SEQ ID NO: 2826 - protein, 735 aa, Artificial Sequence
  Description of Artificial Sequence: Synthetic polypeptide
MAADGYLPDWLEDTLSEGIRQWWKLKPGPPPPKPAERHKDDSRGLVLPGYKYLGPFNGLDKGEPVNEADAAALEHDKAYDRQLDSGDNPYLKYNHADAEFQERLKEDTSFGGNLGRAVFQAKKRVLEPLGLVEEPVKTAPGKKRPVEHSPVEPDSSSGTGKAGQQPARKRLNFGQTGDADSVPDPQPLGQPPAAPTSLGSTTMATGSGAPMADNNEGADGVGNSSGNWHCDSQWSGDRVITTSTRTWALPTYNNHLYKQISSQSGASNDNHYFGYSTPWGYFDFNRFHCHFSPRDWQRLINNNWGFRPKRLNFKLFNIQVKEVTQNDGTTTIANNLTSTVQVFTDSEYQLPYVLGSAHQGCLPPFPADVFMVPQYGYLTLNNGSQAVGRSSFYCLEYFPSQMLRTGNNFTFSYTFEDVPFHSSCAHSQSLDRLMNPLIDQYLYYLNKTQSNSGTLQQSRLLFSQAGPTSMSLQAKNWLPGPCYRQQRLSKQANDNNNSNFPWTAATKYHLNGRDSLVNPGPAMASHKDDEEKFFPMHGTLIFGKQGTNANDADLDNVMITDEEEIRTTNPVATEQYGTVSNNLQNSNTGPTTGTVNHQGALPGMVWQDRDVYLQGPIWAKIPHTDGHFHPSPLMGGFGLKHPPPQIMIKNTPVPANPPTNFSSAKFASFITQYSTGQVSVEIEWELQKENSKRWNPEIQYTSNYNKSVNVDFTVDTNGVYSEPRPIGTRYLTRNL

SEQ ID NO: 2827 - protein, 735 aa, Artificial Sequence
  Description of Artificial Sequence: Synthetic polypeptide
MAADGYLPDWLEDTLSEGIRQWWKLKPGPPPPKPAERHKDDSRGLVLPGYKYLGPFNGLDKGEPVNEADAAALEHDKAYDRQLDSGDNPYLKYNHADAEFQERLKEDTSFGGNLGRAVFQAKKRVLEPLGLVEEPVKTAPGKKRPVEHSPVEPDSSSGTGKAGQQPARKRLNFGQTGDADSVPDPQPLGQPPAAPTSLGSTTMATGSGAPMADNNEGADGVGNSSGNWHCDSQWSGDRVITTSTRTWALPTYNNHLYKQISSQSGASNDNHYFGYSTPWGYFDFNRFHCHFSPRDWQRLINNNWGFRPKRLNFKLFNIQVKEVTQNDGTTTIANNLTSTVPVFTDSEYQLPYVLGSAHQGCLPPFPADVFMVPQYGYLTLNNGSQAVGRSSFYCLEYFPSQMLRTGNNFTFSYTFEDVPFHSSYAHSQSLDRLMNPLIDQYLYYLNKTQSNSGTLQQSRLLFSQAGPTSMSLQAKNWLPGPYYRQQRLSKQANDNNNSNFPWTAATKYHPNGRDSLVDPGPAMASHKDDEEKFFPMHGTLIFGKQGTNANDADLDNVMITDEEEIRTTNPVATGQYGTVSNNLQNSNTGPTTGTVNHQGALPGMVWQDRDVYLQGPIWAKIPHTDGHFHPSPLMGGFGLKHPPPQIMVKNTPVPANPPTNFSSAKFASFITRYSTGQVSVEIEWELQKENSKRWNPEIQYTSNYNKSVNVDFTVDTNGVYSEPRPIGTRYLTRNL

SEQ ID NO: 2828 - protein, 735 aa, Artificial Sequence
  Description of Artificial Sequence: Synthetic polypeptide
MAADGYLPDWLEDTLSEGIRQWWKLKPGPPPPKPAERHKDDSRGLVLPGYKYLGPFNGPDKGEPVNEADAAALEHDKAYDRQLDSGDNPYLKYNHADAEFQERLKEDTSFGGNLGRAVFQAKKRVLEPLGLVEEPVKTAPGKKRPVEHSPVEPDSSSGTGKAGQQPARKRLNFGQTGDADSVPDPQPLGQPPAAPTSLGSTTMATGSGAPMADNNEGADGVGNSSGNWHCDSQWSGDRVITTSTRTWALPTYNNHLYKQISSQSGASNDNHYFGYSTPWGYFDFNRFHCHFSPRDWQRLINNNWGFRPKRLNFRLFNIQVKEVTQNDGTTTIANNLTSTVQVFTDSEYQLPYVLGSAHQGCLPPFPADVFMVPQYGYLTLNNGSQAVGRSSFYCLEYFPSQMLRTGNNFTFSYTFEDVPFHSSYAHSQSLDRLMNPLIDQYLYYLNKTQSNSGTLQQSRLLFSQAGPTSMSLQAKNWLPGPCYRQQRLSKQANDNNNSNFPWTAATKYHLNGRDSLVNPGPAMASHKDDEEKFFPMHGTLIFGKQGTNANDADLDNVMITDEEEIRTTNPVATEQYGTVSNNLQNSNTGPTTGTVNHQGALPGMVWQDRDVYLQGPIWAKIPHTDGHFHPSPLMGGFGLKHPPPQIMIKNTPVPANPPTNFSSAKFASFITQYSTGQVSVEIEWELQKENSKRWNPEIQYTSNYNKSVNVDFTVDTNGVYSEPRPIGTRYLTRNL

SEQ ID NO: 2829 - protein, 735 aa, Artificial Sequence
  Description of Artificial Sequence: Synthetic polypeptide
MAADGYLPDWLEDTLSEGIRQWWKLKPGPPPPKPAERHKDDSRGLVLPGYKYLGPFNGPDKGEPVNEADAAALEHDKAYDRQLDSGDNPYLKYNHADAEFQERLKEDTSFGGNLGRAVFQAKKRVLEPLGLVEEPVKTAPGKKRPVEHSPVEPDSSSGTGKAGQQPARKRLNFGQTGDADSVPDPQPLGQPPAAPTSLGSTTMATGSGAPMADNNEGADGVGNSSGNWHCDSQWSGDRVITTSTRTWALPTYNNHLYKQISSQSGASNDNHYFGYSTPWGYFDFNRFHCHFSPRDWQRLINNNWGFRPKRLNFRLFNIQVKEVTQNDGTTTIANNLTSTVQVFTDSEYQLPYVLGSAHQGCLPPFPADVFMVPQYGYLTLNNGGQAVGRSSFYCLEYFPSQMLRTGDNFTFSYTFEDVPFHSSYAHSQSLDRLMNPLIDQYLYYLNKTQSNSGTLQQSRLLFSQAGPTSMSLQAKNWLPGPCYRQQRLSKQANDNNNSNFPWTAATKYHLNGRDSLVNPGPAMASHKDDEEKFFPMHGTLIFGKQGTNANDADLDNVMITDEEEIRTTNPVATEQYGTVSNNLQNSNTGPTTGTVNHQGALPGMVWQDRDVYLQGPIWAKIPHTDGHFHPSPLMGGFGLKHPPPQIMIKNTPVPANPPTNFSSAKFASFITQYSTGQVSVEIEWELQKENSKRWNPEIQYTSNYNKSVNVDFTVDTNGVYSEPRPIGTRYLTRNL

SEQ ID NO: 2830 - protein, 735 aa, Artificial Sequence
  Description of Artificial Sequence: Synthetic polypeptide
MAADGYLPDWLEDTLSEGIRQWWKLKPGPPPPKPAERHKDDSRGLVLPGYKYLGPFNGLDKGEPVNEADAAALEHDKAYDRQLDSGDNPYLKYNHADAEFQERLKEDTSFGGNLGRAVFQAKKRVLEPLGLVEEPVKTAPGKKRPVEHSPVEPDSSSGTGKAGQQPARKRLNFGQTGDADSVPDPQPLGQPPAAPTSLGSTTMATGSGAPMADNNEGADGVGNSSGNWHCDSQWSGDRVITTSTRTWALPTYNNHLYKQISSQSGASNDNHYFGYSTPWGYFDFNRFHCHFSPRDWQRLINNNWGFRPKRLNFKLFNIQVKEVTQNDGTTTIANNLTSTVQVFTDSEYQLPYVLGSAHQGCLPPFPADVFMVPQYGYLTLNNGSQAVGRSSFYCLEYFPSQMLRTGNNFTFSYTFEDVPFHSSYAHSQSLDRLMNPLIDQYLYYLNKTQSNSGTLQQSRLLFSQAGPTSMSLQAKNWLPGPCYRQQRLSKQANDNNNSNFPWTAATKYHLNGRDSLVNPGPAMASHKDDEEKFFPMHGTLIFGKQGTNANDADLDNAMITDEEEIRTTNPVATEQYGTVSNNLQNSNTGPTTGTVNHQGALPGMVWQDRDVYLQGPIWAKIPHTDGHFHPSPLMGGFGLKHPPPQIMIKNTPVPANPPTNFSSAKFASFITQYSTGQVSVEIEWELQKENSKRWNPEIQYTSNYNKSVNVDFTVDTNGVYSEPRPIGTRYLTRNL

SEQ ID NO: 2831 - protein, 735 aa, Artificial Sequence
  Description of Artificial Sequence: Synthetic polypeptide
MAADGYLPDWLEDTLSEGIRQWWKLKPGPPPPKPAERHKDDSRGLVLPGYKYLGPFNGLDKGEPVNEANAAALEHDKAYDRQLDSGDNPYLKYNHADAEFQERLKEDTSFGGNLGRAVFQAKKRVLEPLGLVEEPVKTAPGKKRPVEHSPVEPDSSSGTGKAGQQPARKRLNFGQTGDADSVPDPQPLGQPPAAPTSLGSTTMATGSGAPMADNNEGADGVGNSSGNWHCDSQWSGDRVITTSTRTWALPTYNNHLYKQISSQSGASNDNHYFGYSTPWGYFDFNRFHCHFSPRDWQRLINNNWGFRPKRLNFKLFNIQVKEVTQNDGTTTIANNLTSTVQVFTDSEYQLPYVLGSAHQGCLPPFPADVFMVPQYGYLTLNNGSQAVGRSSFYCLEYFPSQMLRTGNNFTFSYTFEDVPFHSSYAHSQSLDRLMNPLIDQYLYYLNKTQSNSGTLQQSRLLFSQAGPTSMSLQAKNWLPGPCYRQQRLSKQANDNNNSNFPWTAATKYHLNGRDSLVNPGPAMASHKDDEEKFFPMHGTLIFGKQGTNANDADLDNVMITDEEEIRTTNPVATEQYGTVSNNLQNSNTGPTTGTVNHQGALPGMVWQDRDVYLQGPIWAKIPHTDGHFHPSPLMGGFGLKHPPPQIMIKNTPVPANPPTNFSSAKFASFITQYSTGQVSVEIEWELQKENSKRWNPETQYTSNYNKSVNVDFTVDTNGVYSEPRPIGTRYLTRNL

SEQ ID NO: 2832 - protein, 735 aa, Artificial Sequence
  Description of Artificial Sequence: Synthetic polypeptide
MAADGYLPDWLEDTLSEGIRQWWKLKPGPPPPKPAERHKDDSRGLVLPGYKYLGPFNGPDKGEPVNEADAAALEHDKAYDRQLDSGDNPYLKYNHADAEFQERLKEDTSFGGNLGRAVFQAKKRVLEPLGLVEEPVKTAPGKKRPVEHSPVEPDSSSGTGKAGQQPARKRLNFGQTGDADSVPDPQPLGQPPAAPTSLGSTTMATGSGAPMADNNEGADGVGNSSGNWHCDSQWSGDRVITTSTRTWALPTYNNHLYKQISSQSGASNDNHYFGYSTPWGYFDFNRFHCHFSPRDWQRLINNNWGFRPKRLNFRLFNIQVKEVTQNDGTTTIANNLTSTVQVFTDSEYQLPYVLGSAHQGCLPPFPADVFMVPQYGYLTLNNGSQAVGRSSFYCLEYFPSQMLRTGDNFTFSYTFEDVPFHSSYAHSQSLDRLMNPLIDQYLYYLNKTQSNSGTLQQSRLLFSQAGPTSMSLQAKNWLPGPCYRQQRLSKQANDNNNSNFPWTAATKYHLNGRDSLVNPGPAMASHKDDEEKFFPMHGTLIFGKQGTNANDADLDNVMITDEEEIRTTNPVATEQYGTVSNNLQNSNTGPTTGTVNHQGALPGMVWQDRDVYLQGPIWAKIPHTDGHFHPSPLMGGFGLKHPPPQIMIKNTPVPANPPTNFSSAKFASFITQYSTGQVSVEIEWELQKENSKRWNPEIQYTSNYNKSVNVDFTVDTNGVYSEPRPIGTRYLTRNL

SEQ ID NO: 2833 - protein, 735 aa, Artificial Sequence
  Description of Artificial Sequence: Synthetic polypeptide
MAADGYLPDWLEDTLSEGIRQWWKLKPGPPPPKPAERHKDDSRGLVLPGYKYLGPFNGLDKGEPVNEADAAALEHDKAYDRQLDSGDNPYLKYNHADAEFQERLKEDTSFGGNLGRAVFQAKKRVLEPLGLVEEPVKTAPGKKRPVEHSPVEPDSSSGTGKAGQQPARKGLNFGQTGDADSVPDPRPLGQPPAAPASLGSTTMATGSGAPMADNNEGADGVGNSSGNWHCDSQWLGDRVITTSTRTWALPTYNNHLYKQISSQSGASNDNHYFGYSTPWGYFDFNRFHCHFSPRDWQRLINNNWGFRPKRLNFKLFNIQVKEVTQNDGTTTIANNLTSTVPVFTDSEYQLPYVLGSAHQGCLPPFPADVFMVPQYGYLTLNNGSQAVGRSSFYCLEYFPSQMLRTGNNFTFSYTFEDVPFHSSYAHSQSLDRLMNPLIDQYLYYLNKTQSNSGTLQQSRLLFSQAGPTSMSLQAKNWLPGPYYRQQRLSKQANDNNNSNFPWTAATKYHPNGRDSLVDPGPAMASHKDDEEKFFPMHGTLIFGKQGTNANDADLDNVMITDEEEIRTTNPVATGQYGTVSNNLQNSNTGPTTGTVNHQGALPGMVWQDRDVYLQGPIWAKIPHTDGHFHPSPLMGGFGLKHPPPQIMVKNTPVPANPPTNFSSAKFASFITRYSTGQVSVEIEWELQKENSKRWNPEIQYTSNYNKSVNVDFTVDTNGVYSEPRPIGTRYLTRNL

SEQ ID NO: 2834 - protein, 735 aa, Artificial Sequence
  Description of Artificial Sequence: Synthetic polypeptide
MAADGYLPDWLEDTLSEGIRQWWKLKPGPPPPKPAERHKDDSRGLVLPGYKYLGPFNGLDKGEPVNEADAAALEHDKAYDRQLDSGDNPYLKYNHADAEFQERLKEDTSFGGNLGRAVFQAKKRVLEPLGLVEEPVKTVPGKKRPVEHSPVEPDSSSGTGKAGQQPARKRLNFGQTGDADSVPDPQPLGQPPAAPTSLGSTTMATGSGAPMADNNEGADGVGNSSGNWHCDSQWSGDRVITTSTRTWALPTYNNHPYKQISSQSGASNDNHYFGYSTPWGYFDFNRFHCHFSPRDWQRLINNNWGFRPKRLNFKLFNIQVKEVTQNDGTTTIANNLTSTVQVFTDSEYQLPYVLGSAHQGRLPPFPADVFMVPQYGYLTLNNGSQAVGRSSFYCLEYFPSQMLRTGNNFTFSYTFEDVPFHSSYAHSQSLDRLMNPLIDQYLYYLNKTQSNSGTLQQSRLLFSQAGPTSMSLQAKNWLPGPCYRQQRLSKQADDNNNSNFPWTAATKYHLNGRDSLVNPGPAMASHKDDEEKFFPMHGTLIFGKQGTNANDADLDNVMITDEEEIRTTNPVATEQYGTVSNNLQNSNTGPTTGTVNHQGALPGMVWQDRDVYLQGPIWAKIPHTDGHFHPSPLMGGFGLKHPPPQIMIKNTPVPANPPTNFSSAKFASFITQYSTGQVSVEIEWELQKENSKRWNPEIQYTSNYNKSVNVDFTVDTNGVYSEPRPIGTRYLTRNL

SEQ ID NO: 2835 - protein, 735 aa, Artificial Sequence
  Description of Artificial Sequence: Synthetic polypeptide
MAADGYLPDWLEDTLSEGIRQWWKLKPGPPPPKPAERHKDDSRGLVLPGYKYLGPFNGLDKGEPVNEADAAALEHDKAYDRQLDSGDNPYLKYNHADAEFQERLKEDTSFGGNLGRAVFQAKKRVLEPLGLVEEPVKTAPGKKRPVEQSPAEPDSSSGTGKAGNQPARKRLNFGQTGDADSVPDPQPLGQPPAAPSGLGSTTMATGSGAPMADNNEGADGVGNSSGNWHCDSQWLGDRVITTSTRTWALPTYNNHLYKQISSQSGASNDNHYFGYSTPWGYFDFNRFHCHFSPRDWQRLINNNWGFRPKRLNFKLFNIQVKEVTQNDGTTTIANNLTSTVQVFTDSEYQLPYVLGSAHQGCLPPFPADVFMVPQYGYLTLNNGSQAVGRSSFYCLEYFPSQMLRTGNNFTFSYTFEDVPFHSSYAHSQSLDRLMNPLIDQYLYYLNKTQSNSGTLQQSRLLFSQAGPTSMSLQAKNWLPGPCYRQQRLSKQANDNNNSNFPWTAATKYHLNGRDSLVNPGPAMASHKDDEEKFFPMHGTLIFGKQGTNANDADLDNVMITDEEEIRTTNPVATEQYGTVSNNLQNSNTGPTTGTVNHQGALPGMVWQDRDVYLQGPIWAKIPHTDGHFHPSPLMGGFGLKHPPPQIMIKNTPVPANPPTNFSSAKFASFITQYSTGQVSVEIEWELQKENSKRWNPEIQYTSNYNKSVNVDFTVDTNGVYSEPRPIGTRYLTRNL

SEQ ID NO: 2836 - protein, 734 aa, Artificial Sequence
  Description of Artificial Sequence: Synthetic polypeptide
MAADGYLPDWLEDTLSEGIRQWWKLKPGPPPKPAERHKDDSRGLVLPGYKYLGPFNGLDKGEPVNEADAAALEHDKAYDRQLDSGDNPYLKYNHADAEFQERLKEDTSFGGNLGRAVFQAKKRVLEPLGLVEEPVKTAPGKKRPVEQSPAEPDSSSGTGKAGNQPARKRLNFGQTGDADSVPDPQPLGQPPAAPSGLGSTTMATGSGAPMADNNEGADGVGNSSGNWHCDSQWLGDRVITTSTRTWALPTYNNHLYKQISSQSGASNDNHYFGYSTPWGYFDFNRFHCHFSPRDWQRLINNNWGFRPKRLNFKLFNIQVKEVTQNDGTTTIANNLTSTVQVFTDSEYQLPYVLGSAHQGCLPPFPADVFMVPQYGYLTLNNGSQAVGRSSFYCLEYFPSQMLRTGNNFTFSYTFEDVPFHSSYAHSQSLDRLMNPLIDQYLYYLNKTQSNSGTLQQSRLLFSQAGPTSMSLQAKNWLPGPCYRQQRLSKQANDNNNSNFPWTAATKYHLNGRDSLVNPGPAMASHKDDEEKFFPMHGTLIFGKQGTNANDADLDNVMITDEEEIRTTNPVATEQYGTVSNNLQNSNTGPTTGTVNHQGALPGMVWQDRDVYLQGPIWAKIPHTDGHFHPSPLMGGFGLKHPPPQIMIKNTPVPANPPTNFSSAKFASFITQYSTGQVSVEIEWELQKENSKRWNPEIQYTSNYNKSVNVDFTVDTNGVYSEPRPIGTRYLTRNL

SEQ ID NO: 2837 - protein, 735 aa, Artificial Sequence
  Description of Artificial Sequence: Synthetic polypeptide
MAADGYLPDWLEDTLSEGIRQWWKLKPGPPPPKPAERHKDDSRGLVLPGYKYLGPFNGLDKGEPVNEADAAALEHDKAYDRQLDSGDNPYLKYNHADAEFQERLKEDTSFGGNLGRAVFQAKKRVLEPLGLVEEPVKTAPGKKRPVEQSPAEPDSSSGTGKAGNQPARKRLNFGQTGDADSVPDPQPLGQPPAAPSGLGSTTMATGSGAPMADNNEGADGVGNSSGNWHCDSQWLGDRVITTSTRTWALPTYNNHLYKQISSQSGASNDNHYFGYSTPWGYFDFNRFHRHFSPRDWQRLINNNWGFRPKRLNFKLFNIQVKEVTQNDGTTTIANNLTSTVQVFTDSEYQLPYVLGSAHQGCLPPFPADVFMVPQYGYLTLNNGSQAVGRSSFYCLEYFPSQMLRTGNNFTFSYTFEDVPFHSSYAHSQSLDRLMNPLIDQYLYYLNKTQSNSGTLQQSRLLFSQAGPTSMSLQAKNWLPGPCYRQQRLSKQANDNNNSNFPWTAATKYHLNGRDSLVNPGPAMASHKDDEEKFFPMHGTLIFGKQGTNANDADLDNVMITDEEEIRTTNPVATEQYGTVSNNLQNSNTGPTTGTVNHQGALPGMVWQDRDVYLQGPIWAKIPHTDGHFHPSPLMGGFGLKHPPPQIMIKNTPVPANPPTNFSSAKFASFITQYSTGQVSVEIEWELQKENSKRWNPEIQYTSNYNKSVNVDFTVDTNGVYSEPRPIGTRYLTRNL

SEQ ID NO: 2838 - protein, 734 aa, Artificial Sequence
  Description of Artificial Sequence: Synthetic polypeptide
MAADGYLPDWLEDTLSEGIRQWWKLKPGPPPPKPAERHKDDSRGLVLPGYKYLGPFNGLDKGEPVNEADAAALEHDKAYDRQLDSGDNPYLKYNHADAEFQERLKEDTSFGGNLGRAVFQAKKRVLEPLGLVEEPVKTAPGKKRPVEQSPAEPDSSSGTGKAGNQPARKRLNFGQTGDADSVPDPQPLGQPPAAPSGLGSTTMATGSGAPMADNNEGADGVGNSSGNWHCDSQWLGDRVITTSTRTWALPTYNNHLYKQISSQSGASNDNHYFGYSTPWGYFDFNRFHCHFSPRDWQRLINNNWGFRPKRLNFKLFNIQVKEVTQNDGTTTIANNLTSTVQVFTDSEYQLPYVLGSAHQGCLPPFPADVFMVPQYGYLTLNNGSQAVGRSSFYCLEYFPSQMLRTGNNFTFSYTFEDVPFHSSYAHSQSLDRLMNPLIDQYLYYLNKTQSNSGTLQQSRLLFSQAGPTSMSLQAKNWLPGPCYRQQRLSKQANDNNSNFPWTAATKYHLNGRDSLVNPGPAMASHKDDEEKFFPMHGTLIFGKQGTNANDADLDNVMITDEEEIRTTNPVATEQYGTVSNNLQNSNTGPTTGTVNHQGALPGMVWQDRDVYLQGPIWAKIPHTDGHFHPSPLMGGFGLKHPPPQIMIKNTPVPANPPTNFSSAKFASFITQYSTGQVSVEIEWELQKENSKRWNPEIQYTSNYNKSVNVDFTVDTNGVYSEPRPIGTRYLTRNL

SEQ ID NO: 2839 - protein, 735 aa, Artificial Sequence
  Description of Artificial Sequence: Synthetic polypeptide
MAADGYLPDWLEDTLSEGIRQWWKLKPGPPPPRPAERHQDDSRGLVLPGYKYLGPFNGLDKGEPVNEADAAALEHDKAYDRQLDSGDNPYLKYNHADAEFQERLKEDTSFGGNLGRAVFQAKKRVLEPLGLVEEPVKTAPGKKRPVEHSPAEPDSSSGTGKAGQQPARKRLNFGQTGDADSVPDPQPLGQPPAAPTSLGSTTMATGSGAPMADNNEGADGVGNSSGNWHCDSQWLGDRVITTSTRTWALPTYNNHLYKQISSQSGASNDNHYFGYSTPWGYFDFNRFHCHFSPRDRQRLINNNWGFRPKRLNFKLFNIQVKEVTQNDGTTTIANNLTSTVQVFTDSEYQLPYVLGSAHQGCLPPFPADVFMVPQYGYLTLNNGSQAVGRSSFYCLEYFPSQMLRTGNNFTFSYTFEDVPFHSSYAHSQSLDRLMNPLIDQYLYYLNRTQSNSGTLQQSRLLFSQAGPTSMSLQAKNWLPGPCYRQQRLSKQANDNNNSNFPWTAATKYHLNGRDSLVNPGPAMASHKDDEEKFFPMHGTLIFGKQGTNANDADLEHVMITDEEEIRTTNPVATEQYGNVSNNLQNSNTGPTTENVNHQGALPGMVWQDRDVYLQGPIWAKIPHTDGHFHPSPLMGGFGLKHPPPQIMIKNTPVPANPPTNFSAAKFASFITQYSTGQVSVEIEWELQKENSKRWNPEIQYTSNYNKSVNVDFTVDANGVYSEPRPIGTRYLTRNL

SEQ ID NO: 2840 - protein, 735 aa, Artificial Sequence
  Description of Artificial Sequence: Synthetic polypeptide
MAADGYLPDWLEDTLSEGIRQWWKLKPGPPPPRPAERHQDDSRGLVLPGYKYLGPFNGLDKGEPVNEADAAALEHDKAYDRQLDSGDNPYLKYNHADAEFQERLKEDTSFGGNLGRAVFQAKKRVLEPLGLVEEPVKTAPGKKRPVEHSPAEPDSSSGTGKAGQQPARKRLNFGQTGDADSVPDPQPLGQPPAAPTSLGSTTMATGSGAPMADNNEGADGVGNSSGNWHCDSQWLGDRVITTSTRTWALPTYNNHLYKQISSQSGASNDNHYFGYSTPWGYFDFNRFHCHFSPRDWQRLINNNWGFRPKRLNFKLFNIQVKEVTQNDGTTTIANNLTSTVQVFTDSEYQLPYVLGSAHQGCLPPFPADVFMVPQYGYLTLNNGSQAVGRSSFYCLEYFPSQMLRTGNNFTFSYTFEDVPFHSSYAHSQSLDRLMNPLIDQYLYYLNRTQSNSGTLQQSRLLFSQAGPTSMSLQAKNWLPGPCYRQQRLSKQANDNNNSNFPWTAATKYRLNGRDSLVNPGPAMASHKDDEEKFFPMHGTLIFGKQGTNANDADLEHVMITDEEEIRTTNPVATEQYGNVSNNLQNSNTGPTTENVNHQGALPGMVWQDRDVYLQGPIWAKIPHTDGHFHPSPLMGGFGLKHPPPQIMIKNTPVPANPPTNFSAAKFASFITQYSTGQVSVEIEWELQKENSKRWNPEIQYTSNYNKSVNVDFTVDANGVYSEPRPIGTRYLTRNL

SEQ ID NO: 2841 - protein, 735 aa, Artificial Sequence
  Description of Artificial Sequence: Synthetic polypeptide
MAADGYLPDWLEDTLSEGIRQWWKLKPGPPPPRPAERHQDDSRGLVLPGYKYLGPFNGLDKGEPVNEADAAALEHDKAYDRQLDSGDNPYLKYNHADAEFQERLKEDTSFGGNLGRAVFQAKKRVLEPLGLVEEPVKTAPGKKRPVEHSPAEPDSSSGTGKAGQQPARKRLNFGQTGDADSVPDPQPLGQPPAAPTSLGSTTMATGSGAPMADNNEGADGVGNSSGNWHCDSQWLGVRVITTSTRTWALPTYNNHLYKQISSQSGASNDNHYFGYSTPWGYFDFNRFHCHFSPRDRQRLINNNWGFRPKRLNFKLFNIQVKEVTQNDGTTTIANNLTSTVQVFTDSEYQLPYVLGSAHQGCLPPFPADVFMVPQYGYLTLNNGSQAVGRSSFYCLEYFPSQMLRTGNNFTFSYTFEDVPFHSSYAHSQSLDRLMNPLIDQYLYYLNRTQSNSGTLQQSRLLFSQAGPTSMSLQAKNWLPGPCYRQQRLSKQANDNNNSNFPWTAATKYHLNGRDSLVNPGPAMASHKDDEEKFFPMHGTLIFGKQGTNANDADLEHVMITDEEEIRTTNPVATEQYGNVSNNLQNSNTGPTTENVNHQGALPGMVWQDRDVYLQGPIWAKIPHTDGHFHPSPLMGGFGLKHPPPQIMIKNTPVPANPPTNFSAAKFASFITQYSTGQVSVEIEWELQKENSKRWNPEIQYTSNYNKSVNVDFTVDANGVYSEPRPIGTRYLTRNL

SEQ ID NO: 2842 - protein, 735 aa, Artificial Sequence
  Description of Artificial Sequence: Synthetic polypeptide
MAADGYLPDWLEDTLSEGIRQWWKLKPGPPPPRPAERHQDDSRGLVLPGYKYLGPFNGLDKGEPVNEADAAALEHDKAYDRQLDSGDNPYLKYNHADAEFQERLKEDTSFGGNLGRAVFQAKKRVLEPLGLVEEPVKTAPGKKRPVEHSPAEPDSSSGTGKAGQQPARKRLNFGQTGDADSVPDPQPLGQPPAAPTSLGSTTMAIGSGAPMADNNEGADGVGNSSGNWHCDSQWLGDRVITTSTRTWALPTYNNHLYKQISSQSGASNDNHYFGYSTPWGYFDFNRFHCHFSPRDWQRLINNNWGFRPKRLNFKLFNIQVKEVTQNDGTTTIANNLTSTVQVFTDSEYQLPYVLGSAHQGCLPPFPADVFMVPQYGYLTLNNGSQAVGRSSFYCLEYFPSQMLRTGNNFTFSYTFEDVPFHSSYAHSQSLDRLMNPLIDQYLYYLNRTQSNSGTLQQSRLLFSQAGPTSMSLQAKNWLPGPCYRQQRLSKQANDNNNSNFPWTAATKYHLNGRDSLVNPGPAMASHKDDEEKFFPMHGTLIFGKQGTNANDADLEHVMITDEEEIRTTNPVATEQYGNVSNNLQNSNTGPTTENVNHQGALPGMVWQDRDVYLQGPIWAKIPHTDGHFHPSPLMGGFGLKHPPPQIMIKNTPVPANPPTNFSAAKFASFITQYSTGQVSVEIEWELQKENSKRWNPEIQYTSNYNKSVNVDFTVDANGVYSEPRPIGTRYLTRNL

SEQ ID NO: 2843 - protein, 735 aa, Artificial Sequence
  Description of Artificial Sequence: Synthetic polypeptide
MAADGYLPDWLEDTLSEGIRQWWKLKPGPPPPRPAERHQDDSRGLVLPGYKYLGPFNGLDKGEPVNEADAAALEHDKAYDRQLDSGDNPYLKYNHADAEFQERLKEDTSFGGNLGRAVFQAKKRVLEPLGLVEEPVKTAPGKKRPVEHSPAEPDSSSGTGKAGQQPARKRLNFGQTGDADSVPDPQPLGQPPAAPTSLGSTTMATGSGAPMADNNEGADGVGNSSGNWHCDSQWLGDRVITTSTRTWALPTYNNHLYKQISSQSGASNDNHYFGYSTPWGYLDFNRFHCHFSPRDWQRLINNNWGFRPKRLNFKLFNIQVKEVTQNDGTTTIANNLTSTVQVFTDSEYQLPYVLGSAHQGCLPPFPADVFMVPQYGYLTLNNGSQAVGRSSFYCLEYFPSQMLRTGNNFTFSYTFEDVPFHSSYAHSQSLDRLMNPLIDQYLYYLNRTQSNSGTLQQSRLLFSQAGPTSMSLQAKNWLPGPCYRQQRLSKQANDNNNSNFPWTAATKYHLNGRDSLVNPGPAMASHKDDEEKFFPMHGTLIFGKQGTNANDADLEHVMITDEEEIRTTNPVATEQYGNVSNNLQNSNTGPTTENVNHQGALPGMVWQDRDVYLQGPIWAKIPHTDGHFHPSPLMGGFGLKHPPPQIMIKNTPVPANPPTNFSAAKFASFITQYSTGQVSVEIEWELQKENSKRWNPEIQYTSNYNKSVNVDFTVDANGVYSEPRPIGTRYLTRNL

SEQ ID NO: 2844 - protein, 735 aa, Artificial Sequence
  Description of Artificial Sequence: Synthetic polypeptide
MAADGYLPDWLEDTLSEGIRQWWKLKPGPPPPKPAERHKDDSRGLVLPGYKYLGPFNGLDKGEPVNEADAAALEHDKAYDRQLDSGDNPYLKYNHADAEFQERLKEDTSFGGNLGRAVFQAKKRVLEPLGLVEEPVKTAPGKKRPVEHSPVEPDSSSGTGKAGQQPARKRLNFGQTGDADSVPDPQPLGQPPAAPTSLGSTTMATGSGAPMADNNEGADGVGNSSGNWHCDSQWLGDRVITTSTRTWALPTYNNHLYKQISSQSGAANDNHYFGYSTPWGYFDFNRFHCHFSPRDWQRLINNNWGFRPKRLNFKLFNIQVKEVTQNDGTTTIANNLTSTVQVFTDSEYQLPYVLGSAHQGCLPPFPADVFMVPQYGYLTLNNGSQAVGRSSFYCLEYFPSQMLRTGNNFTFSYTFEDVPFHSSYAHSQSLDRLMNPLIDQYLYYLNKTQSNSGTLQQSRLLFSQAGPTSMSLQAKNWLPGPCYRQQRLSKQANDNNNSNFPWTAATKYHLNGRDSLVNPGPAMASHKDDEEKFFPMHGTLIFGKQGTNANDADLDNVMITDEEEIRTTNPVATEQYGTVSNNLQNSNTGPTTGTVNHQGALPGMVWQDRDVYLQGPIWAKIPHTDGHFHPSPLMGGFGLKHPPPQIMIKNTPVPANPPTNFSSAKFASFITQYSTGQVSVEIEWELQKENSKRWNPEIQYTSNYNKSVNVDFTVDTNGVYSEPRPIGTRYLTRNL

SEQ ID NO: 2845 - protein, 735 aa, Artificial Sequence
  Description of Artificial Sequence: Synthetic polypeptide
MAADGYLPDWLEDTLSEGIRQWWKLKPGPPPPRPAERHQDDSRGLVLPGYKYLGPFNGLDKGEPVNEADAAALEHDKAYDRQLDSGDNPYLKYNHADAEFQERLKEDTSFGGNLGRAVFQAKKRVLEPLGLVEEPVKTAPGKKRPVEHSPAEPDSSSGTGKAGQQPARKRLNFGQTGDADSVPDPQPLGQPPAAPTSLGSTTMATGSGAPMADNNEGADGVGNSSGNWHCDSQWLGDRVITTSTRTWALPTYNNHLYKQISSQSGASNDNHYFGYSTPWGYFDFNRFHCHFSPRDWQRLINNNWGFRPKRLNFKLFNIQVKEVTQNDGTTTIANNLTSTVQVFTDSEYQLPYVLGSAHQGCLPPFPADVFMVPQYGYLTLNNGSQAVGRSSFYCLEYFPSQMLRTGNNFTFSYTFEDVPFHSSYAHSQSLDRLMNPLIDQYLYYLNRTQSNSGTLQQSRLLFSQAGPTSMSLQAKDWLPGPCYRQQRLSKQANDNNNSNFPWTAATKYHLNGRDSLVNPGPAMASHKDDEEKFFPMHGTLIFGKQGTNANDADLEHVMITDEEEIRTTNPVATEQYGNVSNNLQNSNTGPTTENVNHQGALPGMVWQDRDVYLQGPIWAKIPHTDGHFHPSPPMGGFGLKHPPPQIMIKNTPVPANPPTNFSAAKFASFITQYSTGLVSVEIEWELQKENSKRWNPEIQYTSNYNKSVNVDFTVDANGVYSEPRPIGTRYLTRNL

SEQ ID NO: 2846 - protein, 735 aa, Artificial Sequence
  Description of Artificial Sequence: Synthetic polypeptide
MAADGYLPDWLEDTLSEGIRQWWKLKPGPPPPKPAERHKDDSRGLVLPGYKYLGPFNGLDKGEPVNEADAAALEHDKAYDRQLDSGDNPYLKYNHADAEFQERLKEDTSFGGNLGRAVFQAKKRVLEPLGLVEEPVKTAPGKKRPVEHSPVEPDSSSGTGKAGQQPARKRLNFGQTGDADSVPDPQPLGQPPAAPSGLGTNTMATGSGAPMADNNEGADGVGNSSGNWHCDSTWMGDRVITTSTRTWALPTYNNHLYKQISSQSGASNDNHYFGYSTPWGYFDFNRFHCHFSPRDWQRLINNNWGFRPKRLSFKLFNIQVKEVTQNDGTTTIANNLTSTVQVFTDSEYQLPYVLGSAHQGCLPPFPADVFMVPQYGYLTLNNGSQAVGRSSFYCLEYFPSQMLRTGNNFTFSYTFEDVPFHSSYAHSQSLDRLMNPLIDQYLYYLSKTNAPSGTHQMSRLQFSQAGASDMSGPARNWLPGPCYRQQRVSKQAADNNNSDLPWTGATKYHLNGRDSLVNPGPAMASHKDDEEKFFLMSGVLIFGKQGSNENNVDIEKVMITDEEEIRTTNPVATEQYGSVSTNLQSANTSPATSDVNHQGVLPGMVWQDRDVYLQGPIWAKIPHTDGHFHPSPLMGGFGLKHPPPQILIKNTPVPANPSTTFSAAKFASFITQYSTGQVSVEIEWELQKENSKRWNPEIQYTSNYNKSVNVDFTVDTNGVYSEPRPIGTRYLTRNL

SEQ ID NO: 2847 - protein, 735 aa, Artificial Sequence
  Description of Artificial Sequence: Synthetic polypeptide
MAADGYLPDWLEDTLSEGIRQWWKLKPGPPPPRPAERHQDDSRGLVLPGYKYLGPFNGLDKGEPVNEADAAALEHDKAYDRQLDSGDNPYLKYNHADAEFQERLKEDTSFGGNLGRAVFQAKKRVLEPLGLVEEPVKTAPGKKRPVEHSPAEPDSSSGTGKAGQQPARKRLNFGQTGDADSVPDPQPLGQPPAAPTSLGSTTMATGSGAPMADNNEGADGVGNSSGNWHCDSQWLGDRVITTSTRTWALPTYNNHLYKQISSQSGASNDNHYFGYSTPWGYFDFNRFHCHFSPRDWQRLINNNWGFRPKRLNFKLFNIQVKEVTQNDGTTTIANNLTSTVQVFTDSEYQLPYVLGSAHQGCLPPFPADVFMVPQYGYLTLNNGSQAVGRSSFYCLEYFPSQMLRTGNNFTFSYTFEDVSFHSSYAHSQSLDRLMNPLIDQYLYYLNRTQSNSGTLQQSRLLFSQAGPTSMSLQAKNWLPGPCYRQQRLSKQANDNNNSNFPWTAATKYHLNGRDSLVNPGPAMASHKDDEEKFFPMHGTLIFGKQGTNANDADLEHVMITDEEEIRTTNPVATEQYGNVSNNLQNSNTGPTTENVNHQGALPGMVWQDRDVYLQGPIWAKIPHTDGHFHPSPLMGGFGLKHPPPQIMIKNTPVPANPPTNFSAAKFASFITQYSTGQVSVEIEWELQKENSKRWNPEIQYTSNYNKSVNVDFTVDANGVYSEPRPIGTRYLTRNL

SEQ ID NO: 2848 - protein, 735 aa, Artificial Sequence
  Description of Artificial Sequence: Synthetic polypeptide
MAADGYLPDWLEDTLSEGIRQWWKLKPGPPPPRPAERHQDDSRGLVLPGYKYLGPFNGLDKGEPVNEADAAALEHDKAYDRQLDSGDNPYLKYNHADAEFQERLKEDTSFGGNLGRAVFQAKKRVLEPLGLVEEPVKTAPGKKRPVEHSPAEPDSSSGTGKAGQQPARKRLNFGQTGDADSVPDPQPLGQPPAAPTSLGSTTMATGSGAPMADNNEGADGVGNSSGNWHCDSQWLGDRVITTSTRTWALPTYNNHLYKQISSQSGASNDNHYFGYSTPWGYFDFNRFHCHFSPRDWQRLINNNWGFRPKRLNFKLFNIQVKEVTQNDGTTTIANNLTSTVQVFTDSEYQLPYVLGSAHQGCLPPFPADVFMVPQYGYLTLNNGSQAVGRSSFYCLEYFPSQMLRTGNNFTFSYTFEDVPFHSSYAHSQSLDRLMNPLIDQYLYYLNRTQSNSGTLQQSRLLFSQAGPTSMSLQAKNWLPGPCYRQQRLSKQANDNNNSNFPWTAATKYHLNGRDSLVNPGPAMASHKDDEEKFFPMHGTLIFGKQGTNANDADLEHVMITDEEEIRTTNPVATEQYGNVSNNLQNSNTGPTTENVNHQGALLGMVWQDRDVYLQGPIWAKIPHTDGHFHPSPLMGGFGLKHPPPQIMIKNTPVPANPPTNFSAAKFASFITQYSTGQVSVEIEWELQKENSKRWNPEIQYTSNYNKSVNVDFTVDANGVYSEPRPIGTRYLTRNL

SEQ ID NO: 2849 - protein, 735 aa, Artificial Sequence
  Description of Artificial Sequence: Synthetic polypeptide
MAADGYLPDWLEDTLSEGIRQWWKLKPGPPPPRPAERHQDDSRGLVLPGYKYLGPFNGLDKGEPVNEADAAALEHDKAYDRQLDSGDNPYLKYNHADAEFQERLKEDTSFGGNLGRAVFQAKKRVLEPLGLVEEPVKTAPGKKRPVEHSPAEPDSSSGTGKAGQQPARKRLNFGQTGDADSVPDPQPLGQPPAAPTSLGSTTMATGSGAPMADNNEGADGVGNSSGNWHCDSQWLGDRVITTSTRTWALPTYNNHLYKQISSQSGASNDNHYFGYSTPWGYFDFNRFHCHFSPRDWQRLINNNWGFRPKRLNFKLFNIQVKEVTQNDGTATIANNLTSTVQVFTDSEYQLPYVLGSAHQGCLPPFPADVFMVPQYGYLTLNNGSQAVGRSSFYCLEYFPSQMLRTGNNFTFSYTFEDVPFHSSYAHSQSLDRLMNPLIDQYLYYLNRTQSNSGTLQQSRLLFSQAGPTSMSLQAKNWLPGPCYRQQRLSKQANDNNNSNFPWTAATKYHLNGRDSLVNPGPAMASHKDDEEKFFPMHGTLIFGKQGTNANDADLEHVMITDEEEIRTTNPVATEQYGNVSNNLQNSNTGPTTENVNHQGALPGMVWQDRDVYLQGPIWAKIPHTDGHFHPSPLMGGFGLKHPPPQIMIKNTPVPANPPTNFSAAKFASFITQYSTGQVSVEIEWELQKENSKRWNPEIQYTSNYNKSVNVDFTVDANGVYSEPRPIGTRYLTRNL

SEQ ID NO: 2850 - protein, 735 aa, Artificial Sequence
  Description of Artificial Sequence: Synthetic polypeptide
MAADGYLPDWLEDTLSEGIRQWWKLKPGPPPPKPAERHKDDSRGLVLPGYKYLGPFNGLDKGEPVNEADAAALEHDKAYDRQLDSGDNPYLKYNHADAEFQERLKEDTSFGGNLGRAVFQAKKRVLEPLGLVEEPVKTAPGKKRPVEHSPVEPDSSSGTGKAGQQPARKRLNFGQTGDADSVPDPQPLGQPPAAPTSLGSTTMATGSGAPMADNNEGADGVGNSSGNWHCDSQWLGDRVITTSTRTWALPTYNNHLYKQISSQSGASNDNHYFGYSTPWGYFDFNRFHCHFSPRDWQRLINNNWGFRPKRLNFKLFNIQVKEVTQNDGTTTIANNLTSTVQVFTDSEYQLPYVLGSAHQGCLPPFPADVFMVPQYGYLTLNNGSQAVGRSSFYCLEYFPSQMLRTGNNFTFSYTFEDVPFHSSYAHSQSLDRLMNPLIDQYLYYLNKTQSNSGTLQQSRLLFSQAGPTSMSLQAKNWLPGPCYRQQRLSKQANDNNNSNFPWTAATKYHLNGRDSLVNPGPAMASHKDDEEKFFPMHGTLIFGKQGTNANDADLDNVMITDEEEIRTTNPVATEQYGTVSNNLQNSNTGPTTGTVNHQGALPGMVWQDRDVYLQGPIWAKIPHTDGHFHPSPLMGGFGLKHPPPQIMIKNTPVPANPPTNFSSAKFASFITQYSTGQVSVEIEWELQKENSKRWNPEIQYTSNYNKSVNVDFTVDTNGVYSEPRPIGTRYLTRNL

SEQ ID NO: 2851 - protein, 735 aa, Artificial Sequence
  Description of Artificial Sequence: Synthetic polypeptide
MAADGYLPDWLEDTLSEGIRQWWKLKPGPPPPKPAERHKDDSRGLVLPGYKYLGPFNGLDKGEPVNEADAAALEHDKAYDRQLDSGDNPYLKYNHADAEFQERLKEDTSFGGNLGRAVFQAKKRVLEPLGLVEEPVKTAPGKKRPVEHSPVEPDSSSGTGKAGQQPARKRLNFGQTGDADSVPDPQPLGQPPAAPTSLGSTTMATGSGAPMADNNEGADGVGNSSGNWHCDSQWLGDRVITTSTRTWALPTYNNHLYKQISSQSGASNDNHYFGYSTPWGYFDFNRFHCHFSPRDWQRLINNNWGFRPKRLNFKLFNIQVKEVTQNDGTTTIANNLTSTVQVFTDSEYQLPYVLGSAHQGCLPPFPADVFMVPQYGYLTLNNGSQAVGRSSFYCLEYFPSQMLRTGNNFTLSYTFEDVPFHSSYAHSQSLDRLMNPLIDQYLYYLNKTQSNSGTLQQSRLLFSQAGPTSMSLQAKNWLPGPCYRQQRLSKQANDNNNSNFPWTAATKYHLNGRDSLVNPGPAMASHKDDEEKFFPMHGTLIFGKQGTNANDADLDNVMITDEEEIRTTNPVATEQYGTVSNNLQNSNTGPTTGTVNHQGALPGMVWQDRDVYLQGPIWAKIPHTDGHFHPSPLMGGFGLKHPPPQIMIKNTPVPANPPTNFSSAKFASFITQYSTGQVSVEIEWELQKENSKRWNPEIQYTSNYNKSVNVDFTVDTNGVYSEPRPIGTRYLTRNL

SEQ ID NO: 2852 - protein, 735 aa, Artificial Sequence
  Description of Artificial Sequence: Synthetic polypeptide
MAADGYLPDWLEDTLSEGIRQWWKLKPGPPPPKPAERHKDDSRGLVLPGYKYLGPFNGLDKGEPVNEADAAALEHDKAYDRQLDSGDNPYLKYNHADAEFQERLKEDTSFGGNLGRAVFQAKRRVLEPLGLVEEPVKTAPGKKRPVEHSPVEPDSSSGTGKAGQQPARKRLNFGQTGDADSVPDPQPLGQPPAAPTSLGSTTMATGSGAPMADNNEGADGVGNSSGNWHCDSQWLGDRVITTSTRTWALPTYNNHLYKQISSQSGASNDNHYFGYSTPWGYFDFNRFHCHFSPRDWQRLINNNWGFRPKRLNFKLFNIQVKEVTQNDGTTTIANNLTSTVQVFTDSEYQLPYVLGSAHQGCLPPFPADVFMVPQYGYLTLNNGSQAVGRSSFYCLEYFPSQMLRTGNNFTFSYTFEDVPFHSSYAHSQSLDRLMNPLIDQYLYYLNKTQSNSGTLQQSRLLFSQAGPTSMSLQAKNWLPGPCYRQQRLSKQANDNNNSNFPWTAATKYHLNGRDSLVNPGPAMASHKDDEEKFFPMHGTLIFGKQGTNANDADLDNVMITDEEEIRTTNPVATEQYGTVSNNLQNSNTGPTTGTVNHQGALPGMVWQDRDVYLQGPIWAKIPHTDGHFHPSPLMGGFGLKHPPPQIMIKNTPVPANPPTNFSSAKFASFITQYSTGQVSVEIEWELQKENSKRWNPEIQYTSNYNKSVNVDFTVDTNGVYSEPRPIGTRYLTRNL

SEQ ID NO: 2853 - protein, 735 aa, Artificial Sequence
  Description of Artificial Sequence: Synthetic polypeptide
MAADGYLPDWLEDTLSEGIRQWWKLKPGPPPPKPAERHKDDSRGLVLPGYKYLGPFNGLDKGEPVNEADAAALEHDKAYDRQLDSGDNPYLKYNHADAEFQERLKEDTSFGGNLGRAVFQAKKRVLEPLGLVEEPVKTAPGKKRPVEHSPVEPDSSSGTGKAGQQPARKRLNFGQTGDADSVPDPQPLGQPPAAPTSLGSTTMATGSGAPMADNNEGADGVGNSSGNWHCDSQWLGGRVITTSTRTWALPTYNNHLYKQISSQSGASNDNHYFGYSTPWGYFDFNRFHCHFSPRDWQRLINNNWGFRPKRLNFKLFNIQVKEVTQNDGTTTIANNLTSTVQVFTDSEYQLPYVLGSAHQGCLPPFPADVFMVPQYGYLTLNNGSQAVGRSSFYCLEYFPSQMLRTGNNFTFSYTFEDVPFHSSYAHSQSLDRLMNPLIDQYLYYLNKTQSNSGTLQQSRLLFSQAGPTSMSLQAKNWLPGPCYRQQRLSKQANDNNNSNFPWTAATKYHLNGRDSLVNPGPAMASHKDDEEKFFPMHGTLIFGKQGTNANDADLDNVMITDEEEIRTTNPVATEQYGTVSNNLQNSNTGPTTGTVNHQGALPGMVWQDRDVYLQGPIWAKIPHTDGHFHPSPLMGGFGLKHPPPQIMIKNTPVPANPPTNFSSAKFASFITQYSTGQVSVEIEWELQKENSKRWNPEIQYTSNYNKSVNVDFTVDTNGVYSEPRPIGTRYLTRNL

SEQ ID NO: 2854 - protein, 734 aa, Artificial Sequence
  Description of Artificial Sequence: Synthetic polypeptide
MAADGYLPDWLEDTLSEGIRQWWKLKPGPPPPKPAERHKDDSRGLVLPGYKYLGPFNGLDKGEPVNEADAAALEHDKAYDRQLDSGDNPYLKYNHADAEFQERLKEDTSFGGNLGRAVFQAKKRVLEPLGLVEEPVKTAPGKKRPVEHSPVEPDSSSGTGKAGQQPARKRLNFGQTGDADSVPDPQPLGQPPAAPTSLGSTTMATGSGAPMADNNEGADGVGNSSGNWHCDSQWLGDRVITTSTRTWALPTYNNHLYKQISSQSGASNDNHYFGYSTPWGYFDFNRFHCHFSPRDWQRLINNNWGFRPKRLNFKLFNIQVKEVTQNDGTTTIANNLTSTVQVFTDSEYQLPYVLGSAHQGCLPPFPADVFMVPQYGYLTLNNGSQAVGRSSFYCLEYFPSQMLRTGNNFTFSYTFEDVPFHSSYAHSQSLDRLMNPLIDQYLYYLNKTQSNSGTLQQSRLLFSQAGPTSMSLQAKNWLPGPCYRQQRLSKQANDNNSNFPWTAATKYHLNGRDSLVNPGPAMASHKDDEEKFFPMHGTLIFGKQGTNANDADLDNVMITDEEEIRTTNPVATEQYGTVSNNLQNSNTGPTTGTVNHQGALPGMVWQDRDVYLQGPIWAKIPHTDGHFHPSPLMGGFGLKHPPPQIMIKNTPVPANPPTNFSSAKFASFITQYSTGQVSVEIEWELQKENSKRWNPEIQYTSNYNKSVNVDFTVDTNGVYSEPRPIGTRYLTRNL

SEQ ID NO: 2855 - protein, 735 aa, Artificial Sequence
  Description of Artificial Sequence: Synthetic polypeptide
MAADGYLPDWLEDTLSEGIRQWWKLKPGPPPPKPAERHKDDSRGLVLPGYKYLGPFNGLDKGEPVNEADAAALEHDKAYDRQLDSGDNPYLKYNHADAEFQERLKEDTSFGGNLGRAVFQAKKRVLEPLGLVEEPVKTAPGKKRPVEHSPVEPDSSSGTGKAGQQPARKRLNFGQTGDADSVPDPQPLGQPPAAPTSLGSTTMATGSGAPMADNNEGADGVGNSSGNWHCDSQWLGDRVITTSTRTWALPTYNNHLYKQISSQSGASNDNHYFGYSTPWGYFDFNRFHCHFSPRDWQRLINNNWGFRPKRLNFKLFNIQVKEVTQNDGTTTIANNLTSTVQVFTDSEYQLPYVLGSAHQGCLPPFPADVFMVPQYGYLTLNNGSQAVGRSSFYCLEYFPSQMLRTGNNFTFSYTFEDVPFHSSYAHSQSLDRLMNPLIDQYLYYLNKTQSNSGTLQQPRLLFSQAGPTSMSLQAKNWLPGPCYRQQRLSKQANDNNNSNFPWTAATKYHLNGRDSLVNPGPAMASHKDDEEKFFPMHGTLIFGKQGTNANDADLDNVMITDEEEIRTTNPVATEQYGTVSNNLQNSNTGPTTGTVNHQGALPGMVWQDRDVYLQGPIWAKIPHTDGHFHPSPLMGGFGLKHPPPQIMIKNTPVPANPPTNFSSAKFASFITQYSTGQVSVEIEWELQKENSKRWNPEIQYTSNYNKSVNVDFTVDTNGVYSEPRPIGTRYLTRNL

SEQ ID NO: 2856 - protein, 735 aa, Artificial Sequence
  Description of Artificial Sequence: Synthetic polypeptide
MAADGYLPDWLEDTLSEGIRQWWKLKPGPPPPKPAERHKDDSRGLVLPGYKYLGPFNGLDKGEPVNEADAAALEHDKAYDRQLDSGDNPYLKYNHADAEFQERLKEDTSFGGNLGRAVFQAKKRVLEPLGLVEEPVKTAPGKKRPVEHSPVEPDSSSGTGKAGQQPARKRLNFGQTGDADSVPDPQPLGQPPAAPTSLGSTTMATGSGAPMADNNEGADGVGNSSGNWHCDSQWLGDRVITTSTRTWALPTYNNHLYKQISSQSGASNDNHYFGYSTPWGYFDFNRFHCHFSPRDWQRLINNNWGFRPKRLNFKLFNIQVKEVTQNDGTTTIANNLTSTVQVFTDSEYQLPYVLGSAHQGCLPPFPADVFMVPQYGYLTLNNGSQAVGRSSFYCLEYFPSQMLRTGNNFTFSCTFEDVPFHSSYAHSQSLDRLMNPLIDQYLYYLNKTQSNSGTLQQSRLLFSQAGPTSMSLQAKNWLPGPCYRQQRLSKQANDNNNSNFPWTAATKYHLNGRDSLVNPGPAMASHKDDEEKFFPMHGTLIFGKQGTNANDADLDNVMITDEEEIRTTNPVATEQYGTVSNNLQNSNTGPTTGTVNHQGALPGMVWQDRDVYLQGPIWAKIPHTDGHFHPSPLMGGFGLKHPPPQIMIKNTPVPANPPTNFSSAKFASFITQYSTGQVSVEIEWELQKENSKRWNPEIQYTSNYNKSVNVDFTVDTNGVYSEPRPIGTRYLTRNL

SEQ ID NO: 2857 - protein, 735 aa, Artificial Sequence
  Description of Artificial Sequence: Synthetic polypeptide
MAADGYLPDWLEDTLSEGIRQWWKLKPGPPPPKPAERHKDDSRGLVLPGYKYLGPFNGLDKGEPVNEADAAALEHDKAYDRQLDSGDNPYLKYNHADAEFQERLKEDTSFGGNLGRAVFQAKKRVLEPLGLVEEPVKTAPGKKRPVEHSPVEPDSSSGTGKAGQQPARKRLNFGQTGDADSVPDPQPLGQPPAAPTSLGSTTMATGSGAPMADNNEGADGVGNSSGNWHCDSQWLGDRVITTSTRTWALPTYNNHLYKQISSQSGASNDNHYFGYSTPWGYFDFNRFHCHFSPRDWQRLIDNNWGFRPKRLNFKLFNIQVKEVTQNDGTTTIANNLTSTVQVFTDSEYQLPYVLGSAHQGCLPPFSADVFMVPQYGYLTLNNGSQAVGRSSFYCLEYFPSQMLRTGNNFTFSYTFEDVPFHSSYAHSQSLDRLMNPLIDQYLYYLNKTQSNSGTLQQSRLLFSQAGPTSMSLQAKNWLPGPCYRQQRLSKQANDNNNSNFPWTAATKYHLNGRDSLVNPGPAMASHKDDEEKFFPMHGTLIFGKQGTNANDADLDNVMITDEEEIRTTNPVATEQYGTVSNNLQNSNTGPTTGTVNHQGALPGMVWQDRDVYLQGPIWAKIPHTDGHFHPSPLMGGFGLKHPPPQIMIKNTPVPANPPANFSSAKFASFITQYSTGQVSVEIEWELQKENSKRWNPEIQYTSNYNKSVNVDFTVDTNGVYSEPRPIGTRYLTRNL

SEQ ID NO: 2858 - protein, 744 aa, Artificial Sequence
  Description of Artificial Sequence: Synthetic polypeptide
MITTLDKSGMAADGYLPDWLEDTLSEGIRQWWKLKPGPPPPKPAERHKDDSRGLVLPGYKYLGPFNGLDKGEPVNEADAAALEHDKAYDRQLDSGDNPYLKYNHADAEFQERLKEDTSFGGNLGRAVFQAKKRVLEPLGLVEEPVKTAPGKKRPVEHSPVEPDSSSGTGKAGQQPARKRLNFGQTGDADSVPDPQPLGQPPAAPTSLGSTTMATGSGAPMADNNEGADGVGNSSGNWHCDSQWLGDRVITTSTRTWALPTYNNHLYKQISSQSGASNDNHYFGYSTPWGYFDFNRFHCHFSPRDWQRLINNNWGFRPKRLNFKLFNIQVKEVTQNDGTTTIANNLTGTVQVFTDSEYQLPYVLGSAHQGCLPPFPADVFMVPQYGYLTLNNGSQAVGRSSFYCLEYFPSQMLRTGNNFTFSYTFEDVPFHSSYAHSQSLDRLMNPLIDQYLYYLNKTQSNSGTLQQSRLLFSQAGPTSMSLQAKNWLPGPCYRQQRLSKQANDNNNSNFPWTAATKYHLNGRDSLVNPGPAMASHKDDEEKFFPMHGTLIFGKQGTNANDADLDNVMITDEEEIRTTNPVATEQYGTVSNNLQNSNTGPTTGTVNHQGALPGMVWQDRDVYLQGPIWAKIPHTDGHFHPSPLMGGFGLKHPPPQIMIKNTPVPANPPTNFSSAKFASFITQYSTGQVSVEIEWELQKENSKRWNPEIQYTSNYNKSVNVDFTVDTNGVYSEPRPIGTRYLTRNL

SEQ ID NO: 2859 - protein, 744 aa, Artificial Sequence
  Description of Artificial Sequence: Synthetic polypeptide
MITTLDKSGMAADGYLPDWLEDTLSEGIRQWWKLKPGPPPPKPAERHKDDSRGLVLPGYKYLGPFNGLDKGEPVNEADAAALEHDKAYDRQLDSGDNPYLKYNHADAEFQERLKEDTSFGGNLGRAVFQAKKRVLEPLGLVEEPVKTAPGKKRPVEHSPVEPDSSSGTGKAGQQPARKRLNFGQTGDADSVPDPQPLGQPPAAPTSLGSTTMATGSGAPMADNNEGADGVGNSSGNWHCDSQWLGDRVITTSTRTWALPTYNNHLYKQISSQSGASNDNHYFGYSTPWGYFDFNRFHCHFSPRDWQRLINNNWGFRPKRLNFKLFNIQVKEVTQNDGTTTIANNLTSTVQVFTDSEYQLPYVLGSAHQGCLPPFPADVFMVPQYGYLTLNNGSQAVGRSSFYCLEYFPSQMLRTGNNFTFSYTFEDVPFHSSYAHSQSLDRLMNPLIDQYLYYLNKTQSNSGTLQQSRLLFSQAGPTSMSLQAKNWLPGPCYRQQRLSKQANDNNNSNFPWTAATKYHLNGRDSLVNPGPAMASHKDDEEKFFPMHGTLIFGKQGTNANDADLDNVMITDEEEIRTTNPVATEQYGTVSNNLQNSNTGPTTGTVNHQGALPGMVWQDRDVYLQGPIWAKIPHTDGHFHPSPLMGGFGLKHPPPQIMIKNTPVPANPPTNFSSAKFASFITQYSTGQVSVEIEWELQKENSKRWNPEIQYTSNYNKSVNVDFSVDTNGVYSEPRPIGTRYLTRNL

SEQ ID NO: 2860 - protein, 735 aa, Artificial Sequence
  Description of Artificial Sequence: Synthetic polypeptide
MAADGYLPDWLEDTLSEGIRQWWKLKPGPPPPKPAERHKDDSRGLVLPGYKYLGPFNGLDKGEPVNEADAAALEHDKAYDRQLDSGDNPYLKYNHADAEFQERLKEDTSFGGNLGRAVFQAKKRVLEPLGLAEEPVKTAPGKKRPVEHSPVEPDSSSGTGKAGQQPARKRLNFGQTGDADSVPDPQPLGQPPAAPTSLGSTTMATGSGAPMADNNEGADGVGNSSGNWHCDSQWLGDRVITTSTRTWALPTYNNHLYKQISSQSGASNDNHYFGYSTPWGYFDFNRFHCHFSPRDWQRLINNNWGFRPKRLNFKLFNIQVKEVTQNDGTTTIANNLTSTVQVFTDSEYQLPYVLGSAHQGCLPPFPADVFMVPQYGYLTLNNGSQAVGRSSFYCLEYFPSQMLRTGNNFTFSYTFEDVPFHSSYAHSQSLDRLMNPLIDQYLYYLNKTQSNSGTLQQSRLLFSQAGPTSMSLQAKNWLPGPCYRQQRLSKQANDNNNSNFPWTAATKYHLNGRDSLVNPGPAMASHKDDEEKFFPMHGTLIFGKQGTNANDADLDNVMITDEEEIRTTNPVATEQYGTVSNNLQNSNTGPTTGTVNHQGALPGMVWQDRDVYLQGPIWAKIPHTDGHFHPSPLMGGFGLKHPPPQIMIKNTPVPANPPTNFSSAKFASFITQYSTGQVSVEIEWELQKENSKRWNPEIQYTSNYNKSVNVDFTVDTNGVYSEPRPIGTRYLTRNL

SEQ ID NO: 2861 - protein, 735 aa, Artificial Sequence
  Description of Artificial Sequence: Synthetic polypeptide
MAADGYLPDWLEDTLSEGIRQWWKLKPGPPPPKPAERHKDDSRGLVLPGYKYLGPFNGLDKGEPVNEADAAALEHDKAYDRQLDSGDNPYLKYNHADAEFQERLKEDTSFGGNLGRAVFQAKKRVLEPLGLVEEPVKTAPGKKRPVEHSPVEPDSSSGTGKAGQQPARKRLNFGQTGDADSVPDPQPLGQPPAAPTSLGSTTMATGSGAPMADNNEGADGVGNSSGNWHCDSQWLGDRVITTSTRTWALPTYNNHLYKQISSQSGASNDNHYFGYSTPWGYFDFNRFHCHFSPRDWQRLINNNWGFRPKRLNFKLFNIQVKEVTQNDGTTTIANNLTSTVQVFTDSEYQLPYVLGSAHQGCLPPFPADVFMVPQYGYLTLNNGSQAVGRSSFYCLEYFPSQMLRTGNNFTFSYTFEDVPFHSSYAHSQSLDRLMNPLIDQYLYYLNKTQSNSGTLQQSRLLFSQAGPTSMSLQAKNWLPGPCYRQQRLSKQANDNNNSNFPWAAATKYHLNGRDSLVNPGPAMASHKDDEEKFFPMHGTLIFGKQGTNANDADLDNVMITDEEEIRTTNPVATEQYGTVSNNLQNSNTGPTTGTVNHQGALPGMVWQDRDVYLQGPIWAKIPHTDGHFHPSPLMGGFGLKHPPPQIMIKNTPVPANPPTNFSSAKFASFITQYSTGQVSVEIEWELQKENSKRWNPEIQYTSNYNKSVNVDFTVDTNGVYSEPRPIGTRYLTRNL

SEQ ID NO: 2862 - protein, 734 aa, Artificial Sequence
  Description of Artificial Sequence: Synthetic polypeptide
MAADGYLPDWLEDTLSEGIRQWWKLKPGPPPPKPAERHKDDSRGLVLPGYKYLGPFNGLDKGEPVNEADAAALEHDKAYDRQLDSGDNPYLKYNHADAEFQERLKEDTSFGGNLGRAVFQAKKRVLEPLGLVEEPVKTAPGKKRPVEHSPVEPDSSSGTGKAGQQPARKRLNFGQTGDADSVPDPQPLGQPPAAPTSLGSTTMATGSGAPMADNNEGADGVGNSSGNWHCDSQWLGDRVITTSTRTWALPTYNNHLYKQISSQSGASNDNHYFGYSTPWGYFDFNRFHCHFSPRDWQRLINNNWGFRPKRLNFKLFNIQVKEVTQNDGTTTIANNLTSTVQVFTDSEYQLPYVLGSAHQGCLPPFPADVFMVPQYGYLTLNNGSQAVGRSSFYCLEYFPSQMLRTGNNFTFSCTFEDVPFHSSYAHSQSLDRLMNPLIDQYLYYLNKTQSNSGTLQQSRLLFSQAGPTSMSLQAKNWLPGPCYRQQRLSKQANDNNSNFPWTAATKYHLNGRDSLVNPGPAMASHKDDEEKFFPMHGTLIFGKQGTNANDADLDNVMITDEEEIRTTNPVATEQYGTVSNNLQNSNTGPTTGTVNHQGALPGMVWQDRDVYLQGPIWAKIPHTDGHFHPSPLMGGFGLKHPPPQIMIKNTPVPANPPTNFSSAKFASFITQYSTGQVSVEIEWELQKENSKRWNPEIQYTSNYNKSVNVDFTVDTNGVYSEPRPIGTRYLTRNL

SEQ ID NO: 2863 - protein, 735 aa, Artificial Sequence
  Description of Artificial Sequence: Synthetic polypeptide
MAADGYLPDWLEDTLSEGIRQWWKLKPGPPPPKPAERHKDDSRGLVLPGYKYLGPFNGLDKGEPVNEADAAALEHDKAYDRQLDSGDNPYLKYNHADAEFQERLKEDTSFGGNLGRAVFQAKKRVLEPLGLVEEPVKTAPGKKRPVEHSPVEPDSSSGTGKAGQQPARKRLNFGQTGDADSVPDPQPLGQPPAAPTSLGSTTMATGSGAPMADNNEGADGVGNSSGNWHCDSQWLGDRVITTSTRTWALPTYNNHLYKQISSQSGASNDNHYFGYSTPWGYFDFNRFHCHFSPRDWQRLINNNWGFRPKRLNFKLFNIQVKEVTQNDGTTTIANNLTSTVQVFTDSEYQLPYVLGSAHQGCLPPFPADVFMVPQYGYLTLNNGSQAVGRSSFYCLEYFPSQMLRTGNNFTFSCTFEDVPFHSSYAHSQSLDRLMNPLIDQYLYYLNKTQSNSGTLQQSRLLFSQAGPTSMSLQAKNWLPGPCYRQQRLSKQANDNNNSNFPWTAATKYHLNGRDSLVNPGPAMASHKDDEEKFFPMHGTLIFGKQGTNANDADLDNVMITDEEEIRTTNPVATEQYGTVSNNLQNSNTGPTTGTVNHQGALPGMVWQDRDVYLQGPIWAKIPHTDGHFHPSPLMGGFGLKHPPPQIMIKNTPVPANPPTNFSSAKFASFITQYSTGQVSVEIEWELQKENSKRWNPEIQYTSNYNKSVNVDFSVDTNGVYSEPRPIGTRYLTRNL

SEQ ID NO: 2864 - protein, 735 aa, Artificial Sequence
  Description of Artificial Sequence: Synthetic polypeptide
MAADGYLPDWLEDTLSEGIRQWWKLKPGPPPPKPAERHKDDSRGLVLPGYKYLGPFNGLDKGEPVNEADAAALEHDKAYDRQLDSGDNPYLKYNHADAEFQERLKEDTSFGGNLGRAVFQAKKRVLEPLGLVEEPVKTAPGKKRPVEHSPVEPDSSSGTGKAGQQPARKRLNFGQTGDADSVPDPQPLGQPPAAPTSLGSTTMATGSGAPMADNNEGADGVGNSSGNWHCDSQWLGDRVITTSTRTWALPTYNNHLYKQISSQSGASNDNHYFGYSTPWGYFDFNRFHCHFSPRDWQRLINNNWGFRPKRLNFKLFNIQVKEVTQNDGTTTIANNLTSTVQVFTDSEYQLPYVPGSAHQGCLPPFPADVFMVPQYGYLTLNNGSQAVGRSSFYCLEYFPSQMLRTGNNFTFSCTFEDVPFHSSYAHSQSLDRLMNPLIDQYLYYLNKTQSNSGTLQQPRLLFSQAGPTSMSLQAKNWLPGPCYRQQRLSKQANDNNNSNFPWTAATKYHLNGRDSLVNPGPAMASHKDDEEKFFPMHGTLIFGKQGTNANDADLDNVMITDEEEIRTTNPVATEQYGTVSNNLQNSNTGPTTGTVNHQGALPGMVWQDRDVYLQGPIWAKIPHTDGHFHPSPLMGGFGLKHPPPQIMIKNTPVPANPPTNFSSAKFASFITQYSTGQVSVEIEWELQKENSKRWNPEIQYTSNYNKSVNVDFTVDTNGVYSEPRPIGTRYLTRNL

SEQ ID NO: 2865 - protein, 735 aa, Artificial Sequence; identical to SEQ ID NO: 2794
  Description of Artificial Sequence: Synthetic polypeptide

SEQ ID NO: 2866 - protein, 735 aa, Artificial Sequence
  Description of Artificial Sequence: Synthetic polypeptide
MAADGYLPDWLEDTLSEGIRQWWKLKPGPPPPRPAERHQDDSRGLVLPGYKYLGPFNGLDKGEPVNEADAAALEHDKAYDRQLDSGDNPYLKYNHADAEFQERLKEDTSFGGNLGRAVFQAKKRVLEPLGLVEEPVKTAPGKKRPVEHSPAEPDSSSGTGKAGQQPARKRLNFGQTGDADSVPDPQPLGQPPAAPTSLGSTTMATGSGAPMADNNEGADGVGNSSGNWHCDSQWLGDRVITTSTRTWALPTYNNHLYKQISSQSGASNDNHYFGYSTPWGYFDFNRFHCHFSPRDWQRLINNNWGFRPKRLNFKLFNIQVKEVTQNDGTTTIANNLTSTVQVFTDSEYQLPYVLGSAHQGCLPPFPADVFMVPQYGYLTLNNGSQAVGRSSFYCLEYFPSQMLRTGNNFTFSYTFEDVPFHSSYAHSQSLDRLMNPLIDQYLYYLNRTQSNSGTLQQSRLLFSQAGPTSMSLQAKNWLPGPCYRQQRLSKQANDNNNSNFPWTAATKYHLNGRDSLVNPGPAMASHKDDEEKFFPMHGTLIFGKQGTNANDADLEHVMITGEEEIRTTNPVATEQYGNVSNNLQNSNTGPTTENVNHQGALPGMVWQDRDVYLQGPIWAKIPHTDGHFHPSPLMGGFGLKHPPPQIMIKNTPVPANPPTNFSAAKFASFITQYSTGQVSVEIEWELQKENSKRWNPEIQYTSNYNKSVNVDFTVDANGVYSEPRPIGTRYLTRNL

SEQ ID NO: 2867 - protein, 735 aa, Artificial Sequence
  Description of Artificial Sequence: Synthetic polypeptide
MAADGYLPDWLEDTLSEGIRQWWKLKPGPPPPRPAERHQDDSRGLVLPGYKYLGPFNGLDKGEPVNEADAAALEHDKAYDRQLDSGDNPYLKYNHADAEFQERLKEDTSFGGNLGRAVFQAKKRVLEPLGLVEEPVKTAPGKKRPVEHSPAEPDSSSGTGKAGQQPARKRLNFGQTGDADSVPDPQPLGQPPAAPTSLGSTTMATGSGAPMADNNEGADGVGNSSGNWHCDSQWLGDRVITTSTRTWALPTYNNHLYKQISSQSGASNDNHYFGYSTPLGYFDFNRFHCHFSPRDWQRLINNNWGFRPKRLNFKLFNIQVKEVTQNDGTTTIANNLTSTVQVFTDSEYQLPYVLGSAHQGCLPPFPADVFMVPQYGYLTLNNGSQAVGRSSFYCLEYFPSQMLRTGNNFTFSYTFEDVPFHSSYAHSQSLDRLMNPLIDQYLYYLNRTQSNSGTLQQSRLLFSQAGPTSMSLQAKNWLPGPCYRQQRLSKQANDNNNSNFPWTAATKYHLNGRDSLVNPGPAMASHKDDEEKFFPMHGTLIFGKQGTNANDTDLEHVMITDEEEIRTTNPVATEQYGNVSNNLQNSNTGPTTENVNHQGALPGMVWQDRDVYLQGPIWAKIPHTDGHFHPSPLMGGFGLKHPPPQIMIKNTPVPANPPTNFSAAKFASFITQYSTGQVSVEIEWELQKENSKRWNPEIQYTSNYNKSVNVDFTVDANGVYSEPRPIGTRYLTRNL

SEQ ID NO: 2868 - protein, 735 aa, Artificial Sequence
  Description of Artificial Sequence: Synthetic polypeptide
MAADGYLPDWLEDTLSEGIRQWWKLKPGPPPPRPAERHQDDSRGLVLPGYKYLGPFNGLDKGEPVNEADAAALEHDKAYDRQLDSGDNPYLKYNHADAEFQERLKEDTSFGGNLGRAVFQAKKRVLEPLGLVEEPVKTAPGKKRPVEHSPAEPDSSSGTGKAGQQPARKRLNFGQTGDADSVPDPQPLGQPPAAPTSLGSTTMATGSGAPMADNNEGADGVGNSSGNWHCDSQWLGDRVITTSTRTWALPTYNNHLYKQISSQSGASNDNHYFGYSTPWGYFDFNRFHCHFSPRDWQRLINNNWGFRPKRLNFKLFNIQVKEVTQNDGTTTIANNLTSTVQVFTDSEYQLPYVLGSAHQGCLPPFPADVFMVPQYGYLTLNNGSQAVGRSSFYCLEYFPSQMLRTGNNFTFSYTFEDVPFHSSYAHSQSLDRLMNPLIDQYLYYLNRTQSNSGTLQQSRLLFSQAGPTSMSLQAKNWLPGPCYRQQRLSKQANDNNNSNFPWTAATKYHLNGRDSLVNPGPAMASHKDDEEKFFPMHGTLIFGKQGTNANDADLERVMITDEEEIRTTNPVATEQYGNVSNNLQNSNTGPTTENVNHQGALPGMVWQDRDVYLQGPIWAKIPHADGHFHPSPLMGGFGLKHPPPQIMIKNTPVPANPPTNFSAAKFASFITQYSTGQVSVEIEWELQKENSKRWNPEIQYTSNYNKSVNVDFTVDANGVYSEPRPIGTRYLTRNL

SEQ ID NO: 2869 - protein, 735 aa, Artificial Sequence
  Description of Artificial Sequence: Synthetic polypeptide
MAADGYLPDWLEDTLSEGIRQWWKLKPGPPPPRPAERHQDDSRGLVLPGYKYLGPFNGLDKGEPVNEADAAALEHDKAYDRQLDSGDNPYLKYNHADAEFQERLKEDTSFGGNLGRAVFQAKKRVLEPLGLVEEPVKTAPGKKRPVEHSPAEPDSSSGTGKAGQQPARKRLNFGQTGDADSVPDPQPLGQPPAAPTSLGSTTMATGSGAPMADNNEGADGVGNSSGNWHCDSQWLGDRVITTSTRTWALPTYNNHLYKQISSQSGASNDNHYFGYSTPWGYFDFNRFHCHFSPRDWQRLINNNWGFRPKRLNFKLFNIQVKEVTQNDGTTTIANNLTSTVQVFTDSEYQLPYVLGSAHQGCLPPFPADVFMVPQYGYLTLNNGSQAVGRSSFYCLEYFPSQMLRTGNNFTFSYTFEDVPFHSSYAHSQSLDRLMNPLIDQYLYYLNRTQSNSGTLQQSRLLFSQAGPTSMSLQAKNWLPGPCYRQQRLSKQANDNNNSNFPWTAATKYHLNGRDSLVNPGPAMASHKDDEEKFFPMHGTLIFGKQGTNANDADLEHVMITDEEEIRTTNPVATEQYGNVSNNLQNSNTGPTTENVNHQGALPGMVWQDRDVYLQGPIWAKIPHTDGHFHPSPLMGGFGLKHPPPQIMIKNTPVPANPPTNFSAAKFASFITRYSTGQVSAEIEWELQKENSKRWNPEIQYTSNYNKSVNVDFTVDANGVYSEPRPIGTRYLTRNL

SEQ ID NO: 2870 - protein, 735 aa, Artificial Sequence
  Description of Artificial Sequence: Synthetic polypeptide
MAADGYLPDWLEDILSEGIRQWWKLKPGPPPPKPAERHKDDSRGLVLPGYKYLGPFNGLDKGEPVNEADAAALEHDKAYDRQLDSGDNPYLKYNHADAEFQERLKEDTSFGGNLGRAVFQAKKRVLEPLGLVEEPVKTAPGKKRPVEQSPAEPDSSSGTGKAGNQPARKRLNFGQTGDADSVPDPQPLGQPPAAPSGLGSTTMATGSGAPMADNNEGADGVGNSSGNWHCDSQWLGDRVITTSTRTWALPTYNNHLYKQISSQSGAANDNHYFGYSTPWGYFDFNRFHCHFSPRDWQRLINNNWGFRPKRLNFKLFNIQVKEVTQNDGTTTIANNLTSTVQVFTDSEYQLPYVLGSAHQGCLPPFPADVFMVPQYGYLTLNNGSQAVGRSSFYCLEYFPSQMLRTGNNFTFSYTFEDVPFHSSYAHSQSLDRLMNPLIDQYLHYLNKTQSNSGTLQQSRLLFSQAGPTSMSLQAKNWLPGPCYRQQRLSKQANDNNNSNFPWTAATKYHLNGRDSLVNPGPAMASHKDDEEKFFPMHGTLIFGKQGTNANDADLDNVMITDEEEIRTTNPVATEQYGTVSNNLQNSNTGPTTGTVNHQGALPGMVWQDRDVYLQGPIWAKIPHTDGHFHPSPLMGGFGLKHPPPQIMIKNTPVPANPPTNFSSAKFASFITQYSTGQVSVEIEWELQKENSKRWNPEIQYTSNYNKSVNVDFTVDTNGVYSEPRPIGTRYLTRNL

SEQ ID NO: 2871 - protein, 735 aa, Artificial Sequence
  Description of Artificial Sequence: Synthetic polypeptide
MAADGYLPDWLEDTLSEGIRQWWKLKPGPPPPRPAERHQDDSRGLVLPGYKYLGPFNGLDKGEPVNEADAAALEHDKAYDRQLDSGDNPYLKYNHADAEFQERLKEDTSFGGNLGRAVFQAKKRVLEPLGLVEEPVKTAPGKKRPVEHSPAEPDSSSGTGKAGQQPARKRLNFGQTGDADSVPDPQPLGQPPAAPTSLGSTTMATGSGAPMADNNEGADGVGNSSGNWHCDSQWLGDRVITTSTRTWALPTYNNHLYKQISSQSGASNDNHYFGYSTPWGYFDFNRFHCHFSPRDWQRLINNNWGFRPKRLNFKLFNIQVKEVTQNDGTTTIANNLTSTVQVFTDSEYQLPYVLGSAHQGCLPPFPADVFMVPQYGYLTLNNGSQAVGRSSFYCLEYFPSQMLRTGNNFTFSYTFEDVPFHSSYAHSQSLDRLMNPLIDQYLYYLNRTQSNSGTLQQSRLLFSQAGPTSMSLQAKNWLPGPCYRQQRLSKQANDNNNSNFPWTAATKYHLNGRDSLVNPGPAMASHKDDEEKFFPMHGTLIFGKQGTNANDADLEHVMITDEEEIRTTNPVATEQYGNVSNNLQNSNTGPTTENVNRQGALPGMVWQDRDVYLQGPIWAKIPHTDGHFHPSPLMGGFGLKHPPPQIMIKNTPVPANPPTNFSAAKFASFITQYSTGQVSVEIEWELQKENSKRWNPEIQYTSNYNKSVNVDFTVDANGVYSEPRPIGTRYLTRNL

SEQ ID NO: 2872 - protein, 735 aa, Artificial Sequence
  Description of Artificial Sequence: Synthetic polypeptide
MAADGYLPDWLEDTLSEGIRQWWKLKPGPPPPRPAERHQDDSRGLVLPGYKYLGPFNGLDKGEPVNEADAAALEHDKAYDRQLDSGDNPYLKYNHADAEFQERLKEDTSFGGNLGRAVFQAKKRVLEPLGLVEEPVKTAPGKKRPVEHSPAEPDSSSGTGKAGQQPARKRLNFGQTGDADSVPDPQPLGQPPAAPTSLGSTTMATGSGAPMADNNEGADGVGNSSGNWHCDSQWLGDRVITTSTRTWALPTYNNHLYKQISSQSGASNDNHYFGYSTPWGYFDFNRFHCHFSPRDWQRLINNNWGFRPKRLNFKLFNIQVKEVTQNDGTTTIANNLTSTVQVFTDSEYQLPYVLGSAHQGCLPPFPADVFMVPQYGYLTLNNGSQAVGRSSFYCLEYFPSQMLRTGNNFTFSYTFEDVPFHSSYAHSQSLDRLMNPLIDQYLYYLNRTQSNSGTLQQSRLLFSQAAPTSMSLQAKNWLPGPCYRQQRLSKQANDNNNSNFPWTAATKYHLNGRDSLVNPGPAMASHKDDEEKFFPMHGTLIFGKQGTNANDTDLEHVMITDEEEIRTTNPVATEQYGNVSNNLQNSNTGPTTENVNHQGALPGMVWQDRDVYLQGPIWAKIPHTDGHFHPSPLMGGFGLKHPPPQIMIKNTPVPANPPTNFSAAKFASFITQYSTGQVSVEIEWELQKENSKRWNPEIQYTSNYNKSVNVDFTVDANGVYSEPRPIGTRYLTRNL

SEQ ID NO: 2873 - protein, 735 aa, Artificial Sequence
  Description of Artificial Sequence: Synthetic polypeptide
MAADGYLPDWLEDILSEGIRQWWKLKPGPPPPKPAERHKDDSRGLVLPGYKYLGPFNGLDKGEPVNEADAAALEHDKAYDRQLDSGDNPYLKYNHADAEFQERLKEDTSFGGNLGRAVFQAKKRVLEPLGLVEEPVKTAPGKKRPVEQSPAEPDSSSGTGKAGNQPARKRLNFGQTGDADSVPDPQPLGQPPAAPSGLGSTTMATGSGAPMADNNEGADGVGNSSGNWHCDSQWLGDRVITTSTRTWALPTYNNHLYKQISSQSGAANDNHYFGYSTPWGYFDFNRFHCHFSPRDWQRLINNNWGFRPKRLNFKLFNIQVKEVTQNDGTTTIANNLTSTVQVFTDSEYQLPYVLGSAHQGCLPPFPADVFMVPQYGYLTLNNGSQAVGRSSFYCLEYFPSQMLRTGNNFTFSYTFEDVPFHSSYAHSQSLDRLMNPLIDQYLYYLNKTQSNSGTLQQSRLLFSQAGPTSMSLQAKNWLPGPCYRQQRLSKQANDNNNSNFPWTAATKYHLNGRDSLVNPGPAMASHKDDEEKFFPMHGTLIFGKQGTNANDADLDNVMITDEEEIRTTNPVATEQYGTVSNNLQNSNTGPTTGTVNHQGALPGMVWQDRDVYLQGPIWAKIPHTDGHFHPSPLMGGFGLKHPPPQIMIKNTPVPANPPTNFSSAKFASFVTQYSTGQVSVEIEWELQKENSKRWNPEIQYTSNYNKSVNVDFTVDTNGVYSEPRPIGTRYLTRNL

SEQ ID NO: 2874 - protein, 735 aa, Artificial Sequence
  Description of Artificial Sequence: Synthetic polypeptide
MAADGYLPDWLEDTLSEGIRQWWKLKPGPPPPRPAERHQDDSRGLVLPGYKYLGPFNGLDKGEPVNEADAAALEHDKAYDRQLDSGDNPYLKYNHADAEFQERLKEDTSFGGNLGRAVFQAKKRVLEPLGLVEEPVKTAPGKKRPVEHSPAEPDSSSGTGKAGQQPARKRLNFGQTGDADSVPDPQPLGQPPAAPTSLGSTTMATGSGAPMADNNEGADGVGNSSGNWHCDSQWLGDRVITTSTRTWALPTYNNHLYKQISSQSGASNDNHYFGYSTPWGYFDFNRFHCHFSPRDWQRLINNNWGFRPKRLNFKLFNIQVKEVTQNDGTTTIANNLTSTVQVFTDSEYQLPYALGSAHQGCLPPFPADVFMVPQYGYLTLNNGSQAVGRSSFYCLEYFPSQMLRTGNNFTFSYTFEDVPFHSSYAHSQSLDRLMNPLIDQYLYYLNRTQSNSGTLQQSRLLFSQAGPTSMSLQAKNWLPGPCYRQQRLSKQANDNNNSNFPWTAATKYHLNGRDSLVNPGPAMASHKDDEEKFFPMHGTLIFGKQGTNANDTDLEHVMITDEEEIRTTNPVATEQYGNVSNNLQNSNTGPTTENVNHQGALPGMVWQDRDVYLQGPIWAKIPHTDGHFHPSPLMGGFGLKHPPPQIMIKNTPVPANPPTNFSAAKFASFITQYSTGQVSVEIEWELQKENSKRWNPEIQYTSNYNKSVNVDFTVDANGVYSEPRPIGTRYLTRNL

SEQ ID NO: 2875 - protein, 735 aa, Artificial Sequence
  Description of Artificial Sequence: Synthetic polypeptide
MAADGYLPDWLEDILSEGIRQWWKLKPGPPPPKPAERHKDDSRGLVLPGYKYLGPFNGLDKGEPVNEADAAALEHDKAYDRQLDSGDNPYLKYNHADAEFQERLKEDTSFGGNLGRAVFQAKKRVLEPLGLVEEPVKTAPGKKRPVEQSPAEPDSSSGTGKAGNQPARKRLNFGQTGDADSVPDPQPLGQPPAAPSGLGSTTMATGSGAPMADNNEGADGVGNSSGNWHCDSQWLGDRVITTSTRTWALPTYNNHLYKQISSQSGAANDNHYFGYSTPWGYFDFNRFHCHFSPRDWQRLINNNWGFRPKRLNFKLFSIQVKEVTQNDGTTTIANNLTSTVQVFTDSEYQLPYVLGSAHQGCLPPFPADVFMVPQYGYLTLNNGSQAVGRSSFYCLEYFPSQMLRTGNNFTFSYTFEDVPFHSSYAHSQSLDRLMNPLIDQYLYYLNKTQSNSGTLQQSRLLFSQAGPTSMSLQAKNWLPGPCYRQQRLSKQANDNNNSNFPWTAATKYHLNGRDSLVNPGPAMASHKDDEEKFFPMHGTLIFGKQGTNANDADLDNVMITDEEEIRTTNPVATEQYGTVSNNLQNSNTGPTTGTVNHQGALPGMVWQDRDVYLQGPIWAKIPHTDGHFHPSPLMGGFGLKHPPPQIMIKNTPVPANPPTNFSSAKFASFITQYSTGQVSVEIEWELQKENSKRWNPEIQYTSNYNKSVNVDFTVDTNGVYSEPRPIGTRYLTRNL

SEQ ID NO: 2876 - protein, 735 aa, Artificial Sequence
  Description of Artificial Sequence: Synthetic polypeptide
MAADGYLPDWLEDTLSEGIRQWWKLKPGPPPPRPAERHQDDSRGLVLPGYKYLGPFNGLDKGEPVNEADAAALEHDKAYDRQLDSGDNPYLKYNHADAEFQERLKEDTSFGGNLGRAVFQAKKRVLEPLGLVEEPVKTAPGKKRPVEHSPAEPDSSSGTGKAGQQPARKRLNFGQTGDADSVPDPQPLGQPPAAPTSLGSTTMATGSGAPMADNNEGADGVGNSSGNWHCDSQWLGDRVITTSTRTWALPTYNNHLYKQISSQSGASNDNHYLGYSTPWGYFDFNRFHCHFSPRDWQRLINNNWGFRPKRLNFKLFNIQVKEVTQNDGTTTIANNLTSTVQVFTDSEYQLPYVLGSAHQGCLPPFPADVFMVPQYGYLTLNNGSQAVGRSSFYCLEYFPSQMLRTGNNFTFSYTFEDVPFHSSYAHSQSLDRLMNPLIDQYLYYLNRTQSNSGTLQQSRLLFSQAAPTSMSLQAKNWLPGPCYRQQRLSKQANDNNNSNFPWTAATKYPLNGRDSLVNPGPAMASHKDDEEKFFPMHGTLIFGKQGTNANDTDLEHVMITDEEEIRTTNPVATEQYGNVSNNLQNSNTGPTTENVNHQGALPGMVWQDRDVYLQGPIWAKIPHTDGHFHPSPLMGGFGLKHPPPQIMIKNTPVPANPPTNFSAAKFASFITQYSTGQVSVEIEWELQKENSKRWNPEIQYTSNYNKSVNVDFTVDANGVYSEPRPIGTRYLTRNL

SEQ ID NO: 2877 - protein, 735 aa, Artificial Sequence
  Description of Artificial Sequence: Synthetic polypeptide
MAADGYLPDWLEDILSEGIRQWWKLKPGPPPPKPAERHKDDSRGLVLPGYKYLGPFNGLDKGEPVNEADAAALEHDKAYDRQLDSGDNPYLKYNHADAEFQERLKEDTSFGGNLGRAVFQAKKRVLEPLGLVEEPVKTAPGKKRPVEQSPAEPDSSSGTGKAGNQPARKRLNFGQTGDADSVPDPQPLGQPPAAPSGLGSTTMATGSGAPMADNNEGADGVGNSSGNWHCDSQWLGDRVITTSTRTWALPTYNNHLYKQISSQSGAANDNHYFGYSTPWGYFDFNRFHCHFSPRDWQRLINNNWGFRPKRLNFKLFNIQVKEVTQNDGTTTIANNLTSTVQVFTDSEYQLPYVLGSAHQGCLPPFPADVFMVPQYGYLTLNNGSQAVGRSSFYCLEYFPSQMLRTGNNFTFSYAFEDVPFHSSYAHSQSLDRLMNPLIDQYLYYLNKTQSNSGTLQQSRLLFSQAGPTSMSLQAKNWLPGPCYRQQRLSKQANDNNNSNFPWTAATKYHLNGRDSLVNPGPAMASHKDDEEKFFPMHGTLIFGKQGTNANDADLDNVMITDEEEIRTTNPVATEQYGTVSNNLQNSNTGPTTGTVNHQGALPGMVWQDRDVYLQGPIWAKIPHTDGHFHPSPLMGGFGLKHPPPQIMIKNTPVPANPPTNFSSAKFAPFITQYSTGQVSVEIEWELQKENSKRWNPEIQYTSNYNKSVNVDFTVDTNGVYSEPRPIGTRYLTRNL

SEQ ID NO: 2878 - protein, 735 aa, Artificial Sequence
  Description of Artificial Sequence: Synthetic polypeptide
MAADGYLPDWLEDTLSEGIRQWWKLKPGPPPPRPAERHQDDSRGLVLPGYKYLGPFNGLDKGEPVNEADAAALEHDKAYDRQLDSGDNPYLKYNHADAEFQERLKEDTSFGGNLGRAVFQAKKRVLEPLGLVEEPVKTAPGKKRPVEHSPAEPDSSSGTGKAGQQPARKRLNFGQTGDADSVPDPQPLGQPPAAPTSLGSTTMATGSGAPMADNNEGADGVGNSSGNWHCDSQWLGDRVITTSTRTWALPTYNNHLYKQISSQSGASNDNHYFGYSTPWGYFDFNRFHCHFSPRDWQRLINNNWGFRPKRLNFKLFNIQVKEVTQNDGTTTIANNLTSTVQVFTDSEYQLPYVLGSAHQGCLPPFPADVFMVPQYGYLTLNNGSQAVGRSSFYCLEYFPSQMLRTGNNFTFSYTFEDVPFHSSYAHSQSLDRLMNPLIDQYLYYLNRTQSNSGTLQQSRLLFSQAGPTSMSLQAKNWLPGPCYRQQRLSKQANDNNNSNFPWTAATKYHLNGRDSLVNPGPAMASHKDDEEKFFPMHGTLIFGKQGTNANDADLEHVMITDEEEIRTTNPVATEQYGNVSNNLQNSNTGPTTENVNHQGALPGMVWQDRDVYLQGPIWAKIPHTDGHFHPSPLMGGFGLKHPPPQIMIKNTPVPANPPTNFSAAKFASFITRYSTGQVSVEIEWELQKENSKRWNPEIQYTSNYNKSVNVDFTVDANGVYSEPRPIGTRYLTRNL

SEQ ID NO: 2879 - protein, 735 aa, Artificial Sequence
  Description of Artificial Sequence: Synthetic polypeptide
MAADGYLPDWLEDTLSEGIRQWWKLKPGPPPPRPAERHQDDSRGLVLPGYKYLGPFNGLDKGEPVNEADAAALEHDKAYDRQLDSGDNPYLKYNRADAEFQERLKEDTSFGGNLGRAVFQAKKRVLEPLGLVEEPVKTAPGKKRPVEHSPAEPDSSSGTGKAGQQPARKRLNFGQTGDADSVPDPQPLGQPPAAPTSLGSTTMATGSGAPMADNNEGADGVGNSSGNWHCDSQWLGDRVITTSTRTWALPTYNNHLYKQISSQSGASNDNHYFGYSTPWGYFDFNRFHCHFSPRDWQRLINNNWGFRPKRLNFKLFNIQVKEVTQNDGTTTIANNLTSTVQVFTDSEYQLPYVLGSAHQGCLPPFPADVFMVPQYGYLTLNNGSQAVGRSSFYCLEYFPSQMLRTGNNFTFSYTFEDVPFHSSYAHSQSLDRLMNPLIDQYLYYLNRTQSNSGTLQQSRLLFSQAGPTSMSLQAKNWLPGPCYRQQRLSKQANDNNNSNFPWTAATKYHLNGRDSLVNPGPAMASHKDDEEKFFPMHGTLIFGKQGTNANDTDLEHVMITDEEEIRTTNPVATEQYGNVSNNLQNSNTGPTTENVNHQGALPGMVWQDRDVYLQGPIWAKIPHTDGHFHPSPLMGGFGLKHPPPQIMIKNTPVPANPPTNFSAAKFASFITQYSTGQVSVEIEWELQKENSKRWNPEIQYTSNYNKSVNVDFTVDANGVYSEPRPIGTRYLTRNL

SEQ ID NO: 2880 - protein, 735 aa, Artificial Sequence
  Description of Artificial Sequence: Synthetic polypeptide
  MOD_RES (628)..(628): Any naturally occurring amino acid
MAADGYLPDWLEDTLSEGIRQWWKLKPGPPPPRPAERHQDDSRGLVLPGYKYLGPFNGLDKGEPVNEADAAALEHDKAYDRQLDSGDNPYLKYNHADAEFQERLKEDTSFGGNLGRAVFQAKKRVLEPLGLVEEPVKTAPGKKRPVEHSPAEPDSSSGTGKAGQQPARKRLNFGQTGDADSVPDPQPLGQPPAAPTSLGSTTMATGSGAPMADNNEGADGVGNSSGNWHCDSQWLGDRVITTSTRTWALPTYNNHLYKQISSQSGASNDNHYFGYSTPWGYFDFNRFHCHFSPRDWQRLINNNWGFRPKRLNFKLFNIQVKEVTQNDGTTTIANNLTSTVQVFTDSEYQLPYVLGSAHQGCLPPFPADVFMVPQYGYLTLNNGSQAVGRSSFYCLEYFPSQMLRTGNNFTFSYTFEDVPFHSSYAHSQSLDRLMNPLIDQYLYYLNRTQSNSGTLQQSRLLFSQAGPTSMSLQAKNWLPGPCYRQQRLSKQANDNNNSNFPWTAATKYHLNGRDSLVNPGPAMASHKDDEEKFFPMHGTLIFGKQGTNANDADLEHVMITDEEEIRTTNPVATEQYGNVSNNLQNSNTGPTTENVNHQGALPGMVWQDRDVYLQGPIWAKIPHTDGHXHPSPLMGGFGLKHPPPQIMIKNTPVPANPPTNFSAAKFASFITQYSTGQVSVEIEWELQKENSKRWNPEIQYTSNYNKSVNVDFTVDANGVYSEPRPIGTRYLTRNL

SEQ ID NO: 2881 - protein, 735 aa, Artificial Sequence
  Description of Artificial Sequence: Synthetic polypeptide
MAADGYLPDWLEDTLSEGIRQWWKLKPGPPPPRPAERHQDDSRGLVLPGYKYLGPFNGLDKGEPVNEADAAALEHDKAYDRQLDSGDNPYLKYNHADAEFQERLKEDTSFGGNLGRAVFQAKKRVLEPLGLVEEPVKTAPGKKRPAEHSPAEPDSSSGTGKAGQQPARKRLNFGQTGDADSVPDPQPLGQPPAAPTSLGSTTMATGSGAPMADNNEGADGVGNSSGNWHCDSQWLGDRVITTSTRTWALPTYNNHLYKQISSQSGASNDNHYFGYSTPWGYFDFNRFHCHFSPRDWQRLINNNWGFRPKRLNFKLFNIQVKEVTQNDGTTTIANNLTSTVQVFTDSEYQLPYVLGSAHQGCLPPFPADVFMVPQYGYLTLNNGSQAVGRSSFYCLEYFPSQMLRTGNNFTFSYTFEDVPFHSSYAHSQSLDRLMNPLIDQYLYYLNRTQSNSGTLQQSRLLFSQAGPTSMSLQAKNWLPGPCYRQQRLSKQANDNNNSNFPWTAATKYHLNGRDSLVNPGPAMASHKDDEEKFFPMHGTLIFGKQGTNANDADLEHVMITDEEEIRTTNPVATEQYGNVSNNLQNSNTGPTTENVNHQGALPGMVWQDRDVYLQGPIWAKIPHTDGHFHPSPLMGGFGLKHPPPQIMIKNTPVPANPPTNFSAAKFASFITQYSTGQVSVEIEWELQKENSKRWNPEIQYTSNYNKSVNVDFTVDANGVYSEPRPIGTRYLTRNL

SEQ ID NO: 2882 - protein, 735 aa, Artificial Sequence
  Description of Artificial Sequence: Synthetic polypeptide
MAADGYLPDWLEDTLSEGIRQWWKLKPGPPPPRPAERHQDDSRGLVLPGYKYLGPFNGLDKGEPVNEADAAALEHDKAYDRQLDSGDNPYLKYNHADAEFQERLKEDTSFGGNLGRAVFQAKKRVLEPLGLVEEPVKTAPGKKRPVEHSPAEPDSSSGTGKAGQQPARKRLNFGQTGDADSVPDPQPLGQPPAAPTSLGSTTMATGSGAPMADNNEGADGVGNSSGNWHCDSQWLGDRVITTSTRTWALPTYNNHLYKQISSQSGASNDNHYFGYSTPWGYFDFNRFHCHFSPRDWQRLINNNWGFRPKRLNFKLFNIQVKEVTQNDGTTTIANNLTSTVQVFTDSEYQLPYVLGSAHQGCLPPFPADVFMVPQYGYLTLNNGSQAVGRSSFYCLEYFPSQMLRTGNNFTFSYTFEDVPFHSSYAHSQSLDRLMNPLIDQYLYYLNRTQSNSGTLQQPRLLFSQAGPTSMSLQAKNWLPGPCYRQQRLSKQANDNNNSNFPWTAATKYHLNGRDSLVNPGPAMASHKDDEEKFFPMHGTLIFGKQGTNANDADLEHVMITDEEEIRTTNPVATEQYGNVSNNLQNSNTGPTTENVNHQGALPGMVWQDRDVYLQGPIWAKIPHTDGHFHPSPLMGGFGLKHPPPQIMIKNTPVPANPPTNFSAAKFASFITQYSTGQVSVEIEWELQKENSKRWNPEIQYTSNYNKSVNVDFTVDANGVYSEPRPIGTRYLTRNL

SEQ ID NO: 2883 - protein, 735 aa, Artificial Sequence
  Description of Artificial Sequence: Synthetic polypeptide
  MOD_RES (552)..(552): Any naturally occurring amino acid
MAADGYLPDWLEDTLSEGIRQWWKLKPGPPPPRPAERHQDDSRGLVLPGYKYLGPFNGLDKGEPVNEADAAALEHDKAYDRQLDSGDNPYLKYNHADAEFQERLKEDTSFGGNLGRAVFQAKKRVLEPLGLVEEPVKTAPGKKRPVEHSPAEPDSSSGTGKAGQQPARKRLNFGQTGDADSVPDPQPLGQPPAAPTSLGSTTMATGSGAPMADNNEGADGVGNSSGNWHCDSQWLGDRVITTSTRTWALPTYNNHLYKQISSQSGASNDNHYFGYSTPWGYFDFNRFHCHFSPRDWQRLINNNWGFRPKRLNFKLFNIQVKEVTQNDGTTTIANNLTSTVQVFTDSEYQLPYVLGSAHQGCLPPFPADVFMVPQYGYLTLNNGSQAVGRSSFYCLEYFPSQMLRTGNNFTFSYTFEDVPFHSSYAHSQSLDRLMNPLIDQYLYYLNRTQSNSGTLQQSRLLFSQAGPTSMSLQAKNWLPGPCYRQQRLSKQANDNNNSNFPWTAATKYHLNGRDSLVNPGPAMASHKDDEEKFFPMHGTLIFGKQGTNANDXDLEHVMITDEEEIRTTNPVATEQYGNVSNNLQNSNTGPTTENVNHQGALPGMVWQDRDVYLQGPIWAKIPHTDGHFHPSPLMGGFGLKHPPPQIMIKNTPVPANPPTNFSAAKFASFITQYSTGQVSVEIEWELQKENSKRWNPETQYTSNYNKSVNVDFTVDANGVYSEPRPIGTRYLTRNL

SEQ ID NO: 2884 - protein, 735 aa, Artificial Sequence
  Description of Artificial Sequence: Synthetic polypeptide
MAADGYLPDWLEDTLSEGIRQWWKLKPGPPLPRPAERHQDDSRGLVLPGYKYLGPFNGLDKGEPVNEADAAALEHDKAYDRQLDSGDNPYLKYNHADAEFQERLKEDTSFGGNLGRAVFQAKKRVLEPLGLVEEPVKTAPGKKRPVEHSPAEPDSSSGTGKAGQQPARKRLNFGQTGDADSVPDPQPLGQPPAAPTSLGSTTMATGSGAPMADNNEGADGVGNSSGNWHCDSQWLGDRVITTSTRTWALPTYNNHLYKQISSQSGASNDNHYFGYSTPWGYFDFNRFHCHFSPRDWQRLINNNWGFRPKRLNFKLFNIQVKEVTQNDGTTTIANNLTSTVQVFTDSEYRLPYVLGSAHQGCLPPFPADVFMVPQYGYLTLNNGSQAVGRSSFYCLEYFPSQMLRTGNNFTFSYTFEDVPFHSSYAHSQSLDRLMNPLIDQYLYYLNRTQSNSGTLQQSRLLFSQAGPTSMSLQAKNWLPGPCYRQQRLSKQANDNNNSNFPWTAATKYHLNGRDSLVNPGPAMASHKDDEEKFFPMHGTLIFGKQGTNANDADLEHVMITDEEEIRTTNPVATEQYGNVSNNLQNSNTGPTTENVNHQGALPGMVWQDRDVYLQGPIWAKIPHTDGHFHPSPLMGGFGLKHPPPQIMIKNTPVPANPPTNFSAAKFASFITQYSTGQVSVEIEWELQKENSKRWNPEIQYTSNYNKSVNVDFTVDANGVYSEPRPIGTRYLTRNL

SEQ ID NO: 2885 - protein, 735 aa, Artificial Sequence
  Description of Artificial Sequence: Synthetic polypeptide
MAADGYLPDWLEDTLSEGIRQWWKLKPGPPPPRPAERHQDDSRGLVLPGYKYLGPFNGLDKGEPVNEADAAALEHDKAYDRQLDSGDNPYLKYNHADAEFQERLKEDTSFGGNLGRAVFQAKKRVLEPLGLVEEPVKTAPGKKRPVEHSPAEPDSSSGTGKAGQQPARKRLNFGQTGDADSVPDPQPLGQPPAAPTSLGSTTMATGSGAPMADNNEGADGVGNSSGNWHCDSQWLGDRVITTSTRTWALPTYNNHLYKQISSQSGASNDNHYFGYSTPWGYFDFNRFHCHFSPRDWQRLINNNWGFRPKRLNFKLFNIQVKEVTQNDGTTTIANNLTSTVQVFTDSEYQLPYVLGSAHQGCLPPFPADVFMVPQYGYLTLNNGSQAVGRSSFYCLEYFPSQMLRTGNNFTFSYTFEDVPFHSSYAHSQSLDRLMNPLTDQYLYYLNRTQSNSGTLQQSRLLFSQAGPTSMSLQAKNWLPGPCYRQQRLSKQANDNNNSNFPWTAATKYHLNGRDSLVNPGPAMASHKDDEEKFFPMHGTLIFGKQGTNANDTDLEHVMITDEEEIRTTNPVATEQYGNVSNNLQNSNTGPTTENVNHQGALPGMVWQDRDVYLQGPIWAKIPHTDGHFHPSPLMGGFGLKHPPPQIMIKNTPVPANPPTNFSAAKFASFITQYSTGQVSVEIEWELQKENSKRWNPEIQYTSNYNKSVNVDFTVDANGVYSEPRPIGTRYLTRNL

SEQ ID NO: 2886 - protein, 735 aa, Artificial Sequence
  Description of Artificial Sequence: Synthetic polypeptide
MAADGYLPDWLEDTLSEGIRQWWKLKPGPPPPRPAERHQDDSRGLVLPGYKYLGPFNGLDKGEPVNEADAAALEHDKAYDRQLDSGDNPYLKYNHADAEFQERLKEDTSFGGNLGRAVFQAKKRVLEPLGLVEEPVKTAPGKKRPVEHSPAEPDSSSGTGKAGQQPARKRLNFGQTGDADSVPDPQPLGQPPAAPTSLGSTTMATGSGAPMADNNEGADGVGNSSGNWHCDSQWLGDRVITTSTRTWALPTYNNHLYRQISSQSGASNDNHYFGYSTPWGYFDFNRFHCHFSPRDWQRLINNNWGFRPKRLNFKLFNIQVKEVTQNDGTTTIANNLTSTVQVFTDSEYQLPYVLGSAHQGCLPPFPADVFMVPQYGYLTLNNGSQAVGRSSFYCLKYFPSQMLRTGNNFTFSYTFEDVPFHSSYAHSQSLDRLMNPLIDQYLYYLNRTQSNSGTLQQSRLLFSQAGPTSMSLQAKNWLPGPCYRQQRLSKQANDNNNSNFPWTAATKYHLNGRDSLVNPGPAMASHKDDEEKFFPLHGTLIFGKQGTNANDTDLEHVMITDEEEIRTTNPVATEQYGNVSNNLQNSNTGPTTENVNHQGALPGMVWQDRDVYLQGPIWAKIPHTDGHFHPSPLMGGFGLKHPPPQIMIKNTPVPANPPTNFSAAKFASFITQYSTGQVSVEIEWELQKENSKRWNPEIQYTSNYNKSVNVDFTVDANGVYSEPRPIGTRYLTRNL

SEQ ID NO: 2887 - protein, 735 aa, Artificial Sequence
  Description of Artificial Sequence: Synthetic polypeptide
MAADGYLPDWLEDTLSEGIRQWWKLKPGPPPPRPAERHQDDSRGLVLPGYKYLGPFNGLDKGEPVNEADAAALEHDKAYDRQLDSGDNPYLKYNHADAEFQERLKEDTSFGGNLGRAVFQAKKRVLEPLGLVEEPVKTAPGKKRPVEHSPAEPDSSSGTGKAGQQPARKRLNFGQTGDADSVPDPQPLGQPPAAPTSLGSTTMATGSGAPMADNNEGADGVGNSSGNWHCDSQWLGDRVITTSTRTWALPTYNNHLYRQISSQSGASNDNHYFGYSTPWGYFDFNRFHCHFSPRDWQRLINNNWGFRPKRLNFKLFNIQVKEVTQNDGTTTIANNLTSTVQVFTDSEYQLPYVLGSAHQGCLPPFPADVFMVPQYGYLTLNNGSQAVGRSSFYCLEYFPSQMLRTGNNFTFSYTFEDVPFHSSYAHSQSLDRLMNPLIDQYLYYLNRTQSNSGTLQQSRLLFSQAGPTSMSLQAKNWLPGPCYRQQRLSKQANDNNNSNFPWTAATKYHLNGRDSLVNPGPAMASHKDDEEKFFPMHGTLIFGKQGTNANDTDLEHVMITDEEEIRTTNPVATEQYGNVSNNLQNSNTGPTTENVNHQGALPGMVWQDRDVYLQGPIWAKIPHTDGHFHPSPLMGGFGLKHPPPQIMIKNTPVPANPPTNFSAAKFASFITQYSTGQVSVEIEWVLQKENSKRWNPEIQYTSNYNKSVNVDFTVDANGVYSEPRPIGTRYLTRNL

SEQ ID NO: 2888 - protein, 735 aa, Artificial Sequence
  Description of Artificial Sequence: Synthetic polypeptide
MAADGYLPDWLEDTLSEGIRQWWKLKPGPPPPRPAERHQDDSRGLVLPGYKYLGPFNGLDKGEPVNEADAAALEHDKAYDRQLDSGDNPYLKYNHADAEFQERLKEDTSFGGNLGRAVFQAKKRVLEPLGLVEEPVKTAPGKKRPVEHSPAEPDSSSGTGKAGQQPARKRLNFGQTGDADSVPDPQPLGQPPAAPTSLGSTTMATGSGAPMADNNEGADGVGNSSGNWHCDSQWLGDRVITTSTRTWALPTYNNHLYKQISSQSGASNDNHYFGYSTPWGYFDFNRFHCHFSPRDWQRLINNNWGFRPKRLNFKLFNIQVKEVTQNDGTTTIANNLISTVQVFTDSEYQLPYVLGSAHQGCLPPFPADVFMVPQYGYLTLNNGSQAVGRSSFYCLEYFPSQMLRTGNNFTFSYTFEDVPFHSSYAHSQSLDRLMNPLIDQYLYYLNRTQSNSGTLQQSRLLFSQAGPTSMSLQAKNWLPGPCYRQQRLSKQANDNNNSNFPWTAATKYHLNGRDSLVNPGPAMASHKDDEEKFFPMHGTLIFGKQGTNANDADLEHVMITDEEEIRTTNPVATEQYGNVSNNLQNSNTGPTTENVNHQGALPGMVWQDRDVYLQGPIWAKIPHTDGHFHPSPLMGGFGLKHPPPQIMIKNTPVPANPPTNFSAAKFASFITQYSTGQVSVEIEWELQKENSKRWNPEIQYTSNYNKSVNVDFTVDANGVYSEPRPIGTRYLTRNL

SEQ ID NO: 2889 - protein, 734 aa, Artificial Sequence
  Description of Artificial Sequence: Synthetic polypeptide
MAADGYLPDWLEDILSEGIRQWWKLKPGPPPPKPAERHKDDSRGLVLPGYKYLGPFNGLDKGEPVNEADAAALEHDKAYDRQLDSGDNPYLKYNHADAEFQERLKEDTSFGGNLGRAVFQAKKRVLEPLGLVEEPVKTAPGKKRPVEQSPAEPDSSSGTGKAGNQPARKRLNFGQTGDADSVPDPQPLGQPPAAPSGLGSTTMATGSGAPMADNNEGADGVGNSSGNWHCDSQWLGDRVITTSTRTWALPTYNNHLYKQISSQSGAANDNHYFGYSTPWGYFDFNRFHCHFSPRDWQRLINNNWGFRPKRLNFKLFNIQVKEVTQNDGTTTIANNLTSTVQVFTDSEYQLPYVLGSAHQGCLPPFPADVFMVPQYGYLTLNNGSQAVGRSSFYCLEYFPSQMLRTGNNFTFSYTFEDVPFHSSYAHSQSLDRLMNPLIDQYLYYLNKTQSNSGTLQQSRLLFSQAGPTSMSLQAKNWLPGPCYRQQRLSKQANDNNSNFPWTAATKYHLNGRDSLVNPGPAMASHKDDEEKFFPMHGTLIFGKQGTNANDADLDNVMITDEEEIRTTNPVATEQYGTVSNNLQNSNTGPTTGTVNHQGALPGMVWQDRDVYLQGPIWAKIPHTDGHFHPSPLMGGFGLKHPPPQIMIKNTPVPANPPTNFSSAKFASFITQYSTGQVSVEIEWELQKENSKRWNPEIQYTSNYNKSVNVDFTVDTNGVYSEPRPIGTRYLTRNL

SEQ ID NO: 2890 - protein, 735 aa, Artificial Sequence
  Description of Artificial Sequence: Synthetic polypeptide
MAADGYLPDWLEDILSEGIRQWWKLKPGPPPPKPAERHKDDSRGLVLPGYKYLGPFNGLDKGEPVNEADAAALEHDKAYDRQLDSGDNPYLKYNHADAEFQERLKEDTSFGGNLGRAVFQAKKRVLEPLGLVEEPVKTAPGKKRPVEQSPAEPDSSSGTGKAGNQPARKRLNFGQTGDADSVPDPQPLGQPPAAPSGLGSTTMATGSGAPMADNNEGADGVGNSSGNWHCDSQWLGDRVITTSTRTWALPTYNNHLYKQISSQSGAANDSHYFGYSTPWGYFDFNRFHCHFSPRDWQRLINNNWGFRPKRLNFKLFNIQVKEVTQNDGTTTIANNLTSTVQVFTDSEYQLPYVLGSAHQGCLPPFPADVFMVPQYGYLTLNNGSQAVGRSSFYCLEYFPSQMLRTGNNFTFSYTFEDVPFHSSYAHSQSLDRLMNPLIDQYLYYLNKTQSNSGTLQQSRLLFSQAGPTSMSLQAKNWLPGPCYRQQRLSKQANDNNNSNFPWTAATKYHLNGRDSLVNPGPAMASHKDDEEKFFPMHGTLIFGKQGTNANDADLDNVMITDEEEIRTTNPVATEQYGTVSNNLQNSNTGPTTGTVNHQGALPGMVWQDRDVYLQGPIWAKIPHTDGHFHPSPLMGGFGLKHPPPQIMIKNTPVPANPPTNFSSAKFASFITQYSTGQVSVEIEWELQKENSKRWNPEIQYTSNYNKSVNVDFTVDTNGVYSEPRPIGTRYLTRNL

SEQ ID NO: 2891 - protein, 735 aa, Artificial Sequence
  Description of Artificial Sequence: Synthetic polypeptide
MAADGYLPDWLEDTLSEGIRQWWKLKPGPPPPRPAERHQDDSRGLVLPGYKYLGPFNGLDKGEPVNEADAAALEHDKAYDRQLDSGDNPYLKYNHADAEFQERLKEDTSFGGNLGRAVFQAKKRVLEPLGLVEEPVKTAPGKKRPVEHSPAEPDSSSGTGKAGQQPARKRLNFGQTGDADSVPDPQPLGQPPAAPTSLGSTTMATGSGAPMADNNEGADGVGNSSGNWHCDSQWLGDRVITTSTRTWALPTYNNHLYKQISSQSGASNDNHYFGYSTPWGYFDFNRFHCHFSPRDWQRLINNNWGFRPKRLNFKLFNIQVKEVTQNDGTTTIANNLTSTVQVFTDSEYQLPYVLGSAHQGCLPPFPADVFMVPQYGYLTLNNGSQAVGRSSFYCLEYFPSQMLRTGNNFTFSYTFEDVPFHSSYAHSQSLDRLMNPLIDQYLYYLNRTQSNSGTLQQSRLLFSQAGPTSMSLQAKNWLPGPCYRQQRLSKQANDNNNSNFPWTAATKYHLNGRDSLVNPGPAMASHKDDEEKFFPMHGTLIFGKQGTNANDTDLEHVMITDEEEIRTTNPVATEQYGNVSNNLQNSNTGPTTENVNHQGALPGMVWQDRDVYLQGPIWAKIPHTDGHFHPSPLMGGFGLKHPPPQIMIKNTPVPANPPTNFSAAKFASFITQYSTGQVSVEIEWELQKENSKRWNPEIQYTSNYNKSVNVDFTVDANGVYSEPRPIGTRYLTRNL

SEQ ID NO: 2892 - protein, 734 aa, Artificial Sequence
  Description of Artificial Sequence: Synthetic polypeptide
MAADGYLPDWLEDILSEGIRQWWKLKPGPPPKPAERHKDDSRGLVLPGYKYLGPFNGLDKGEPVNEADAAALEHDKAYDRQLDSGDNPYLKYNHADAEFQERLKEDTSFGGNLGRAVFQAKKRVLEPLGLVEEPVKTAPGKKRPVEQSPAEPDSSSGTGKAGNQPARKRLNFGQTGDADSVPDPQPLGQPPAAPSGLGSTTMATGSGAPMADNNEGADGVGNSSGNWHCDSQWLGDRVITTSTRTWALPTYNNHLYKQISSQSGAANDNHYFGYSTPWGYFDFNRFHCHFSPRDWQRLINNNWGFRPKRLNFKLFNIQVKEVTQNDGTTTIANNLTSTVQVFTDSEYQLPYVLGSAHQGCLPPFPADVFMVPQYGYLTLNNGSQAVGRSSFYCLEYFPSQMLRTGNNFTFSYTFEDVPFHSSYAHSQSLDRLMNPLIDQYLYYLNKTQSNSGTLQQSRLLFSQAGPTSMSLQAKNWLPGPCYRQQRLSKQANDNNNSNFPWTAATKYHLNGRDSLVNPGPAMASHKDDEEKFFPMHGTLIFGKQGTNANDADLDNVMITDEEEIRTTNPVATEQYGTVSNNLQNSNTGPTTGTVNHQGALPGMVWQDRDVYLQGPIWAKIPHTDGHFHPSPLMGGFGLKHPPPQIMIKNTPVPANPPTNFSSAKFASFITQYSTGQVSVEIEWELQKENSKRWNPEIQYTSNYNKSVNVDFTVDTNGVYSEPRPIGTRYLTRNL

SEQ ID NO: 2893 - protein, 735 aa, Artificial Sequence
  Description of Artificial Sequence: Synthetic polypeptide
MAADGYLPDWLEDTLSEGIRQWWKLKPGPPPPRPAERHQDDSRGLVLPGYKYLGPFNGLDKGEPVNEADAAALEHDKAYDRQLDSGDNPYLKYNHADAEFQERLKEDTSFGGNLGRAVFQAKKRVLEPLGLVEEPVKTAPGKKRPVEHSPAEPDSSSGTGKAGQQPARKRLNFGQTGDADSVPDPQPLGQPPAAPTSLGSTTMATGSGAPMADNNEGADGVGNSSGNWHCDSQWLGDRVITTSTRTWALPTYNNHLYKQISSQSGASNDNHYFGYSTPWGYFDFNRFHCHFSPRDWQRLINNNWGFRPKRLNFKLFNIQVKEVTQNDGTTTIANNLTSTVQVFTDSEYQLPYVLGSAHQGCLPPFPADVFMVPQYGYLTLNNGSQAVGRSSFYCLEYFPSQMLRTGNNFTFSYTFGDVPFHSSYAHSQSLDRLMNPLIDQYLYYLNRTQSNSGTLQQSRLLFSQAGPTSMSLQAKNWLPGPCYRQQRLSKQANDNNNSNFPWTAATKYHLNGRDSLVNPGPAMASHKDDEEKFFPMHGTLIFGKQGTNANDADLEHVMITDEEEIRTTNPVATEQYGNVSNNLQNSNTGPTTENVNHQGALPGMVWQDRDVYLQGPIWAKIPHTDGHFHPSPLMGGFGLKHPPPQIMIKNTPVPANPPTNFSAAKFASFITQYSTGQVSVEIEWELQKENSKRWNPEIQYTSNYNKSVNVDFTVDANGVYSEPRPIGTRYLTRNL

SEQ ID NO: 2894 - protein, 735 aa, Artificial Sequence
  Description of Artificial Sequence: Synthetic polypeptide
MAADGYLPDWLEDTLSEGIRQWWKLKPGPPPPRPAERHQDDSRGLVLPGYKYLGPFNGLDKGEPVNEADAAALEHDKAYDRQLDSGDNPYLKYNHADAEFQERLKEDTSFGGNLGRAVFQAKKRVLEPLGLVEEPVKTAPGKKRPVEHSPAEPDSSSGTGKAGQQPARKRLNFGQTGDADSVPDPQPLGQPPAAPTSLGSTTMATGSGAPMADNNEGADGVGNSSGNWHCDSQWLGDRVITTSTRTWALPTYNNHLYKQISSQSGASNDSHYFGYSTPWGYFDFNRFHCHFSPRDWQRLINNNWGFRPKRLNFKLFNIQVKEVTQNDGTTTIANNLTSTVQVFTDSEYQLPYVLGSAHQGCLPPFPADVFMVPQYGYLTLNNGSQAVGRSSFYCLEYFPSQMLRTGNNFTFSYTFEDVPFHSSYAHSQSLDRLMNPLIDQYLYYLNRTQSNSGTLQQSRLLFSQAGPTSMSLQAKNWLPGPCYRQQRLSKQANDNNNSNFPWTAATKYHLNGRDSLVNPGPAMASHKDDEEKFFPMHGTLIFGKQGTNANDADLEHVMITDEEEIRTTNPVATEQYGNVSNNLQNSNTGPTTENVNHQGALPGMVWQDRDVYLQGPIWAKIPHTDGHFHPSPLMGGFGLKHPPPQIMIKNTPVPANPPTNFSAAKFASFITQYSTGQVSVEIEWELQKENSKRWNPEIQYTSNYNKSVNVDFTVDANGVYSEPRPIGTRYLTRNL

SEQ ID NO: 2895 - protein, 735 aa, Artificial Sequence
  Description of Artificial Sequence: Synthetic polypeptide
MAADGYLPDWLEDTLSEGIRQWWKLKPGPPPPRPAERHQDDSRGLVLPGYKYLGPFNGLDKGEPVNEADAAALEHDKAYDRQLDSGDNPYLKYNHADAEFQERLKEDTSFGGNLGRAVFQAKKRVLEPLGLVEEPVKTAPGKKRPVEHSPAEPDSSSGTGKAGQQPARKRLNFGQTGDADSVPDPQPLGQPPAAPTSLGSTTMATGSGAPMADNNEGADGVGNSSGNWHCDSQWLGDRVITTSTRTWALPTYNNHLYKQISSQSGASNDNHYFGYSTPWGYFDFNRFHCHFSPRDWQRLINNNWGFRPKRLNFKLFNIQVKEVTQNDGTTTIANNLTSTIQVFTDSEYQLPYVLGSAHQGCLPPFPADVFMVPQYGYLTLNNGSQAVGRSSFYCLEYFPSQMLRTGNNFTFSYTFEDVPFHSSYAHSQSLDRLMNPLIDQYLYYLNRTQSNSGTLQQSRLLFSQAGPTSMSLQAKNWLPGPCYRQQRLSKQANDNNNSNFPWTAATKYHLNGRDSLVNPGPAMASHKDDEEKFFPMHGTLIFGKQGTNANDADLEHVMITDEEEIRTTNPVATEQYGNVSNNLQNSNTGPTTENVNHQGALPGMVWQDRDVYLQGPIWAKIPHTDGHFHPSPLMGGFGLKHPPPQIMIKNTPVPANPPTNFSAAKFASFITQYSTGQVSVEIEWELQKENSKRWNPEIQYTSNYNKSVNVDFTVDANGVYSEPRPIGTRHLTRNL

SEQ ID NO: 2896 - protein, 735 aa, Artificial Sequence
  Description of Artificial Sequence: Synthetic polypeptide
MAADGYLPDWLEDTLSEGIRQWWKLKPGPPPPRPAERHQDDSRGLVLPGYKYLGPFNGLDKGEPVNEADAAALEHDKAYDRQLDSGDNPYLKYNHADAEFQERLKEDTSFGGNLGRAVFQAKKRVLEPLGLVEEPVKTAPGKKRPVEHSPAEPDSSSGTGKAGQQPARKRLNFGQTGDADSVPDPQPLGQPPAAPTSLGSTTMATGSGAPMADNNEGADGVGNSSGNWHCDSQWLGDRVITTSTRTWALPTYNNHLYKQISSQSGASNDNHYFGYSTPWGYFDFNRFHCHFSPRDWQRLINNNWGFRPKRLNFKLFNIQVKEVTQNDGTTTIANNLTSTVQVFTDSEYQLPYVLGSAHQGCLPPFPADVFMVPQYGYLTLNNGSQAVGRSSFYCLEYFPSQMLRTGNNFTFSYTFEDVPFHSSYAHSQSLDRLMNPLIDQYLYYLNRTQSNSGTLQQSGLLFSQAGPTSMSLQAKNWLPGPCYRQQRLSKQANDNNNSNFPWTAATKYHLNGRDSLVNPGPAMASHKDDEEKFFPMHGTLIFGKQGTNANDTDLEHVMITDEEEIRTTNPVATEQYGNVSNNLQNSNTGPTTENVNHQGALPGMVWQDRDVYLQGPIWAKIPHTDGHFHPSPLMGGFGLKHPPPQIMIKNTPVPANPPTNFSAAKFASFITQYSTGQVSVEIEWELQKENSKRWNPEIQYTSNYNKSVNVDFTVDANGVYSEPRPIGTRYLTRNL

SEQ ID NO: 2897 - protein, 735 aa, Artificial Sequence
  Description of Artificial Sequence: Synthetic polypeptide
MAADGYLPDWLEDTLSEGIRQWWKLKPGPPPPRPAERHQDDSRGLVLPGYKYLGPFNGLDKGEPVNEADAAALEHDKAYDRQLDSGDNPYLKYNHADAEFQERPKEDTSFGGNLGRAVFQAKKRVLEPLGLVEEPVKTAPGKKRPVEHSPAEPDSSSGTGKAGQQPARKRLNFGQTGDADSVPDPQPLGQPPAAPTSLGSTTMATGSGAPMADNNEGADGVGNSSGNWHCDSQWLGDRVITTSTRTWALPTYNNHLYKQISSQSGASNDNHYFGYSTPWGYFDFNRFHCHFSPRDWQRLINNNWGFRPKRLNFKLFNIQVKEVTQNDGTTTIANNLTSTVQVFTDSEYQLPYVLGSAHQGCLPPFPADVFMVPQYGYLTLNNGSQAVGRSSFYCLEYFPSQMLRTGNNFTFSYTFEDVPFHSSYAHSQSLDRLMNPLIDQYLYYLNRTQSNSGTLQQSRLLFSQAGPTSMSLQAKNWLPGPCYRQQRLSKQANDNNNSNFPWTAATKYHLNGRDSLVNPGPAMASHKDDEEKFFPMHGTLIFGKQGTNANDADLEHVMITDEEEIRTTNPVATEQYGNVSNNLQNSNTGPTTENVNHQGALPGMVWQDRDVYLQGPIWAKIPHTDGHFHPSPLMGGFGLKHPPPQIMIKNTPVPANPPTNFSAAKFASFITRYSTGQVSVEIEWELQKENSKRWNPEIQYTSNYNKSVNVDFTVDANGVYSEPRPIGTRYLTRNL

SEQ ID NO: 2898 - protein, 735 aa, Artificial Sequence
  Description of Artificial Sequence: Synthetic polypeptide
MAADGYLPDWLEDTLSEGIRQWWKLKPGPPPPKPAERHKDDSRGLVLPGYKYLGPFNGLDKGEPVNEADAAALEHDKAYDRQLDSGDNPYLKYNHADAELQERLKEDTSFGGNLGRAVFQAKKRVLEPLGLVEEPVKTAPGKKRPVEHSPVEPDSSSGTGKAGQQPARKRLNFGQTGDADSVPDPQPLGQPPAAPTSLGSTTMATGSGAPMADNNEGADGVGNSSGNWHCDSQWSGDRVITTSTRTWALPTYNNHLYKQISSQSGASNDNHYFGYSTPWGYFDFNRFHCHFSPRDWQRLINNNWGFRPKRLNFKLFNIQVKGVTQNDGTTTIANNLTSTVQVFTDSEYQLPYVLGSAHQGCLPPFPADVFMVPQYGYLTLNNGSQAVGRSSFYCLEYFPSQMLRTGNNFTFSYTFEDVPFHSSYAHSQSLDRLMNPLIDQYLYYLNKTQSNSGTLQQSRLLFSQAGPTSMSLQAKNWLPGPCYRQQRLSKQANDNNNSNFPWTAATKYHLNGRDSLVNPGPAMASHKDDEEKFFPMHGTLIFGKQGTNANDADLDNVMITDEEEIRTTNPVATEQYGTVSNNLQNSNTGPTTGTVNHQGALPGMVWQDRDVYLQGPIWAKIPHTDGHFHPSPLMGGFGLKHPPPQIMIKNTPVPANPPTNFSSAKFASFITQYSTGQVSVEIEWELQKENSKRWNPEIQYTSNYNKSVNVDFTVDTNGVYSEPRPIGTRYLTRNL

SEQ ID NO: 2899 - protein, 735 aa, Artificial Sequence
  Description of Artificial Sequence: Synthetic polypeptide
MAADGYLPDWLEDILSEGIRQWWKLKPGPPPPKPAERHKDDSRGLVLPGYKYLGPFNGLDKGEPVNEADAAALEHDKAYDRQLDSGDNPYLKYNHADAEFQERLKEDTSFGGNLGRAVFQAKKRVLEPLGLVEEPVKTAPGKKRPVEQSPAEPDSSSGTGKAGNQPARKRLNFGQTGDADSVPDPQPLGHPPAAPSGLGSTTMATGSGAPMADNNEGADGVGNSSGNWHCDSQWLGDRVITTSTRTWALPTYNNHLYKQISSQSGASNDNHYFGYSTPWGYFDFNRFHCHFSPRDWQRLINNNWGFRPKRLNFKLFNIQVKEVTQNDGTTTIANNLTSTVQVFTDSEYQLPYVLGSAHQGCLPPFPADVFMVPQYGYLTLNNGSQAVGRSSFYCLEYFPSQMLRTGNNFTFSYTFEDVPFHSSYAHSQSLDRLMNPLIDQYLYYLNKTQSNSGTLQQSRLLFSQAGPTSMSLQAKNWLPGPCYRQQRLSKQANDNNNSNFPWTAATKYHLNGRDSLVNPGPAMASHKDDEEKFFPMHGTLIFGKQGTNANDADLDNVMITDEEEIRTTNPVATEQYGTVSNNLQNSNTGPTTGTVNHQGALPGMVWQDRDVYLQGPIWAKIPHTDGHFHPSPLMGGFGLKHPPPQIMIKNTPVPANPPTNFSSAKFASFITQYSTGQVSVEIEWELQKENSKRWNPEIQYTSNYNKSVNVDFTVDTNGVYSEPRPIGTRYLTRNL

SEQ ID NO: 2900 - protein, 735 aa, Artificial Sequence
  Description of Artificial Sequence: Synthetic polypeptide
MAADGYLPDWLEDILSEGIRQWWKLKPGPPPPKPAERHKDDSRGLVLPGYKYLGPFNGLDKGEPVNEADAAALEHDKAYDRQLDSGDNPYLKYNHADAEFQERLKEDTSFGGNLGRAVFQAKKRVLEPLGLVEEPVKTAPGKKRPVEQSPAEPDSSSGTGKAGNQPARKRLNFGQTGDADSVPDPQPLGQPPAAPSGLGSTTMATGSGAPMADNNEGADGVGNSSGNWHCDSQWLGDRVITTSTRTWALPTYNNHLYKQISSQSGASNDNHYFGYSTPWGYFDFNRFHCHFSPRDWQRLINNNWGFRPKRLNFKLFNIQVKEVTQNDGTTTIANNLTSTVQVFTDSEYQLPYVLGSAHQGCLPPFPADVFMVPQYGYLTLNNGSQAVGRSSFYCLEYFPSQMLRTGNNFTFSYTFEDVPFHSSYAHSQSLDRLMNPLIDQYLYYLNKTQSNSGTLQQSRLLFSQAGPTSMSLQAKNWLPGPCYRQQRLSKQVNDNNNSNFPWTAATKYHLNGRDSLVNPGPAMASHKDDEEKFFPMHGTLIFGKQGTNANDADLDNVMITDEEEIRTTNPVATEQYGTVSNNLQNSNTGPTTGTVNHQGALPGMVWQDRDVYLQGPIWAKIPHTDGHFHPSPLMGGFGLKHPPPQIMIKNTPVPANPPTNFSSAKFASFITQYSTGQVSVEIEWELQKENSKRWNPEIQYTSNYNKSVNVDFTVDTNGVYSEPRPIGTRYLTRNL

SEQ ID NO: 2901 - protein, 735 aa, Artificial Sequence
  Description of Artificial Sequence: Synthetic polypeptide
MAADGYLPDWLEDILSEGIRQWWKLKPGPPPPKPAERHKDDSRGLVLPGYKYLGPFNGLDKGEPVNEADAAALEHDKAYDRQLDSGDNPYLKYNHADAEFQERLKEDTSFGGNLGRAVFQAKKRVLEPLGLVEEPVKTAPGKKRPVEQSPAEPDSSSGAGKAGNQPARKRLNFGQTGDADSVPDPQPLGQPPAAPSGLGSTTMATGSGAPMADNNEGADGVGNSSGNWHCDSQWLGDRVITTSTRTWALPTYNNHLYKQISSQSGASNDNHYFGYSTPWGYFDFNRFHCHFSPRDWQRLINNNWGFRPKRLNFKLFNIQVKEVTQNDGTTTIANNLTSTVQVFTDSEYQLPYVLGSAHQGCLPPFPADVFMVPQYGYLTLNNGSQAVGRSSFYCLEYFPSQMLRTGNNFTFSYTFEDVPFHSSYAHSQSLDRLMNPLIDQYLYYLTKTQSNSGTLQQSRLLFSQAGPTSMSLQAKNWLPGPCYRQQRLSKQANDNNNSNFPWTAATKYHLNGRDSLVNPGPAMASHKDDEEKFFPMHGTLIFGKQGTNANDADLDNVMITDEEEIRTTNPVATEQYGTVSNNLQNSNTGPTTGTVDHQGALPGMVWQDRDVYLQGPIWAKIPHTDGHFHPSPLMGGFGLKHPPPQIMIKNTPVPANPPTNFSSAKFASFITQYSTGQVSVEIEWELQKENSKRWNPEIQYTSNYNKSVNVDFTVDTNGVYSEPRPIGTRYLTRNL

SEQ ID NO: 2902 - protein, 735 aa, Artificial Sequence
  Description of Artificial Sequence: Synthetic polypeptide
MAADGYLPDWLEDILSEGIRQWWKLKPGPPPPKPAERHKDDSRGLVLPGYKYLGPFNGLDKGEPVNEADAAALEHDKAYDRQLDSGDNPYLKYNHADAEFQERLKEDTSFGGNLGRAVFQAKKRVLEPLGLVEEPVKTAPGKKRPVEQSPAEPDSSSGTGKAGNQPARKRLNFGQTGDADSVPDPQPLGQPPAAPSGLGSTTMATGSGAPMADNNEGADGVGNSSGNWHCDSQWLGDRVITTSTRTWALPTYNNHLYKQISSQSGASNDNHYFGYSTPWGYFDFNRFHCHFSPRDWQRLINNNWGFRPKRLNFKLFNIQVKEVTQNDGTTTIANNLTSTVQVFTDSEYQLPYVLGSAHQGCLPPFPADVFMVPQYGYLTLNNGSQAVGRSSFYCLEYFPSQMLRTGNNFTFSYTFEDVPFHSSYAHSQSLDRLMNPLIDQYLYYLNKTQSNSGTLQQSRLLLSQAGPTSMSLQAKNWLPGPCYRQQRLSKQANDNNNSNFPWTAATKYHLNGRDSLVNPGPAMASHKDDEEKFFPMHGTLIFGKQGTNANDADLDNVMITDEEEIRTTNPVATEQYGTVSNNLQNSNTGPTTGTVNHQGALPGMVWQDRDVYLQGPIWAKIPHTDGHFHPSPLMGGFGLKHPPPQIMIKNTPVPANPPTNFSSAKFASFITQYSTGQVSVEIEWELQKENSKRWNPEIQYTSNYNKSVNVDFTVDTNGVYSEPRPIGTRYLTRNL

SEQ ID NO: 2903 - protein, 735 aa, Artificial Sequence
  Description of Artificial Sequence: Synthetic polypeptide
MAADGYLPDWLEDTLSEGIRQWWKLKPGPPPPKPAERHKDDSRGLVLPGYKYLGPFNGLDKGEPVNEADAAALEHDKAYDRQLDSGDNPYLKYNHADAEFQERLKEDTSFGGNLGRAVFQAKKRVLEPLGLVEEPVKTAPGKKRPVEHSPVEPDSSSGTGKAGQQPARKRLNFGQTGDADSVPDPQPLGQPPAAPTSLGSTTMATGSGAPMADNNEGADGVDNSSGNWHCDSQWSGDRVITTSTRTWALPTYNNHLYKQISSQSGASNDNHYFGYSTPWGYFDFNRFHCHFSPRDWQRLINNNWGFRPKRLNFKLFNIQVKEVTQNDGTTTIANNLTSTVQVSTDSEYQLPYVLGSAHQGCLPPFPADVFMVPQYGYLTLNNGSQAVGRSSFYCLEYFPSQMLRTGNNFTFSYTFEDVPFHSSYAHSQSLDRLMNPLIDQYLYYLNKTQSNSGTLQQSRLLFSQAGPTSMSLQAKNWLPGPCYRQQRLSKQANDNNNSNFPWTAATKYHLNGRDSLVNPGPAMASHKDDEEKFFPMHGTLIFGKQGTNANDADLDNVMITDEEEIRTTNPVATEQYGTVSNNLQNSNTGPTTGTVNHQGALPGMVWQDRDVYLQGPIWAKIPHTDGHFHPSPLMGGFGLKHPPPQIMIKNTPVPANPPTNFSSAKFASFITQYSTGQVSVEIEWELQKENSKRWNPEIQYTSNYNKSVNVDFTVDTNGVYSEPRPIGTRYLTRNL

SEQ ID NO: 2904 - protein, 735 aa, Artificial Sequence
  Description of Artificial Sequence: Synthetic polypeptide
MAADGYLPDWLEDTLSEGIRQWWKLKPGPPPPKPAERHKDDSRGLVLPGYKYLGPFNGLDKGEPVNEADAAALEHDKAYDRQLDSGDNPYLKYNHADAEFQERLKEDTSFGGNLGRAVFQAKKRVLEPLGLVEEPVKTAPGKKRPVEHSPVEPDSSSGTGKAGQQPARKRLNFGQTGDADSVPDPQPLGQPPAAPTSLGSTTMATGSGAPMADNNEGADGVGNSSGNWHCDSQWSGDRVITTSTRTWALPTYNNHLYKQISSQSGASNDNHYFGYSTPWGYFDFNRFHCHFSPRDWQRLINNNWGFRPKRLNFKLFNIQVKEVTQNDGTTTIANNLTSTVQVFTDSEYQLPYVLGSAHQGCLPPFPADVFMVPQYGYLTLNNGSQAVGRSSFYCLEYFPSQMLRTGNNFTFSYTFEDVPFHSSYAHSQSLDRLMNPLIDQYLYYLNKTQSNSGTLQQSRLLFSQAGPTSMSLQAKNWLPGPCCRQQRLSKQANDNNNSNFPWTAATKYHLNGRDSLVNPGPAMASHKDDEEKFFPMHGTLIFGKQGTNANDADLDNVMITDEEEIRTTNPVATEQYGTVSNNLQNSNTGPTTGTVNHQGALPGMVWQDRDVYLQGPIWAKIPHTDGHFHPSPLMGGFGLKHPPPQIMIKNTPVPANPPTNFSSAKFASFITQYSTGQVSVEIEWELQKENSKRWNPEIQYTSNYNKSVNVDFTVDTNGVYSEPRPIGTRYLTRNL

SEQ ID NO: 2905 - protein, 735 aa, Artificial Sequence
  Description of Artificial Sequence: Synthetic polypeptide
MAADGYLPDWLEDILSEGIRQWWKLKPGPPPPKPAERHKDDSRGLVLPGYKYLGPFNGLDKGEPVNEADAAALEHDKAYDRQLDSGDNPYLKYNHADAEFQERLKEDTSFGGNLGRAVFQAKKRVLEPLGLVEEPVKTAPGKKRPVEQSPAEPDSSSGTGKAGNQPARKRLNFGQTGDADSVPDPQPLGQPPAAPSGLGSTTMATGSGAPMADNNEGADGVGNSSGNWHCDSQWLGDRVITTSTRTWALPTYNNHLYKQISSQSGASNDNHYFGYSTPWGYFDFNRFHCHFSPRDWQRLINNNWGFRPKRLNFKLFNIQVKEVTQNDGTTTIANNLTSTVQVFTDSEYQLPYVLGSAHQGCLPPFPADVFMVPQYGYLTLNNGSQAVGRSSFYCLEYFPSQMLRTGNNFTFSYTFEDVPFHSSYAHSQSLDRLMNPLIDQYLYYLNKTQSNSGTLQQSRLLFSQAGPTSMSLQAKNWLPGPCYRQQRLSKQANDNNNSNFPWTAATKYHLNGRDSLVNPGPAMASHKDDEEKFFPMHGTLIFGKQGTNANDADLDNVMITDEEEIRTTNPVATEQYGTVSNNLQNSNTGPTTGTVNHQGALPGMVWQDRDVYLQGPIWAKIPHTDGHFHPSPLMGGFGLKHPPPQIMIKNTPVPANPPTNFSSAKFASFITQYSTGQVSVEIERELQKENSKRWNPEIQYTSNYNKSVNVDFTVDTNGVYSEPRPIGTRYLTRNL

SEQ ID NO: 2906 - protein, 735 aa, Artificial Sequence
  Description of Artificial Sequence: Synthetic polypeptide
MAADGYLPDWLEDILSEGVRQWWKLKPGPPPPKPAERHKDDSRGLVLPGYKYLGPFNGLDKGEPVNEADAAALEHDKAYDRQLDSGDNPYLKYNHADAEFQERLKEDTSFGGNLGRAVFQAKKRVLEPLGLVEEPVKTAPGKKRPVEQSPAEPDSSSGTGKAGNQPARKRLNFGQTGDADSVPDPQPLGQPPAAPSGLGSTTMATGSGAPMADNNEGADGVGNSSGNWHCDSQWLGDRVITTSTRTWALPTYNNHLYKQISSQSGASNDNHYFGYSTPWGYFDFNRFHCHFSPRDWQRLINNNWGFRPKRLNFKLFNIQVKEVTQNDGTTTIANNLTSTVQVFTDSEYQLPYVLGSAHQGCLPPFPADVFMVPQYGYLTLNNGSQAVGRSSFYCLEYFPSQMLRTGNNFTFSYTFEDVPFHSSYAHSQSLDRLMNPLIDQYLYYLNKTQSNSGTLQQSRLLFSQAGPTSMSLQAKNWLPGPCYRQQRLSKQANDNNNSNFPWTAATKYHLNGRDSLVNPGPAMASHKDDEEKFFPMHGTLIFGKQGTNANDADLDNVMITDEEEIRTTNPVATEQYGTVSNNLQNSNTGPTTGTVNHQGALPGMVWQDRDVYLQGPIWAKIPHTDGHFHPSPLMGGFGLKHPPPQIMIKNTPVPANPPTNFSSAKFASFITQYSTGQVSVEIEWELQKENSKRWNPEIQYTSNYNKSVNVDFTVDTNGVYSEPRPIGTRYLTRNL

SEQ ID NO: 2907 - protein, 735 aa, Artificial Sequence
  Description of Artificial Sequence: Synthetic polypeptide
MAADGYLPDWLEDTLSEGIRQWWKLKPGPPPPKPAERHKDDSRGLVLPGYKYLGPFNGLDKGEPVNEADAAALEHDKAYDRQLDSGDNPYLKYNHADAEFQERLKEDTSFGGNLGRAVFQAKKRVLEPLGLVEEPVKTAPGKKRPVEHSPVEPDSSSGTGKAGQQPARKRLNFGQTGDADSVPDPQPLGQPPAAPTSLGSTTMATGSGAPMADNNEGADGVGNSSGNWHCDSQWSGDRVITTSTRTWALPTYNNHLYKQISSQSGASNDNHYFGYSTPWGYFDFNRFHCHFSPRDWQRLINNNWGFRPKRLNFKLFNIQVKEVTQNDGTTTIANNLTSTVQVSTDSEYQLPYVLGSAHQGCLPPFPADVFMVPQYGYLTLNNGSQAVGRSSFYCLEYFPSQMLRTGNNFTFSYTFEDVPFHSSYAHSQSLDRLMNPLIDQYLYYLNKTQSNSGTLQQSRLLFSQAGPTSMSLQAKNWLPGPCYRQQRLSKQANDNNNSNFPWTAATKYHLNGRDSLVNPGPAMASHKDDEEKFFPMHGTLIFGKQGTNANDADLDNVMITDEEEIRTTNPVATEQYGTVSNNLQNSNTGPTTGTVNHQGALPGMVWQDRDVYLQGPIWAKIPHTDGHFHPSPLMGGFGLKHPPPQIMIKNTPVPANPPTNFSSAKFASFITQYSTGQVSVEIEWELQKENSKRWNPEIQYTSNYNKSVNVDFTVDTNGVYSEPRPIGTRYLTRNL

SEQ ID NO: 2908 - protein, 735 aa, Artificial Sequence
  Description of Artificial Sequence: Synthetic polypeptide
MAADGYLPDWLEDILSEGIRQWWKLKPGPPPPKPAERHKDDSRGLVLPGYKYLGPFNGLDKGEPVNEADAAALEHDKAYDRQLDSGDNPYLKYNHADAEFQERLKEDTSFGGNLGRAVFQAKKRVLEPLGLVEEPVKTAPGKKRPVEQSPAEPDSSSGTGKAGNQPARKRLNFGQTGDADSVPDPQPLGQPPAAPSGLGSTTMATGSGAPMADNNEGADGVGNSSGNWHCDSQWLGDRVITTSTRTWALPTYNNHLYKQISSQSGASNDNHYFGYSTPWGYFDFNRFHCHFSPRDWQRLINNNWGFRPKRLNFKLFNIQVKEVTQNDGTTTIANNLTSTVQVFTDSEYQLPYVLGSAHQGCLPPFPADVFMVPQYGYLTLNNGSQAVGRSSFYCLEYFPSQMLRTGNNFTFSYTFEDVPFHSSYAHSQSLDRLMNPLIDQYLYYLNKTQSNSGTLQQSRLLFSQAGPTSMSLQAKNWLPGPCYRQQRLSKQANDNNNSNFPWTAATKYHLNGRDSLVNPGPAMASHKDDEEKFFPMHGTLIFGKQGTNANDADLDNVMITDEEEIRTTNPVATEQYGTVSNNLQNSNTGPTTGTVNHQGALPGMVWQDRDVYLQGPIWAKIPHTDGHFHPSPLMGGFGLKHPPPQIMIKNTPVPVNPPTNFSSAKFASFITQYSTGQVSVEIEWELQKENSKRWNPEIQYTSNYNKSVNVDFTVDTNGVYSEPRPIGTRYLTRNL

SEQ ID NO: 2909 - protein, 735 aa, Artificial Sequence
  Description of Artificial Sequence: Synthetic polypeptide
MAADGYLPDWLEDTLSEGIRQWWKLKPGPPPPKPAERHKDDSRGLVLPGYKYLGPFNGLDKGEPVNEADAAALEHDKAYDRQLDSGDNPYLKYNHADAEFQERLKEDTSFGGNLARAVFQAKKRVLEPLGLVEEPVKTAPGKKRPVEHSPAEPDSSSGTGKSGQQPARKRLNFGQTGDADSVPDPQPLGQPPAAPSGLGSTTMATGSGAPMADNNEGADGVGNSSGNWHCDSQWLGDRVITTSTRTWALPTYNNHLYKQISSQSGASNDNHYFGYSTPWGYFDFNRFHCHFSPRDWQRLINNNWGFRPKRLNFKLFNIQVKEVTQNDGTTTIANNLTSTVQVFTDSEYQLPYVLGSAHQGCLPPFPADVFMVPQYGYLTLNNGSQAVGRSSFYCLEYFPSQMLRTGNNFTFSYTFEDVPFHSSYAHSQSLDRLMNPLIDQYLYYLNKTQSNSGTLQQSRLLFSQAGPTSMSLQAKNWLPGPCYRQQRLSKQANDNNNSNFPWTAATKYHLNGRDSLVNPGPAMASHKDDEEKFFPMHGTLIFGKQGTNANDADLDNVMITDEEEIRTTNPVATEQYGTVSNNLQNSNTGPTTGTVNHQGALPGMVWQDRDVYLQGPIWAKIPHTDGHFHPSPLMGGFGLKHPPPQIMIKNTPVPANPPTNFSSAKFASFITQYSTGQVSVEIEWELQKENSKRWNPEIQYTSNYNKSVNVDFTVDTNGVYSEPRPIGTRYLTRNL

SEQ ID NO: 2910 - protein, 735 aa, Artificial Sequence
  Description of Artificial Sequence: Synthetic polypeptide
MAADGYLPDWLEDILSEGIRQWWKLKPGPPPPKPAERHKDDSRGLVLPGYKYLGPFNGLDKGEPVNEADAAALEHDKAYDRQLDSGDNPYLKYNHADAEFQERLKEDTSFGGNLGRAVFQAKKRVLEPLGLVEEPVKTAPGKKRPVEQSPAEPDSSSGTGKAGNQPARKRLNFGQTGDADSVPDPQPLGQPPAAPSGLGSTTMATGSGAPMADNNEGADGVGNSSGNWHCDSQWLGDRVITTSTRTWALPTYNNHLYKQISSQSGASNDNHYFGYSTPWGYFDFNRFHCHFSPRDWQRLINNNWGFRPKRLNFKLFNIQVKEVTQNDGTTTIANNLTSTVQVFTDSEYQLPYVLGSAHQGCLPPFPADVFMVPQYGYLTLNNGSQAVGRSSFYCLEYFPSQMLRTGNNFTFSYTFEDVPFHSSYAHSQSLDRLMNPLIDQYLYYLNKTQSNSGTLQQSRLLFSQAGPTSMSLQAKNWLPGPCYRQQRLSKQANDNNNSNFPWTAATKYHLNGRDSLVNPGPAMASHKDDEEKFFPMHGTLIFGKQGTNANDADLDNVMITDEEEIRTTNPVATEQYGTVSNNLQNSNTGPTTGTVNHQGALPGMVWQDRDVYLQGPIWAKIPHTDGHFHPSPLMGGFGLKHPPPQIMIKNTPVPANPPTNFSSAKFASFITQYSTGQVSVGIEWELQKENSKRWNPEIQYTSNYNKSVNVDFTVDTNGVYSEPRPIGTRYLTRNL

SEQ ID NO: 2911 - protein, 734 aa, Artificial Sequence
  Description of Artificial Sequence: Synthetic polypeptide
MAADGYLPDWLEDILSEGIRQWWKLKPGPPPPKPAERHKDDSRGLVLPGYKYLGPFNGLDKGEPVNEADAAALEHDKAYDRQLDSGDNPYLKYNHADAEFQERLKEDTSFGGNLGRAVFQAKKRVLEPLGLVEEPVKTAPGKKRPVEQSPAEPDSSSGTGKAGNQPARKRLNFGQTGDADSVPDPQPLGQPPAAPSGLGSTTMATGSGAPMADNNEGADGVGNSSGNWHCDSQWLGDRVITTSTRTWALPTYNNHLYKQISSQSGASNDNHYFGYSTPWGYFDFNRFHCHFSPRDWQRLINNNWGFRPKRLNFKLFNIQVKEVTQNDGTTTIANNLTSTVQVFTDSEYQLPYVLGSAHQGCLPPFPADVFMVPQYGYLTLNNGSQAVGRSSFYCLEYFPSQMLRTGNNFTFSYTFEDVPFHSSYAHSQSLDRLMNPLIDQYLYYLNKTQSNSGTLQQSRLLFSQAGPTSMSLQAKNWLPGPCYRQQRLSKQANDNNSNFPWTAATKYHLNGRDSLVNPGPAMASHKDDEEKFFPMHGTLIFGKQGTNANDADLDNVMITDEEEIRTTNPVATEQYGTVSNNLQNSNTGPTTGTVNHQGALPGMVWQDRDVYLQGPIWAKIPHTDGHFHPSPLMGGFGLKHPPPQIMIKNTPVPANPPTNFSSAKFASFITQYSTGQVSVEIEWELQKENSKRWNPEIQYTSNYNKSVNVDFTVDTNGVYSEPRPIGTRYLTRNL

SEQ ID NO: 2912 - protein, 735 aa, Artificial Sequence
  Description of Artificial Sequence: Synthetic polypeptide
MAADGYLPDWLEDTLSEGIRQWWKLKPGPPPPKPAERHKDDSRGLVLPGYKYLGPFNGLDKGEPVNEADAAALEHDKAYDRQLDSGDNPYLKYNHADAEFQERLKEDTSFGGNLGRAVFQAKKRVLEPLGLVVEPVKTAPGKKRPVEHSPVEPDSSSGTGKAGQQPARKRLNFDQTGGADSVPDPQPLGQPPAAPTSLGSTTMATGSGAPMADNNEGADGVGNSSGNWHCDSQWSGDRVITTSTRTWALPTYNNHLYKQISSRSGASNDNHYFGYSTPWGYFDFNGFHCHFSPRDWQRLINNNWGFRPKRLNFKLFNIQVKEVTQNDGTTTIANNLTSTVQVFTDSEYQLPHVLGSAHQGCLPPFPADVFMVPQYGYLTLNNGSQAVGRSSFYCPGYFPSQMLRTGNNFTFSYTFEDVPFHSSYAHSQSLDRLMNPLIDQYLYYLNKTQSNSGTLQQSRLLFSQAGPTSMSLQAKNWLPGPCYRQQRLSKQANGNNNSNFPWTAATKYHLNGRDSLVNPGPAMASHKDDEEKFFPMHGTLIFGKQGTNANDADLDNVMITDEEEIRTTNPVATEQYGTVSNNLQNSNTGPTTGTVNHQGALPGMVWQDRDVYLQGPIWAKIPHTDGHFHPSPLMGGFGLKHPPPQIMIKNTPVPANPPTNFSSAKFASFITQYSTGQVSVEIEWELQKENSKRWNPEIQYTSNYNKSVNVDFTVDTNGVYSEPRPIGTRYLTRNL

SEQ ID NO: 2913 - protein, 734 aa, Artificial Sequence
  Description of Artificial Sequence: Synthetic polypeptide
MAADGYLPDWLEDTLSEGIRQWWKLKPGPPPPKPAERHKDDSRGLVLPGYKYLGPFNGLDKGEPVNEADAAALEHDKAYDRQLDSGDNPYLKYNHADAEFQERLKEDTSFGGNLGRAVFQAKKRVLEPLGLVEEPVKTAPGKKRPVEHSPVEPDSSSGTGKAGQQPARKRLNFGQTGDADSVPDPQPLGQPPAAPTSLGSTTMATGSGAPMADNNEGADGVGNSSGNWHCDSQWSGDRVITTSTRTWALPTYNNHLYKQISSQSGASNDNHYFGYSTPWGYFDFNRFHCHFSPRDWQRLINNNWGFRPKRLNFKLFNIQVKEVTQNDGTTTIANNLTSTVQVFTDSEYQLPYVLGSAHQGCLPPFPADVFMVPQYGYLTLNNGSQAVGRSSFYCLEYFPSQMLRTGNNFTFSYTFEDVPFHSSYAHSQSLDRLMNPLIDQYLYYLNKTQSNSGTLQQSRLLFSQAGPTSMSLQAKNWLPGPCYRQQRLSKQANDNNSNFPWTAATKYHLNGRDSLVNPGPAMASHKDDEEKFFPMHGTLIFGKQGTNANDADLDNVMITDEEEIRTTNPVATEQYGTVSNNLQNSNTGPTTGTVNHQGALPGMVWQDRDVYLQGPIWAKIPHTDGHFHPSPLMGGFGLKHPPPQIMIKNTPVPANPPTNFSSAKFASFITQYSTGQVSVEIEWELQKENSKRWNPEIQYTSNYNKSVNVDFTVDTNGVYSEPRPIGTRYLTRNL

SEQ ID NO: 2914 - protein, 735 aa, Artificial Sequence
  Description of Artificial Sequence: Synthetic polypeptide
MAADGYLPDWLEDILSEGIRQWWKLKPGPPPPKPAERHKDDSRGLVLPGYKYLGPFNGLDKGEPVNEADAAALEHDKAYDRQLDSGDNPYLKYNHADAEFQERLKEDTSFGGNLGRAVFQAKKRVLEPLGLVEEPVKTAPGKKRPVEQSPAEPDSSSGTGKAGNQPARKRLNFGQTGDADSVPDPQPLGQPPAAPSGLGSTTMATGSGAPMADNNEGADGVGNSSGNWHCDSQWLGDRVITTSTRTWALPTYNNHLYKQISSQSGASNDNHYFGYSTPWGYFDFNRFHCHFSPRDWQRLINNNWGFRPKRLNFKLFNIQVKEVTQNDGTTTIANNLTSTVQVFTDSEYQLPYVLGSAHQGCLPPFPADVFMVPQYGYLTLNNGSQAVGRSSFYCLEYFPSQMLRTGNNFTFSYTFEDVPFHSSYAHSQSLDRLMNPLIDQYLYYLNKTQSNSGTLQQSRLLFSQAGPTSMSLQAKNWLPGPCYRQQRLSKQANDNNNSNFPWTAATKYHLNGRDSLVNPGPAMASHKDDEEKFFPMHGTLIFGKQGTNANDADLDNVMITDEEEIRTTNPVATEQYGTVSNNLQNSNTGPTTGTVNHQGALPGMVWQDRDVYLQGPIWAKIPHTDGHFHPSPLMGGFGLKHPPPQIMIKNTPVPANPPTNFSSAKFASFITQYSTGQVSVGIEWVLQKENSKRWNPEIQYTSNYNKSVNVDFTVDTNGVYSEPRPIGTRYLTRNL

SEQ ID NO: 2915 - protein, 735 aa, Artificial Sequence
  Description of Artificial Sequence: Synthetic polypeptide
MAADGYLPDWLEDTLSEGIRQWWKLKPGPPPPKPAERHKDDSRGLVLPGYKYLGPFNGLDKGEPVNEADAAALEHDKAYDRQLDSGDNPYLKYNHADAEFQERLKEDTSFGGNLARAVFQAKKRVLEPLGLVEEPVKTAPGKKRPVEQSPAEPDSSSGTGKAGNQPARKRLNFGQTGDADSVPDPQPLGQPPAAPSGLGSTTMATGSGAPMADNNEGADGVGNSSGNWHCDSQWLGDRVITTSTRTWALPTYNNHLYKQISSQSGASNDNHYFGYSTPWGYFDFNRFHCHFSPRDWQRLINNNWGFRPKRLNFKLFNIQVKEVTQNDGTTTIANNLTSTVQVFTDSEYQLPYVLGSAHQGCLPPFPADVFMVPQYGYLTLNNGSQAVGRSSFYCLEYFPSQMLRTGNNFTFSYTFEDVPFHSSYAHSQSLDRLMNPLIDQYLYYLNKTQSNSGTLQQSRLLFSQAGPTSMSLQAKNWLPGPCYRQQRLSKQANDNNNSNFPWTAATKYHLNGRDSLVNPGPAMASHKDDEEKFFPMHGTLIFGKQGTNANDADLDNVMITDEEEIRTTNPVATEQYGTVSNNLQNSNTGPTTGTVNHQGALPGMVWQDRDVYLQGPIWAKIPHTDGHFHPSPLMGGFGLKHPPPQIMIKNTPVPANPPTNFSSAKFASFITQYSTGQVSVEIEWELQKENSKRWNPEIQYTSNYNKSVNVDFTVDTNGVYSEPRPIGTRYLTRNL

SEQ ID NO: 2916 - protein, 735 aa, Artificial Sequence
  Description of Artificial Sequence: Synthetic polypeptide
MAADGYLPDWLEDILSEGIRQWWKLKPGPPPPKPAERHKDDSRGLVLPGYKYLGPFNGLDKGEPVNEADAAALEHDKAYDRQLDSGDNPYLKYNHADAEFQERLKEDTSFGGNLGRAVFQAKKRVLEPLGLVEEPVKTAPGKKRPVEQSPAEPDSSSGAGKAGNQPARKRLNFGQTGDADSVPDPQPLGQPPAAPSGLGSTTMATGSGAPMADNNEGADGVGNSSGNWHCDSQWLGDRVITTSTRTWALPTYNNHLYKQISSQSGASNDNHYFGYSTPWGYFDFNRFHCHFSPRDWQRLINNNWGFRPKRLNFKLFNIQVKEVTQNDGTTTIANNLTSTVQVFTDSEYQLPYVLGSAHQGCLPPFPADVFMVPQYGYLTLNNGSQAVGRSSFYCLEYFPSQMLRTGNNFTFSYTFEDVPFHSSYAHSQSLDRLMNPLIDQYLYYLNKTQSNSGTLQQSRLLFSQAGPTSMSLQAKNWLPGPCYRQQRLSKQANDNNNSNFPWTAATKYHLNGRDSLVNPGPAMASHKDDEEKFFPMHGTLIFGKQGTNANDADLDNVMITDEEEIRTTNPVATEQYGTVSNNLQNSNTGPTTGTVNHQGALPGMVWQDRDVYLQGPIWAKIPHTDGHFHPSPLMGGFGLKHPPPQIMIKNTPVPANPPTNFSSAKFASFITQYSTGQVSVEIEWELQKENSKRWNPEIQYTSNYNKSVNVDFTVDTNGVYSEPRPIGTRYLTRNL

SEQ ID NO: 2917 - protein, 735 aa, Artificial Sequence
  Description of Artificial Sequence: Synthetic polypeptide
MAADGYLPDWLKDILSEGIRQWWKLKPGPPPPKPAERHKDDSRGLVLPGYKYLGPFNGLDKGEPVNEADAAALEHDKAYDRQLDSGDNPYLKYNHADAEFQERLKEDTSFGGNLGRAVFQAKKRVLEPLGLVEEPVKTAPGKKRPVEQSPAEPDSSSGTGKAGNQPARKRLNFGQTGDADSVPDPQPLGQPPAAPSGLGSTTMATGSGAPMADNNEGADGVGNSSGNWHRDSQWLGDRVITTSTRTWALPTYNNHLYKQISSQSGASNDNHYFGYSTPWGYFDFNRFHCHFSPRDWQRLINNNWGFRPKRLNFKLFNIQVKEVTQNDGTTTIANNLTSTVQVFTDSEYQLPYVLGSAHQGCLPPFPADVFMVPQYGYLTLNNGSQAVGRSSFYCLEYFPSQMLRTGNNFTFSYTFEDVPFHSSYAHSQSLDRLMNPLIDQYLYYLNKTQSNSGTLQQSRLLFSQAGPTSMSLQAKNWLPGPCYRQQRLSKQANDNNNSNFPWTAATKYHLNGRDSLVNPGPAMASHKDDEEKFFPMHGTLIFGKQGTNANDADLDNVMITDEEEIRTTNPVATEQYGTVSNNLQNSNTGPTTGTVNHQGALPGMVWQDRDVYLQGPIWAKIPHTDGHFHPSPLMGGFGLKHPPPQIMIKNTPVPVNPPTNFSSAKFASFITQYSTGQVSVEIEWELQKENSKRWNPEIQYTSNYNKSVNVDFTVDTNGVYSEPRPIGTRYLTRNL

SEQ ID NO: 2918 - protein, 735 aa, Artificial Sequence
  Description of Artificial Sequence: Synthetic polypeptide
MAADGYLPDWLEDILSEGIRRWWKLKPGPPPPKPAERHKDDSRGLVLPGYKYLGPFNGLDKGEPVNEADAAALEHDKAYDRQLDSGDNPYLKYNHADAEFQERLKEDTSFGGNLGRAVFQAKKRVLEPLGLVEEPVKTAPGKKRPVEQSPAEPDSSSGTGKAGNQPARKRLNFGQTGDADSVPDPQPLGQPPAAPSGLGSTTMATGSGAPMADNNEGADGVGNSSGNWHCDSQWLGDRVITTSTRTWALPTYNNHLYKQISSQSGASNDNHYFGYSTPWGYFDFNRFHCHFSPRDWQRLINNNWGFRPKRLNFKLFNIQVKEVTQNDGTTTIANNLTSTVQVFTDSEYQLPYVLGSAHQGCLPPFPADVFMVPQYGYLTLNNGSQAVGRSSFYCLEYFPSQMLRTGNNFTFSYTFEDVPFHSSYAHSQSLDRLMNPLIDQYLYYLNKTQSNSGTLQQSRLLFSQAGPTSMSLQAKNWLPGPCYRQQRLSKQANDNNNSNFPWTAATKYHLNGRDSLVNPGPAMASHKDDEEKFFPMHGTLIFGKQGTNANDADLDNVMITDEEEIRTTNPVATERYGTVSNNLQNSNTGPTTGTVNHQGALPGMVWQDRDVYLQGPIWAKIPHTDGHFHPSPLMGGFGLKHPPPQIMIKNTPVPANPPTNFSSAKFASFITQYSTGQVSVEIEWELQKENSKRWNPEIQYTSNYNKSVNVDFTVDTNGVYSEPRPIGTRYLTRNL

SEQ ID NO: 2919 - protein, 735 aa, Artificial Sequence
  Description of Artificial Sequence: Synthetic polypeptide
MAADGYLPDWLEDTLSEGIRQWWKLKPGPPPPKPAERHKDDSRGLVLPGYKYLGPFNGLDKGEPVNEADAAALEHDKAYDRQLDSGDNPYLKYNHADAEFQERLKEDTSFGGNLARAVFQAKKRVLEPLGLVEEPVKTAPGKKRPVEHSPAEPDSSSGTGKSGQQPARKRLNFGQTGDADSVPDPQPLGQPPAAPSGLGTNTMASGSGAPMADNNEGADGVGNSSGNWHCDSQWLGDRVITTSTRTWALPTYNNHLYKQISSQSGASNDNHYFGYSTPWGYFDFNRFHCHFSPRDWQRLINNNWGFRPKRLNFKLFNIQVKEVTQNDGTTTIANNLTSTVQVFTDSEYQLPYVLGSAHQGCLPPFPADVFMVPQYGYLTLNNGSQAVGRSSFYCLEYFPSQMLRTGNNFTFSYTFEDVPFHSSYAHSQSLDRLMNPLIDQYLYYLNKTQSNSGTLQQSRLLFSQAGPTSMSLQAKNWLPGPCYRQQRLSKQANDNNNSNFPWTAATKYHLNGRDSLVNPGPAMASHKDDEEKFFPMHGTLIFGKQGTNANDADLDNVMITDEEEIRTTNPVATEQYGTVSNNLQNSNTGPTTGTVNHQGALPGMVWQDRDVYLQGPIWAKIPHTDGHFHPSPLMGGFGLKHPPPQIMIKNTPVPANPPTNFSSAKFASFITQYSTGQVSVEIEWELQKENSKRWNPEIQYTSNYNKSVNVDFTVDTNGVYSEPRPIGTRYLTRNL

SEQ ID NO: 2920 - protein, 735 aa, Artificial Sequence
  Description of Artificial Sequence: Synthetic polypeptide
MAADGYLPDWLEDTLSEGIRQWWKLKPGPPPPKPAERHKDDSRGLVLPGYKYLGPFNGLDKGEPVNEADAAALEHDKAYDRQLDSGDNPYLKYNHADAEFQERLKEDTSFGGNLARAVFQAKKRVLEPLGLVEEPVKTAPGKKRPVEHSPAEPDSSSGTGKSGQQPARKRLNFGQTGDADSVPDPQPLGQPPAAPSGLGTNTMASGSGAPMADNNEGADGVGNSSGNWHCDSTWMGDRVITTSTRTWALPTYNNHLYKQISSQSGASNDNHYFGYSTPLGYFDFNRFHCHFSPRDWQRLINNNWGFRPKRLNFKLFNIQVKEVTQNDGTTTIANNLTSTVQVFTDSEYQLPYVLGSAHQGCLPPFPADVFMVPQYGYLTLNNGSQAVGRSSFYCLEYFPSQMLRTGNNFTFSYTFEDVPFHSSYAHSQSLDRLMNPLIDQYLYYLNKTQSNSGTLQQSRLLFSQAGPTSMSLQAKNWLPGPCYRQQRLSKQANDNNNSNFPWTAATKYHLNGRDSLVNPGPAMASHKDDEEKFFPMHGTLIFGKQGTNANDADLDNVMITDEEEIRTTNPVATEQYGTVSNNLQNSNTGPTTGTVNHQGALPGMVWQDRDVYLQGPIWAKIPHTDGHFHPSPLMGGFGLKHPPPQIMIKNTPVPANPPTNFSSAKFASFITQYSTGQVSVEIEWELQKENSKRWNPEIQYTSNYNKSVNVDFTVDTNGVYSEPRPIGTRYLTRNL

SEQ ID NO: 2921 - protein, 735 aa, Artificial Sequence
  Description of Artificial Sequence: Synthetic polypeptide
MAADGYLPDWLEDTLSEGIRQWWKLKPGPPPPKPAERHKDDSRGLVLPGYKYLGPFNGLDKGEPVNEADAAALEHDKAYDRQLDSGDNPYLKYNHADAEFQERLKEDTSFGGNLARAVFQAKKRVLEPLGLVEEPVKTAPGKKRPVEHSPAEPDSSSGTGKSGQQPARKRLNFGQTGDADSVPDPQPLGQPPAAPSGLGTNTMASGSGAPMADNNEGADGVGNSSGNWHCDSTWMGDRVITTSTRTWALPTYNNHLYKQISSQSGASNDNHYFGYSTPWGYFDFNRFHCHFSPRDWQRLINNNWGFRPKRLNFKLFNIQVKEVTQNDGTTTIANNLTSTVQVFTDSEYQLPYVLGSAHQGCLPPFPADVFMVPQYGYLTLNNGSQAVGRSSFYCLEYFPSQMLRTGNNFTFSYTFEDVPFHSSYAHSQSLDRLMNPLIDQYLYYLNKTQSNSGTLQQSRLLFSQAGPTSMSLQAKNWLPGPCYRQQRLSKQANDNNNSNFPWTAATKYHLNGRDSLVNPGPAMASHKDDEEKFFPMHGTLIFGKQGTNANDADLDNVMITDEEEIRTTNPVATEQYGTVSNNLQNSNTGPTTGTVNHQGALPGMVWQDRDVYLQGPIWAKIPHTDGHFHPSPLMGGFGLKHPPPQIMIKNTPVPANPPTNFSSAKFASFITQYSTGQVSVEIEWELQKENSKRWNPEIQYTSNYNKSVNVDFTVDTNGVYSEPRPIGTRYLTRNL

SEQ ID NO: 2922 - protein, 735 aa, Artificial Sequence
  Description of Artificial Sequence: Synthetic polypeptide
MAADGYLPDWLEDTLSEGIRQWWKLKPGPPPPKPAERHKDDSRGLVLPGYKYLGPFNGLDKGEPVNEADAAALEHDKAYDRQLDSGDNPYLKYNHADAEFQERLKEDTSFGGNLGRAVFQAKKRVLEPLGLVVEPVKTAPGKKRPVEHSPVEPDSSSGTGKAGQQPARKRLNFDQTGDADSVPDPQPLGQPPAAPTSLGSTTMATGSGAPMADNNEGADGVGNSSGNWHCDSQWSGDRVITTSTRTWALPTYNNHLYKQISSRSGASNDNHYFGYSTPWGYFDFNGFHCHFSPRDWQRLINNNWGFRPKRLNFKLFNIQVKEVTQNDGTTTIANNLTSTVQVFTDSEYQLPHVLGSAHQGCLPPFPADVFMVPQYGYLTLNNGSQAVGRSSFYCPGYFPSQMLRTGNNFTFSYTFEDVPFHSSYAHSQSLDRLMNPLIDQYLYYLNKTQSNSGTLQQSRLLFSQAGPTSMSLQAKNWLPGPCYRQQRLSKQANGNNNSNFPWTAATKYHLNGRDSLVNPGPAMASHKDDEEKFFPMHGTLIFGKQGTNANDADLDNVMITDEEEIRTTNPVATEQYGTVSNNLQNSNTGPTTGTVNHQGALPGMVWQDRDVYLQGPIWAKIPHTDGHFHPSPLMGGFGLKHPPPQIMIKNTPVPANPPTNFSSAKFASFITQYSTGQVSVEIEWELQKENSKRWNPEIQYTSNYNKSVNVDFTVDTNGVYSEPRPIGTRYLTRNL

SEQ ID NO: 2923 - protein, 735 aa, Artificial Sequence
  Description of Artificial Sequence: Synthetic polypeptide
MAADGYLPDWLEDILSEGIRQWWKLKPGPPPPKPAERHKDDSRGLVLPGYKYLGPFNGLDKGEPVNEADAAALEHDKAYDRQLDSGDNPYLKYNHADAEFQGRLKEDTSFGGNLGRAVFQAKKRVLEPLGLVEEPVKTAPGKKRPVEQSPAEPDSSSGTGKAGNQPARKRLNFGQTGDADSVPDPQPLGQPPAAPSGLGSTTMATGSGAPMADNNEGADGVGNSSGNWHCDSQWLGDRVITTSTRTWALPTYNNHLYKQISSQSGASNDNHYFGYSTPWGYFDFNRFHCHFSPRDWQRLINNNWGFRPKRLNFKLFNIQVKEVTQNDGTTTIANNLTSTVQVFTDSEYQLPYVLGSAHQGCLPPFPADVFMVPQYGYLTLNNGSQAVGRSSFYCLEYFPSQMLRTGNNFTFSYTFEDVPFHSSYAHSQSLDRLMNPLIDQYLYYLNKTQSNSGTLQQSRLLFSQAGPTSMSLQAKNWLPGPCYRQQRLSKQANDNNNSNFPWTAATKYHLNGRDSLVNPGPAMASHKDDEEKFFPMHGTLIFGKQGTNANDADLDNVMITDEEEIRTTNPVATEQYGTVSNNLQNSNTGPTTGTVNHQGALPGMVWQDRDVYLQGPIWAKIPHTDGHFHPSPLMGGFGLKHPPPQIMIKNTPVPANPPTNFSSAKFASFITQYSTGQVSVEIEWELQKENSKRWNPEIQYTSNYNKSVNVDFTVDTNGVYSEPRPIGTRYLTRNL

SEQ ID NO: 2924 - protein, 735 aa, Artificial Sequence
  Description of Artificial Sequence: Synthetic polypeptide
MAADGYLPDWLEDILSEGIRQWWKLKPGPPPPKPAERHKDDSRGLVLPGYKYLGPFNGLDKGEPVNEADAAALEHDKAYDRQLDSGDNPYLKYNHADAEFQERLKEDTSFGGNLGRAVFQAKKRALEPLGLVEEPVKTAPGKKRPVEQSPAEPDSSSGTGKAGNQPARKRSNFGQTGDADSVPDPQPLGQPPAAPSGLGSTTMATGSGAPMADNNEGADGVGNSSGNWHCDSQWLGDRVITTSTRTWALPTYNNHLYKQISSQSGASNDNHYFGYSTPWGYFDFNRFHCHFSPRDWQRLINNNWGFRPKRLNFKLFNIQVKEVTQNDGTTTIANNLTSTVQVFTDSEYQLPYVLGSAHQGCLPPFPADVFMVPQYGYLTLNNGSQAVGRSSFYCLEYFPSQMLRTGNNFTFSYTFEDVPFHSSYAHSQSLDRLMNPLIGQYLYYLNKTQSNSGTLQQSRLLFSQAGPTSMSLQAKNWLPGPCYRQQRLSKQANDNNNSNFPWTAATKYHLNGRDSLVNPGPAMASHKDDEEKFFPMHGTLIFGKQGTNANDADLDNVMITDEEEIRTTNPVATEQYGTVSNNLQNSNTGPTTGTVNHQGALPGMVWQDRDVYLQGPIWAKIPHTDGHFHPSPLMGGFGLKHPPPQIMIKNTPVPANPPTNFSSAKFASFITQYSTGQVSVEIEWELQKENSKRWNPEIQYTSNYNKSVNVDFTVDTNGVYSEPRPIGTRYLTRNL

SEQ ID NO: 2925 - protein, 738 aa, Artificial Sequence
  Description of Artificial Sequence: Synthetic polypeptide
MAADGYLPDWLEDNLSEGIREWWALKPGAPKPKANQQKQDDGRGLVLPGYKYLGPFNGLDKGEPVNAADAAALEHDKAYDQQLQAGDNPYLRYNHADAEFQERLQEDTSFGGNLGRAVFQAKKRVLEPLGLVEEGAKTAPGKERPVEPSPQRSPDSSTGIGKEGQQPARKRLNFGQTGDSESVPDPQPLGEPPAAPSGVGPNTMAAGGGAPMADNNEGADGVGSSSGNWHCDSTWLGDRVITTSTRTWALPTYNNHLYKQISNGTSGGATNDNTYFGYSTPWGYFDFNRFHCHFSPRDWQRLINNNWGFRPKRLSFKLFNIQVKEVTQNEGTKTTANNLTSTIQVFTDSEYQLPYVLGSAHQGCLPPFPADVFTIPQYGYLTLNNGSQAVGRSSFYCLEYFPSQMLRTGNNFQFTYTFEDVPFHSSYAHSQSLDRLMNPLIDQYLYYLSRIQTTGGTANTQTLGFSQGGPNTMANQAKNWLPGPCYRQQRVSTTTGQNNNSNFAWTAGTKYHLNGRNSLANPGIAMATHKDDEERFFPSNGILIFGKQNAARDNADYSDVMPTSEEEIKTTNPVATEEYGIVADNLQQQNTAPQIGTVNSQGALPGMVWQNRDVYLQGPIWAKIPHTDGNFHPSPLMGGFGLKHPPPQILIKNTPVPADPPTTFNQSKLNSFITQYSTGQVSVEIEWELQKENSKRWNPEIQYTSNYYKSTSVDFAVNTEGVYSEPRPIGTRYLTRNL

SEQ ID NO: 2926 - protein, 738 aa, Artificial Sequence
  Description of Artificial Sequence: Synthetic polypeptide
MAADGYLPDWLEDNLSEGIREWWALKPGAPKPKANQQKQDDGRGLVLPGYKYLGPFNGLDKGEPVNAADAAALEHDKAYDQQLQAGDNPYLRYNHADAEFQERLQEDTSFGGNLGRAVFQAKKRVLEPLGLVEEGAKTAPGKKRPVEPSPQRSPDSSTGIGKGGQQPARKRLNFGQTGDSESVPDPQPLGEPPAAPSGVGPNTMAAGGGAPMADNNEGADGVGSSSGNWHCDSTWLGDRVITTSTRTWALPTYNNHLYKQISNGTSGGATNDNTYFGYSTPWGYFDFNRFHCHFSPRDWQRLINNNWGFRPKRLSFKLFNIQVKEVTQNEGTKTIANNLTSTIQVFTDSEYQLPYVLGSAHQGCLPPFPADVFTIPQYGYLTLNNGSQAVGRSSFYCLEYFPSQMLRTGNNFQFTYTFEDVPFHSSYAHSQSLDRLMNPLIDQYLYYLSRIQTTGGTANTQTLGFSQGGPNTMANQAKNWLPGPCYRQQRVSTTTGQNNNSNFAWTAGTKYHLNGRNSLANPGIAMATHKDDEERFFPSNGILIFGKQNAARDNADYSDVMPTSEEEIKTTNPVATEEYGIVADNLQQQNTAPQIGTVNSQGALPGMVWQNRDVYLQGPIWAKIPHTDGNFHPSPLMGGFGLKHPPPQILIKNTPVPADPPTTFNQSKLNSFITQYSTGQVSVEIEWELQKENSKRWNPEIQYTSNYYKSTSVDFAVNTEGVYSEPRPIGTRYLTRNL

SEQ ID NO: 2927 - protein, 738 aa, Artificial Sequence
  Description of Artificial Sequence: Synthetic polypeptide
MAADGYLPDWLEDNLSEGIREWWALKPGAPKPKANQQKQDDGRGLVLPGYKYLGPFNGLDKGEPVNAADAAALEHDKAYDQQLQAGDNPYLRYNHADAEFQERLQEDTSFGGNLGRAVFQAKKRVLEPLGLVEEGAKTAPGKERPVEPSPQRSPDSSTGIGKKGQQPARKRLNFGQTGDSESVPDPQPLGEPPAAPSGVGPNTMAAGGGAPMADNNEGADGVGSSSGNWHCDSTWLGDRVITTSTRTWALPTYNNHLYKQISNGTSGGATNDNTYFGYSTPWGYFDFNRFHCHFSPRDWQRLINNNWGFRPKRLSFKLFNIQVKEVTQNEGTKTTANNLTSTIQVFTDSEYQLPYVLGSAHQGCLPPFPADVFTIPQYGYLTLNNGSQAVGRSSFYCLEYFPSQMLRTGNNFQFTYTFEDAPFHSSYAHSQSLDRLMNPLIDQYLYYLSRIQTTGGTANTQTLGFSQGGPNTMANQAKNWLPGPCYRQQRVSTTTGQNNNSNFAWTAGTKYHLNGRNSLANPGIAMATHKDDEERFFPSNGILIFGKQNAARDNADYSDVMPTSEEEIKTTNPVATEEYGIVADNLQQQNTAPQIGTVNSQGALPGMVWQNRDVYLQGPIWAKIPHTDGNFHPSPLMGGFGLKHPPPQILIKNTPVPADPPTTFNQSKLNSFITQYSTGQVSVEIEWELQKENSKRWNPEIQYTSNYYKSTSVDFAVNTEGVYSEPRPIGTRYLTRNL

SEQ ID NO: 2928 - protein, 738 aa, Artificial Sequence
  Description of Artificial Sequence: Synthetic polypeptide
MAADGYLPDWLEDNLSEGIREWWALKPGAPKPKANQQKQDDGRGLVLPGYKYLGPFNGLDKGEPVNAADAAALEHDKAYDQQLQAGDNPYLRYNHADAEFQERLQEDTSFGGNLGRAVFQAKKRVLEPLGLVEEGAKTAPGKKRPVEPSPQRSPDSSTGIGKEGQQPARKRLNFGQTGDSESVPDPQPLGEPPAAPSGVGPNTMAAGGGAPMADNNEGADGVGSSSGNWHCDSTWLGDRVITTSTRTWALPTYNNHLYKQISNGTSGGATNDNTYFGYSTPWGYFDFNRFHCHFSPRDWQRLINNNWGFRPKRLSFKLFNIQVKEVTQNEGTKTIANNLTSTIQVFTDSEYQLPYVLGSAHQGCLPPFPADVFTIPQYGYLTLNNGSQAVGRSSFYCLEYFPSQMLRTGNNFQFTYTFEDVPFHSSYAHSQSLDRLMNPLIDQYLYYLSRIQTTGGTANTQTLGFSQGGPNTMANQAKNWLPGPCYRQQRVSTTTGQNNNSNFAWTAGTKYHLNGRNSLANPGIAMATHKDDEERFFPSNGILIFGKQNAARDNADYSDVMPTSEEEIKTTNPVATEEYGIVADNLQQQNTAPQIGTVNSQGALPGMVWQNRDVYLQGPIWAKIPHTDGNFHPSPLMGGFGLKHPPPQILIKNTPVPADPPTTFNQSKLNSFITQYCTGQVSVEIEWELQKENSKRWNPEIQYTSNYYKSTSVDFAVNTEGVYSEPRPIGTRYLTRNL

SEQ ID NO: 2929 - protein, 738 aa, Artificial Sequence
  Description of Artificial Sequence: Synthetic polypeptide
MAADGYLPDWLEDNLSEGIREWWALKPGAPKPKANQQKQDDGRGLVLPGYKYLGPFNGLDKGEPVNAADAAALEHDKAYDQQLQAGDNPYLRYNHADAEFQERLQEDTSFGGNLGRAVFQAKKRVLEPLGLVEEGAKTAPGKKRPVEPSPQRSPDSSTGIGKEGQQPARKRLNFGQTGDSESVPDPQPLGEPPAAPSGVGPNTMAAGGGAPMADNNEGADGVGSSSGNWHCDSTWLGDRVITTSTRTWALPTYNNHLYKQISNGTSGGATNDNTYFGYSTPWGYFDFNRFHCHFSPRDWQRLINNNWGFRPKRLSFKLFNIQVKEVTQNEGTKTIANNLTSTIQVFTDSEYQLPYVLGSAHQGCLPPFPADVFTIPQYGYLTLNNGSQAVGRSSFYCLEYFPSQMLRTGNNFQFTYTFEDVPFHSSYAHSQSLDRLMNPLIDQYLYYLSRIQTTGGTANTQTLGFSQGGPNTMANQAKNWLPGPCYRQQRVSTTTGQNNNSNFAWTAGTKYHLNGRNSLANPGIAMATHKDDEERFFPSNGILIFGKQNAARDNADYSDVMPTSEEEIKTTNPVATEEYGIVADNLQQQNTAPQIGTVNSQGALPGMVWQNRDVYLQGPIWAKIPHTDGNFHPSPLMGGFGLKHPPPQILIKNTPVPADPPTTFNQSKLNSFITQYSTGQVSVEIEWELQKENSKRWNPEIQYTSNYYKSTSVDFAVNTEGVYSEPRPIGTRYLTRNL

SEQ ID NO: 2930 - protein, 738 aa, Artificial Sequence
  Description of Artificial Sequence: Synthetic polypeptide
MAADGYLPDWLEDNLSEGIREWWALKPGAPKPKANQQKQDDGRGLVLPGYKYLGPFNGLDKGEPVNAADAAALEHDKAYDQQLQAGDNPYLRYNHADAEFQERLQEDTSFGGNLGRAVFQAKKRVLEPLGLVEEGAKTAPGKERPVEPSPQRSPDSSTGIGKKGQQPARKRLNFGQTGDSESVPDPQPLGEPPAAPSGVGPNTMAAGGGAPMADNNEGADGVGSSSGNWHCDSTWLGDRVITTSTRTWALPTYNNHLYKQIPNGTSGGATNDNTYFGYSTPWGYFDFNRFHCHFSPRDWQRLINNNWGFRPKRLSFKLFNIQVKEVTQNEGTKTTANNLTSTIQVFTDSEYQLPYVLGSAHQGCLPPFPADVFTIPQYGYLTLNNGSQAVGRSSFYCLEYFPSQMLRTGNNFQFTYTFEDVPFHSSYAHSQSLDRLMNPLIDQYLYYLSRIQTTGGTANTQTLGFSQGGPNTMANQAKNWLPGPCYRQQRVSTTTGQNNNSNFAWTAGTKYHLNGRNSLANPGIAMATHKDDEERFFPSNGILIFGKQNAARDNADYSDVMPTSEEEIKTTNPVATEEYGIVADNLQQQNTAPQIGTVNSQGALPGMVWQNRDVYLQGPIWAKIPHTDGNFHPSPLMGGFGLKHPPPQILIKNTPVPADPPTTFNQSKLNSFITQYSTGQVSVEIEWELQKENSKRWNPEIQYTSNYYKSTSVDFAVNTEGVYSEPRPIGTRYLTRNL

SEQ ID NO: 2931 - protein, 738 aa, Artificial Sequence
  Description of Artificial Sequence: Synthetic polypeptide
MAADGYLPDWLEDNLSEGIREWWALKPGAPKPKANQQKQDDGRGLVLPGYKYLGPFNGLDKGEPVNAADAAALEHDKAYDQQLQAGDNPYLRYNHADAEFQERLQEDTSFGGNLGRAVFQAKKRVLEPLGLVEEGAKTAPGKKRPVEPSPQRSPDSSTGIGKEGQQPARKRLNFGQTGDSESVPDPQPLGEPPAAPSGVGPNTMAAGGGAPMADNNEGADGVGSSSGNWHCDSTWLGDRVITTSTRTWALPTYNNHLYKQISNGTSGGATNDNTYFGYSTPWGYFDFNRFHCHFSPRDWQRLINNNWGFRPKRLSFKLFNIQVKEVTQNEGTKTTANNLTSTIQVFTDSEYQLPYVLGSAHQGCLPPFPADVFTIPQYGYLTLNNGSQAVGRSSFYCLEYFPSQMLRTGNNFQFTYTFEDVPFHSSYAHSQSLDRLMNPLIDQYLYYLSRIQTTGGTANTQTLGFSQGGPNTMANQAKNWLPGPCYRQQRVSTTTGQNNNSNFAWTAGTKYHLNGRNSLANPGIAMATHKDDEERFFPSNGILIFGKQNAARDNADYSDVMPTSEEEIKTTNPVATEEYGIVADNLQQQNTAPQIGTVNSQGALPGMVWQNRDVYLQGPIWAKIPHTDGNFHPSPLMGGFGLKHPPPQILIKNTPVPADPPTTFNQSKLNSFITQYSTGQVSVEIEWELQKENSKRWNPEIQYTSNYYKSTSVDFAVNTEGVYSEPRPIGTRYLTRNL

SEQ ID NO: 2932 - protein, 738 aa, Artificial Sequence
  Description of Artificial Sequence: Synthetic polypeptide
MAADGYLPDWLEDNLSEGIREWWALKPGAPKPKANQQKQDDGRGLVLPGYKYLGPFNGLDKGEPVNAADAAALEHDKAYDQQLQAGDNPYLRYNHADAEFQERLQEDTSFGGNLGRAVFQAKKRVLEPLGLVEEGAKTAPGKERPVEPSPQRSPDSSTGIGKKGQQPARKRLNFGQTGDSESVPDPQPLGEPPAAPSGVGPNTMAAGGGAPMADNNEGADGVGSSSGNWHCDSTWLGDRVITTSTRTWALPTYNNHLYKQISNGTSGGATNDNTYFGYSTPWGYFDFNRFHCHFSPRDWQRLINNNWGFRPKRLSFKLFNIQVKEVTQNEGTKTTANNLTSTIQVFTDSEYQLPYVLGSAHQGCLPPFPADVFTIPQYGYLTLNNGSQAVGRSSFYCLEYFPSQMLRTGNNFQFTYTFEDVPFHSSYAHSQSLDRLMNPLIDQYLYYLSRIQTTGGTANTQTLGFSQGGPNTMANQAKNWLPGPCYRQQRVSTTTGQNNNSNFAWTAGTKYHLNGRNSLANPGIAMATHKDDEERFFPSNGILIFGKQNAARDNADYSDVMPTSEEEIKTTNPVATEEYGIVADNLQQQNTAPQIGTVNSQGALPGMVWQNRDVYLQGPIWAKIPHTDGNFHPSPLMGGFGLKHPPPQILIKNTPVPADPPTTFNQSKLNSFITQYSTGQVSVEIEWELQKENSKRWNPEIQYTSNYYKSTSVDFAVNTEGVYSEPRPIGTRYLTRNL

SEQ ID NO: 2933 - protein, 738 aa, Artificial Sequence
  Description of Artificial Sequence: Synthetic polypeptide
MAADGYLPDWLEDNLSEGIREWWALKPGAPKPKANQQKQDDGRGLVLPGYKYLGPFNGLDKGEPVNAADAAALEHDKAYDQQLQAGDNPYLRYNHADAEFQERLQEDTSFGGNLGRAVFQAKKRVLEPLGLVEEGAKTAPGKERPVEPSPQRSPDSSTGIGKKGQQPARKRLNFGQTGDSESVPDPQPLGEPPAAPSGVGPNTMAAGGGAPMADNNEGADGVGSSSGNWHCDSTWLGDRVITTSTRTWALPTYNNHLYKQISNGTSGGATNDNTYFGYSTPWGYFDFNRFHCHFSPRDWQRLINNNWGFRPKRLSFKLFNIQVKEVTQNEGTKTIANNLTSTIQVFTDSEYQLPYVLGSAHQGCLPPFPADVFTIPQYGYLTLNNGSQAVGRSSFYCLEYFPSQMLRTGNNFQFTYTFEDVPFHSSYAHSQSLDRLMNPLIDQYLYYLSRIQTTGGTANTQTLGFSQGGPNTMANQAKNWLPGPCYRQQRVSTTTGQNNNSNFAWTAGTKYHLNGRNSLANPGIAMATHKDDEERFFPSNGILIFGKQNAARDNADYSDVMPTSEEEIKTTNPVATEEYGIVADNLQQQNTAPQIGTVNSQGALPGMVWQNRDVYLQGPIWAKIPHTDGNFHPSPLMGGFGLKHPPPQILIKNTPVPADPPTTFNQSKLNSFITQYSTGQVSVEIEWELQKENSKRWNPEIQYTSNYYKSTSVDFAVNTEGVYSEPRPIGTRYLTRNL

SEQ ID NO: 2934 - protein, 738 aa, Artificial Sequence
  Description of Artificial Sequence: Synthetic polypeptide
MAADGYLPDWLEDNLSEGIREWWALKPGAPKPKANQQKQDDGRGLVLPGYKYLGPFNGLDKGEPVNAADAAALEHDKAYDQQLQAGDNPYLRYNHADAEFQERLQEDTSFGGNLGRAVFQAKKRVLEPLGLVEEGAKTAPGKKRPVEPSPQRSPDSSTGIGKKGQQPARKRLNFGQTGDSESVPDPQPLGEPPAAPSGVGPNTMAAGGGAPMADNNEGADGVGSSSGNWHCDSTWLGDRVITTSTRTWALPTYNNHLYKQISNGTSGGATNDNTYFGYSTPWGYFDFNRFHCHFSPRDWQRLINNNWGFRPKRLSFKLFNIQVKEVTQNEGTKTIANNLTSTIQVFTDSEYPLPYVLGSAHQGCLPPFPADVFTIPQYGYLTLNNGSQAVGRSSFYCLEYFPSQMLRTGNNFQFTYTFEDVPFHSSYAHSQSLDRLMNPLIDQYLYYLSRIQTTGGTANTQTLGFSQGGPNTMANQAKNWLPGPCYRQQRVSTTTGQNNNSNFAWTAGTKYHLNGRNSLANPGIAMATHKDDEERFFPSNGILIFGKQNAARDNADYSDVMPTSEEEIKTTNPVATEEYGIVADNLQQQNTAPQIGTVNSQGALPGMVWQNRDVYLQGPIWAKIPHTDGNFHPSPLMGGFGLKHPPPQILIKNTPVPADPPTTFNQSKLNSFITQYSTGQVSVEIEWELQKENSKRWNPEIQYTSNYYKSTSVDFAVNTEGVYSEPRPIGTRYLTRNL

SEQ ID NO: 2935 - protein, 738 aa, Artificial Sequence
  Description of Artificial Sequence: Synthetic polypeptide
MAADGYLPDWLEDNLSEGIREWWALKPGAPKPKANQQKQDDGRGLVLPGYKYLGPFNGLDKGEPVNAADAAALEHDKAYDQQLQAGDNPYLRYNHADAEFQERLQEDTSFGGNLGRAVFQAKKRVLEPLGLVEEGAKTAPGKKRPVEPSPQRSPDSSTGIGKKGQQPARKRLNFGQTGDSESVPDPQPLGEPPAAPSGVGPNTMAAGGGAPMADNNEGADGVGSSSGNWHCDSTWLGDRVITTSTRTWALPTYNNHLYKQISNGTSGGATNDNTYFGYSTPWGYFDFNRFHCHFSPRDWQRLINNNWGFRPKRLSFKLFNIQVKEVTQNEGTKTIANNLTSTIQVFTDSEYQLPYVLGSAHQGCLPPFPADVFTIPQYGYLTLNNGSQAVGRSSFYCLEYFPSQMLRTGNNFQFTYTFEDVPFHSSYAHSQSLDRLMNPLIDQYLYYLSRIQTTGGTANTQTLGFSQGGPNTMANQAKNWLPGPCYRQQRVSTTTGQNNNSNFAWTAGTKYHLNGRNSLANPGIAMATHKDDEERFFPSNGILIFGKQNAARDNADYSDVMPTSEEEIKTTNPVATEEYGIVADNLQQQNTAPQIGTVNSQGALPGMVWQNRDVYLQGPIWAKIPHTDGNFHPSPLMGGFGLKHPPPQILIKNTPVPADPPTTFNQSKLNSFITQYGTGQVSVEIEWELQKENSKRWNPEIQYTSNYYKSTSVDFAVNTEGVYSEPRPIGTRYLTRNL

SEQ ID NO: 2936 - protein, 738 aa, Artificial Sequence
  Description of Artificial Sequence: Synthetic polypeptide
MAADGYLPDWLEDNLSEGIREWWALKPGAPKPKANQQKQDDGRGLVLPGYKYLGPFNGLDKGEPVNAADAAALEHDKAYDQQLQAGDNPYLRYNHADAEFQERLQEDTSFGGNLGRAVFQAKKRVLEPLGLVEEGAKTAPGKKRPVEPSPQRSPDSSTGIGKKGQQPARKRLNFGQTGDSESVPDPQPLGEPPAAPSGVGPNTMAAGGGAPMADNNEGADGVGSSSGNWHCDSTWLGDRVITTSTRTWALPTYNNHLYKQISNGTSGGATNDNTYFGYSTPWGYFDFNRFHCHFSPRDWQRLINNNWGFRPKRLSFKPFNIQVKEVTQNEGTKTIANNLTSTIQVFTDSEYQLPYVLGSAHQGCLPPFPADVFTIPQYGYLTLNNGSQAVGRSSFYCLEYFPSQMLRTGNNFQFTYTFEDVPFHSSYAHSQSLDRLMNPLIDQYLYYLSRIQTTGGTANTQTLGFSQGGPNTMANQAKNWLPGPCYRQQRVSTTTGQNNNSNFAWTAGTKYHLNGRNSLANPGIAMATHKDDEERFFPSNGILIFGKQNAARDNADYSDVMPTSEEEIKTTNPVATEEYGIVADNLQQQNTAPQIGTVNSQGALPGMVWQNRDVYLQGPIWAKIPHTDGNFHPSPLMGGFGLKHPPPQILIKNTPVPADPPTTFNQSKLNSFITQYSTGQVSVEIEWELQKENSKRWNPEIQYTSNYYKSTSVDFAVNTEGVYSEPRPIGTRYLTRNL

SEQ ID NO: 2937 - protein, 738 aa, Artificial Sequence
  Description of Artificial Sequence: Synthetic polypeptide
MAADGYLPDWLEDNLSEGIREWWALKPGAPKPKANQQKQDDGRGLVLPGYKYLGPFNGLDKGEPVNAADAAALEHDKAYDQQLQAGDNPYLRYNHADAEFQERLQEDTSFGGNLGRAVFQAKKRVLEPLGLVEEGAKTAPGKKRPVEPSPQRSPDSSTGIGKKGQQPARKRLNFGQTGDSESVPDPQPLGEPPAAPSGVGPNTMAAGGGAPMADNNEGADGVGSSSGNWHCDSTWLGDRVITTSTRTWALPTYNNHLYKQISNGTSGGATNDNTYFGYSTPWGYFDFNRFHCHFSPRDWQRLINNNWGFRPKRLSFKLFNIQVKEVTQNEGTKTIANNLTSTIQVFTDSEYQLPYVLGSAHQGCLPPFPADVFTIPQYGYLTLNNGSQAVGRSSFYCLEYFPSQMLRTGNNFQFTYTFEDVPFHSSYAHSQSLDRLMNPLIDQYLYYLSRIQTTGGTANTQALGFSQGGPNTMANQAKNWLPGPCYRQQRVSTTTGQNNNSNFAWTAGTKYHLNGRNSLANPGIAMATHKDDEERFFPSNGILIFGKQNAARDNADYSDVMPTSEEEIKTTNPVATEEYGIVADNLQQQNTAPQIGTVNSQGALPGMVWQNRDVYLQGPIWAKIPHTDGNFHPSPLMGGFGLKHPPPQILIKNTPVPADPPTTFNQSKLNSFITQYSTGQVSVEIEWELQKENSKRWNPEIQYTSNYYKSTSVDFAVNTEGVYSEPRPIGTRYLTRNL

SEQ ID NO: 2938 - protein, 738 aa, Artificial Sequence
  Description of Artificial Sequence: Synthetic polypeptide
MAADGYLPDWLEDNLSEGIREWWALKPGAPKPKANQQKQDDGRGLVLPGYKYLGPFNGLDKGEPVNAADAAALEHDKAYDQQLQAGDNPYLRYNHADAEFQERLQEDTSFGGNLGRAVFQAKKRVLEPLGLVEEGAKTAPGKKRPVEPSPQRSPDSSTGIGKKGQQPARKRLNFGQTGDSESVPDPQPLGEPPAAPSGVGPNTMAAGGGAPMADNNEGADGVGSSSGNWHCDSTWLGDRVITTSTRTWALPTYNNHLYKQISNGTSGGATNDNTYFGYSTPWGYFDFNRFHCHFSPRDWQRLINNNWGFRPKRLSFKLFNIQVKEVTQNEGTKTIANNLTSTIQVFTDSEYQLPYVLGSAHQGCLPPFPADVFTIPQYGYLTLNNGSQAVGRSSFYCLEYFPSQMLRTGNNFQFTYTFEDVPFHSSYAHSQSLDRLMNPLIDQYLYYLSRIQTTGGTANTQTLGFSQGGPNTMANQAKNWLPGPCYRQQRVSTTTGQNNNSNFAWTAGTKYHLNGRNSLANPGIAMATHKDDEERFFPSNGILIFGKQNAARDNADYSDVMPTSEEEIKTTNPVATEGYGIVADNLQQQNTAPQIGTVNSQGALPGMVWQNRDVYLQGPIWAKIPHTDGNFHPSPLMGGFGLKHPPPQILIKNTPVPADPPTTFNQSKLNSFITQYSTGQVSVEIEWELQKENSKRWNPEIQYTSNYYKSTSVDFAVNTEGVYSEPRPIGTRYLTRNL

SEQ ID NO: 2939 - protein, 738 aa, Artificial Sequence
  Description of Artificial Sequence: Synthetic polypeptide
MAADGYLPDWLEDNLSEGIREWWALKPGAPKPKANQQKQDDGRGLVLPGYKYLGPFNGLDKGEPVNAADAAALEHDKAYDQQLQAGDNPYLRYNHADAEFQERLQEDTSFGGNLGRAVFQAKKRVLEPLGLVEEGAKTAPGKKRPVEPSPQRSPDSSTGIGKKGQQPARKRLNFGQTGDSESVPDPQPLGEPPAAPSGVGPNTMAAGGGAPMADNNEGADGVGSSSGNWHCDSTWLGDRVITTSTRTWALPTYNNHLYKQISNGTSGGATNDNTYFGYSTPWGYFDFNRFHCHFSPRDWQRLINNNWGFRPKRLSFKLFNIQVKEVTQNEGTKTIANNLTSTIQVFTDSEYQLPYVLGSAHQGCLPPFPADVFTIPQYGYLTLNNGSQAVGRSSFYCLEYFPSQMLRTGNNFQFTYTFEDVPFHSSYAHSQSLDRLMNPLIDQYLYYLSRIQTTGGTANTQTLGFSQGGPNTMANQAKNWLPGPCYRQQRVSTTTGQNNNSNFAWTAGTKYHLNGRNSLANPGIAMATRKDDEERFFPSNGILIFGKQNAARDNADYSDVMPTSEEEIKTTNPVATEEYGIVADNLQQQNTAPQIGTVNSQGALPGMVWQNRDVYLQGPIWAKIPHTDGNFHPSPLMGGFGLKHPPPQILIKNTPVPADPPTTFNQSKLNSFITQYSTGQVSVEIEWELQKENSKRWNPEIQYTSNYYKSTSVDFAVNTEGVYSEPRPIGTRYLTRNL

SEQ ID NO: 2940 - protein, 738 aa, Artificial Sequence
  Description of Artificial Sequence: Synthetic polypeptide
MAADGYLPDWLEDNLSEGIREWWALKPGAPKPKANQQKQDDGRGLVLPGYKYLGPFNGLDKGEPVNAADAAALEHDKAYDQQLQAGDNPYLRYNHADAEFQERLQEDTSFGGNLGRAVFQAKKRVLEPLGLVEEGAKTAPGKKRPVEPSPQRSPDSSTGIGKKGQQPARKRLNFGQTGDSESVPDPQPLGEPPAAPSGVGPNTMAAGGGAPMADNNEGADGVGSSSGNWHCDSTWLGDRVITTSTRTWALPTYNNHLYKQISNGTSGGATNDNTYFGYSTPWGYFDFNRFHCHFSPRDWQRLINNNWGFRPKRLSFKLFNIQVKEVTQNEGTKTIANNLTSTIQVFTDSEYQLPYVLGSAHQGCLPPFPADVFTIPQYGYLTLNNGSQAVGRSSFYCLEYFPSQMLRTGNNFQFTYTFEDVPFHSSYAHSQSLDRLMNPLIDQYLYYLSRIQTTGGTANTQTLGFSQGGPNTMANQAKNWLPGPCYRQQRVSTTTGQNNNSNFAWTAGTKYHLNGRNSLANPGIAMATHKDDEERFFPSNGILIFGKQNAARDNADYSDVMPTSEEEIKTTNPVATEEYGIVADNLQQQNTAPQIGTVNSQGALPGMVWQNRDVYLQGPIWAKIPHTDGNFHPSPLMGGFGLKHPPPQILIKNTPVPADPPTTFNQSKPNSFITQYSTGQVSVEIEWELQKENSKRWNPEIQYTSNYYKSTSVDFAVNTEGVYSEPRPIGTRYLTRNL

SEQ ID NO: 2941 - protein, 738 aa, Artificial Sequence
  Description of Artificial Sequence: Synthetic polypeptide
MAADGYLPDWLEDNLSEGIREWWALKPGAPKPKANQQKQDDGRGLVLPGYKYLGPFNGLDKGEPVNAADAAALEHDKAYDQQLQAGDNPYLRYNHADAEFQERLQEDTSFGGNLGRAVFQAKKRVLEPLGLVEEGAKTAPGKKRPVEPSPQRSPDSSTGIGKKGQQPARKRLNFGQTGDSESVPDPQPLGEPPAAPSGVGPNTMAAGGGAPMADNNEGADGVGSSSGNWHCDSTWLGDRVITTSTRTWALPTYNNHLYKQISNGTSGGATNDNTYFGYSTPWGYFDFNRFHCHFSPRDWQRLINNNWGFRPKRLSFKLFNIQVKEVTQNEGTKTIANNLTSTIQVFTDSEYQLPYVLGSAHQGCLPPFPADVFTIPQYGYLTLNNGSQAVGRSSFYCLEYFPSQMLRTGNNFQFTYTFEDVPFHSSYAHSQSLDRLMNPLIDQYLYYLSRIQTTGGTANTQTLGFSQGGPNTMANQAKNWLPGPCYRQQRVSTTTGQNNNSNFAWTAGTKYHLNGRNSLANPGIAMATHKDDEERFFSSNGILIFGKQNAARDNADYSDVMPTSEEEIKTTNPVATEEYGIVADNLQQQNTAPQIGTVNSQGALPGMVWQNRDVYLQGPIWAKIPHTDGNFHPSPLMGGFGLKHPPPQILIKNTPVPADPPTTFNQSKLNSFITQYSTGQVSVEIEWELQKENSKRWNPEIQYTSNYYKSTSVDFAVNTEGVYSEPRPIGTRYLTRNL

SEQ ID NO: 2942 - protein, 738 aa, Artificial Sequence
  Description of Artificial Sequence: Synthetic polypeptide
MAADGYLPDWLEDNLSEGIREWWALKPGAPKPKANQQKQDDGRGLVLPGYKYLGPFNGLDKGEPVNAADAAALEHDKAYDQQLQAGDNPYLRYNHADAEFQERLQEDTSFGGNLGRAVFQAKKRVLEPLGLVEEGAKTAPGKKRPVEPSPQRSPDSSTGIGKKGQQPARKRLNFGQTGDSESVPDPQPLGEPPAAPSGVGPNTMAAGGGAPMADNNEGADGVGSSSGNWHCDSTWLGDRVITTSTRTWALPTYNNHLYKQISNGTSGGATNDNTYFGYSTPWGYFDFNRFHCHFSPRDWQRLINNNWGFRPKRLSFKLFNIQVKEVTQNEGTKTIANNLTSTIQVFTDSEYQLPYVLGSAHQGCLPPFPADVFTIPQYGYLTLNNGSQAVGRSSFYCLEYFPSQMLRTGNNFQFTYTFEDVPFHSSYAHSQSLDRLMNPLIDQYLYYLSRIQTTGGTANTQTLGFSQGGPNTMANQAKNWLPGPCYRQQRVSTTTGQNNNSNFAWAAGTKYHLNGRNSLANPGIAMATHKDDEERFFPSNGILIFGKQNAARDNADYSDVMPTSEEEIKTTNPVATEEYGIVADNLQQQNTAPQIGTVNSQGALPGMVWQNRDVYLQGPIWAKIPHTDGNFHPSPLMGGFGLKHPPPQILIKNTPVPADPPTTFNQSKLNPFITQYSTGQVSVEIEWELQKENSKRWNPEIQYTSNYYKSTSVDFAVNTEGVYSEPRPIGTRYLTRNL

SEQ ID NO: 2943 - protein, 738 aa, Artificial Sequence
  Description of Artificial Sequence: Synthetic polypeptide
MAADGYLPDWLEDNLSEGIREWWALKPGAPKPKANQQKQDDGRGLVLPGYKYLGPFNGLDKGEPVNAADAAALEHDKAYDQQLQAGDNPYLRYNHADAEFQERLQEDTSFGGNLGRAVFQAKKRVLEPLGLVEEGAKTAPGKKRPVEPSPQRSPDSSTGIGKKGQQPARKRLNFGQTGDSESVPDPQPLGEPPAAPSGVGPNTMAAGGGAPMADNNEGADGVGSSSGNWHCDSTWLGDRVITTSTRTWALPTYNNHLYKQISNGTSGGATNDNTYFGYSTPWGYFDFNRFHCHFSPRDWQRLINNNWGFRPKRLSFKLFNIQVKEVTQNEGTKTIANNPTSTIQVFTDSEYQLPYVLGSAHQGCLPPFPADVFTIPQYGYLTLNNGSQAVGRSSFYCLEYFPSQMLRTGNNFQFTYTFEDVPFHSSYAHSQSLDRLMNPLIDQYLYYLSRIQTTGGTANTQTLGFSQGGPNTMANQAKNWLPGPCYRQQRVSTTTGQNNNSNFAWTAGTKYHLNGRNSLANPGIAMATHKDDEERFFPSNGILIFGKQNAARDNADYSDVMPTSEEEIKTTNPVATEEYGIVADNLQQQNTAPQIGTVNSQGALPGMVWQNRDVYLQGPIWAKIPHTDGNFHPSPLMGGFGLKHPPPQILIKNTPVPADPPTTFNQSKLNSFITQYSTGQVSVEIEWELQKENSKRWNPEIQYTSNYYKSTSVDFAVNTEGVYSEPRPIGTRYLTRNL

SEQ ID NO: 2944 - protein, 738 aa, Artificial Sequence
  Description of Artificial Sequence: Synthetic polypeptide
MAADGYLPDWLEDNLSEGIREWWALKPGAPKPKANQQKQDDGRGLVLPGYKYLGPFNGLDKGEPVNAADAAALEHDKAYDQQLQAGDNPYLRYNHADAEFQERLQEDTSFGGNLGRAVFQAKKRVLEPLGLVEEGAKTAPGKKRPVEPSPQRSPDSSTGIGKKGQQPARKRLNFGQTGDSESVPDPQPLGEPPAAPSGVGPNTMAAGGGAPMADNNEGADGVGSSSGNWHCDSTWLGDRVITTSTRTWALPTYNNHLYKQISNGTSGGATNDNTYFGYSTPWGYFDFNRFHCRFSPRDWQRLINNNWGFRPKRLSFKLFNIQVKEVTQNEGTKTIANNLTSTIQVFTDSEYQLPYVLGSAHQGCLPPFPADVFTIPQYGYLTLNNGSQAVGRSSFYCLEYFPSQMLRTGNNFQFTYTFEDVPFHSSYAHSQSLDRLMNPLIDQYLYYLSRIQTTGGTANTQTLGFSQGGPNTMANQAKNWLPGPCYRQQRVSTTTGQNNNSNFAWTAGTKYHLNGRNSLANPGIAMATHKDDEERFFPSNGILIFGKQNAARDNADYSDVMPTSEEEIKTTNPVATEEYGIVADNLQQQNTAPQIGTVNSQGALPGMVWQNRDVYLQGPIWAKIPHTDGNFHPSPLMGGFGLKHPPPQILIKNTPVPADPPTTFNQSKLNSFITQYSTGQVSVEIEWELQKENSKRWNPEIQYTSNYYKSTSVDFAVNTEGVYSEPRPIGTRYLTRNL

SEQ ID NO: 2945 - protein, 738 aa, Artificial Sequence
  Description of Artificial Sequence: Synthetic polypeptide
MAADGYLPDWLEDNLSEGIREWWALKPGAPKPKANQQKQDDGRGLVLPGYKYLGPFNGLDKGEPVNAADAAALEHDKAYDQQLQAGDNPYLRYNHADAEFQERLQEDTSFGGNLGRAVFQAKKRVLEPLGLVEEGAKTAPGKKRPVEPSPQRSPDSSTGIGKKGQQPARKRLNFGQTGDSESVPDPQPLGEPPAAPSGVGPNTMAAGGGAPMADNNEGADGVGSSSGNWHCDSTWLGDRVITTSTRTWALPTYNNHLYKQISNGTSGGATNDNTYFGYSTPWGYFDFNRFHCHFSPRDWQRLINNNWGFRPKRLSFKLFNIQVKEVTQNEGTKTIANNLTSTIQVFTDSEYQLPYVLGSAHQGCLPPFPADVFTIPQYGYLTLNNGSQAVGRSSFYCLEYFPSQMLRTGNNFQFTYTFEDVPFHSSYAHSQSLDRLMNPLIDQYLYYLSRIQTTGGTANTQTLGFSQGGPNTMANQAKNWLPGPCYRQQRVSTTTGQNNNSNFAWTAGTKYHLNGRNSLANPGIAMATHKDDEERFFPSNGILIFGKQNAARDNADYSDVMPTSEEEIKTTNPVATEEYGIVADNLQQQNAAPQIGTVNSQGALPGMVWQNRDVYLQGPIWAKIPHTDGNFHPSPLMGGFGLKHPPPQILIKNTPVPADPPTTFNQSKLNSFITQYSTGQVSVEIEWELQKENSKRWNPEIQYTSNYYKSTSVDFAVNTEGVYSEPRPIGTRYLTRNL

SEQ ID NO: 2946 - protein, 738 aa, Artificial Sequence
  Description of Artificial Sequence: Synthetic polypeptide
MAADGYLPDWLEDNLSEGIREWWALKPGAPKPKANQQKQDDGRGLVLPGYKYLGPFNGLDKGEPVNAADAAALEHDKAYDQQLQAGDNPYLRYNHADAEFQERLQEDTSFGGNLGRAVFQAKKRVLEPLGLVEEGAKTAPGKKRPVEPSPQRSPDSSTGIGKKGQQPARKRLNFGQTGDSESVPDPQPLGEPPAAPSGVGPNTMAAGGGAPMADNNEGADGVGSSSGNWHCDSTWLGDRVITTSTRTWALPTYNNHLYKQISNGTSGGATNDNTYFGYSTPWGYFDFNRFHCHFSPRDWQRLINNNWGFRPKRLSFKLFNIQVKEVTQNEGTKTIANSLTSTIQVFTDSEYQLPYVLGSAHQGCLPPFPADVFTIPQYGYLTLNNGSQAVGRSSFYCLEYFPSQMLRTGNNFQFTYTFEDVPFHSSYAHSQSLDRLMNPLIDQYLYYLSRIQTTGGTANTQTLGFSQGGPNTMANQAKNWLPGPCYRQQRVSTTTGQNNNSNFAWTAGTKYHLNGRNSLANPGIAMATHKDDEERFFPSNGILIFGKQNAARDNADYSDVMPTSEEEIKTTNPVATEEYGIVADNLQQQNTAPQIGTVNSQGALPGMVWQNRDVYLQGPIWAKIPHTDGNFHPSPLMGGFGLKHPPPQILIKNTPVPADPPTTFNQSKLNSFITQYSTGQVSVEIEWELQKENSKRWNPEIQYTSNYYKSASVDFAVNTEGVYSEPRPIGTRYLTRNL

SEQ ID NO: 2947 - protein, 738 aa, Artificial Sequence
  Description of Artificial Sequence: Synthetic polypeptide
MAADGYLPDWLEDNLSEGIREWWALKPGAPKPKANQQKQDDGRGLVLPGYKYLGPFNGLDKGEPVNAADAAALEHDKAYDQQLQAGDNPYLRYNHADAEFQERLQEDTSFGGNLGRAVFQAKKRVLEPLGLVEEGAKTAPGKKRPVEPSPQRSPDSSTGIGKKGQQPARKRLNFGQTGDSESVPDPQPLGEPPAAPSGVGPNTMAAGGGAPMADNNEGADGVGSSSGNWHCDSTWLGDRVITTSTRTWALPTYNNHLYKQISNGTSGGATNDNTYFGYSTPWGYFDFNRFHCHFSPRDWQRLINNNWGFRPKRLSFKLFNIQVKEVTQNEGTKTIANNLTSTIQVFTDSEYQLPYVLGSAHQGCLPPFPADVFTIPQYGYLTLNNGSQAVGRSSFYCLEYFPSQMLRTGNNFQFTYTFEDVPFHSSYAHSQSLDRLMNPLIDQYLYYLSRIQTTGGTANTQTLGFSQGGPNTMANQAKNWLPGPCYRQQRVSTTTGQNNNSNFAWTAGTKYHLNGGNSLANPGIAMATHKDDEERFFPSNGILIFGKQNAARDNADYSDVMPTSEEEIKTTNPVATEEYGIVADNLQQQNTAPQIGTVNSQGALPGMVWQNRDVYLQGPIWAKIPHTDGNFHPSPLMGGFGLKHPPPQILIKNTPVPADPPTTFNQSKLNSFITQYSTGQVSVEIEWELQKENSKRWNPEIQYTSNYYKSTSVDFAVNTEGVYSEPRPIGTRYLTRNL

SEQ ID NO: 2948 - protein, 738 aa, Artificial Sequence
  Description of Artificial Sequence: Synthetic polypeptide
MAADGYLPDWLEDNLSEGIREWWALKPGAPKPKANQQKQDDGRGLVLPGYKYLGPFNGLDKGEPVNAADAAALEHDKAYDQQLQAGDNPYLRYNHADAEFQERLQEDTSFGGNLGRAVFQAKKRVLEPLGLVEEGAKTAPGKKRPVEPSPQRSPDSSTGIGKKGQQPARKRLNFGQTGDSESVPDPQPLGEPPAAPSGVGPNTMAAGGGAPMADNNEGADGVGSSSGNWHCDSTWLGDRVITTSTRTWALPTYNNHLYKQISNGTSGGATNDNTYFGYSTPWGYFDFNRFHCHFSPRDWQRLINNNWGFRPKRLSFKLFNIQVKEVTQNEGTKTIANNLTSTIQVFTDSEYQLPYVLGSAHQGCLPPFPADVFTIPQYGYLTLNNGSQAVGRSSFYCLEYFPSQMLRTGNNFQFTYTFEDVPFHSSYAHSQSLDRLMNPLIDQYLYYLSRIQTTGGTANTQTLGFSQGGPNTMANQAKNWLPGPCYRQQRVSTTTGQNNNSNFAWTAGTKYHLNGRNSLANPGIAMATHKDDEERFFPSNGILIFGKQNAARDNADYSDVMPTSEEEIKTTNPVATEEYGIVADNLQQQNTAPQIGTVNSQGALPGMVWQNRDVYLQGPIWAKIPHTDGNFHPSPLMGGFGLKHPPPQILIKNTPVPADPPTTFNQSRLNSFITQYSTGQVSVEIEWELQKENSKRWNPEIQYTSNYYKSTSVDFAVNTEGVYSEPRPIGTRYLTRNL

SEQ ID NO: 2949 - protein, 738 aa, Artificial Sequence
  Description of Artificial Sequence: Synthetic polypeptide
MAADGYLPDWLEDNLSEGIREWWALKPGAPKPKANQQKQDDGRGLVLPGYKYLGPFNGLDKGEPVNAADAAALEHDKAYDQQLQAGDNPYLRYNHADAEFQERLQEDTSFGGNLGRAVFQAKKRVLEPLGLVEEGAKTAPGKKRPVEPSPQRSPDSSTGIGKKGQQPARKRLNFGQTGDSESVPDPQPLGEPPAAPSGVGPNTMAAGGGAPMADNNEGADGVGSSSGNWHCDSTWLGDRVITTSTRTWALPTYNNHLYKQISNGTSGGAANDNTYFGYSTPWGYFDFNRFHCHFSPRDWQRLINNNWGFRPKRLSFKLFNIQVKEVTQNEGTKTIANNLTSTIQVFTDSEYQLPYVLGSAHQGCLPPFPADVFTIPQYGYLTLNNGSQAVGRSSFYCLEYFPSQMLRTGNNFQFTYTFEDVPFHSSYAHSQSLDRLMNPLIDQYLYYLSRIQTTGGTANTQTLGFSQGGPNTMANQAKNWLPGPCYRQQRVSTTTGQNNNSNFAWTAGTKYHLNGRNSLANPGIAMATHKDDEERFFPSNGILIFGKQNAARDNADYSDVMPTSEEEIKTTNPVATEEYGIVADNLQQQNTAPQIGTVNSQGALPGMVWQNRDVYLQGPIWAKIPHTDGNFHPSPLMGGFGLKHPPPQILIKNTPVPADPPTTFNQSKLNSFITQYSTGQVSVEIEWELQKENSKRWNPEIQYTSNYYKSTSVDFAVNTEGVYSEPRPIGTRYLTRNL

SEQ ID NO: 2950 - protein, 738 aa, Artificial Sequence
  Description of Artificial Sequence: Synthetic polypeptide
MAADGYLPDWLEDNLSEGIREWWALKPGAPKPKANQQKQDDGRGLVLPGYKYLGPFNGLDKGEPVNAADAAALEHDKAYDQQLQAGDNPYLRYNHADAEFQERLQEDTSFGGNLGRAVFQAKKRVLEPLGLVEEGAKTAPGKKRPVEPSPQRSPDSSTGIGKKGQQPARKRLNFGQTGDSESVPDPQPLGEPPAAPSGVGPNTMAAGGGAPMAGNNEGADGVGSSSGNWHCDSTWLGDRVITTSTRTWALPTYNNHLYKQISNGTSGGATNDNTYFGYSTPWGYFDFNRFHCHFSPRDWQRLINNNWGFRPKRLSFKLFNIQVKEVTQNEGTKTIANNLTSTIQVFTDSEYQLPYVLGSAHQGCLPPFPADVFTIPQYGYLTLNNGSQAVGRSSFYCLEYFPSQMLRTGNNFQFTYTFEDVPFHSSYAHSQSLDRLMNPLIDQYLYYLSRIQTTGGTANTQTLGFSQGGPNTMANQAKNWLPGPCYRQQRVSTTTGQNNNSNFAWTAGTKYHLNGRNSLANPGIAMATHKDDEERFFPSNGILIFGKQNAARDNADYSDVMPTSEEEIKTTNPVATEEYGIVADNLQQQNTAPQIGTVNSQGALPGMVWQNRDVYLQGPIWAKIPHTDGNFHPSPLMGGFGLKHPPPQILIKNTPVPADPPTTFNQSKLNSFITQYSTGQVSVEIEWELQKENSKRWNPEIQYTSNYYKSTSVDFAVNTEGVYSEPRPIGTRYLTRNL

SEQ ID NO: 2951 - protein, 738 aa, Artificial Sequence
  Description of Artificial Sequence: Synthetic polypeptide
MAADGYLPDWLEDNLSEGIREWWALKPGAPKPKANQQKQDDGRGLVLPGYKYLGPFNGLDKGEPVNAADAAALEHDKAYDQQLQAGDNPYLRYNHADAEFQERLQEDTSFGGNLGRAVFQAKKRVLEPLGLVEEGAKTAPGKKRPVEPSPQRSPDSSTGIGRKGQQPARKRLNFGQTGDSESVPDPQPLGEPPAAPSGVGPNTMAAGGGAPMADNNEGADGVGSSSGNWHCDSTWLGDRVITTSTRTWALPTYNNHLYKQISNGTSGGATNDNTYFGYSTPWGYFDFNRFHCHFSPRDWQRLINNNWGFRPKRLSFKLFNIQVKEVTQNEGTKTIANNLTSTIQVFTDSEYQLPYVLGSAHQGCLPPFPADVFTIPQYGYLTLNNGSQAVGRSSFYCLEYFPSQMLRTGNNFQFTYTFEDVPFHSSYAHSQSLDRLMNPLIDQYLYYLSRIQTTGGTANTQTLGFSQGGPNTMANQAKNWLPGPCYRQQRVSTTTGQNNNSNFAWTAGTKYHLNGRNSLANPGIAMATHKDDEERFFPSNGILIFGKQNAARDNADYSDVMPTSEEEIKTTNPVATEEYGIVADNLQQQNTAPQIGTVNSQGALPGMVWQNRDVYLQGPIWAKIPHTDGNFHPSPLMGGFGLKHPPPQILIKNTPVPADPPTTFNQSKLNSFITQYSTGQVSVEIEWELQKENSKRWNPEIQYTSNYYKSTSVDFAVNTEGVYSEPRPIGTRYLTRNL

SEQ ID NO: 2952 - protein, 738 aa, Artificial Sequence
  Description of Artificial Sequence: Synthetic polypeptide
MAADGYLPDWLEDNLSEGIREWWALKPGAPKPKANQQKQDDGRGLVLPGYKYLGPFNGLDKGEPVNAADAAALEHDKAYDQQLQAGDNPYLRYNHADAEFQERLQEDTSFGGNLGRAVFQAKKRVLEPLGLVEEGAKTAPGKKRPVEPSPQRSPDSSTGIGKKGQQPARKRLNFGQTGDSESVPDPQPLGEPPAAPSGVGPNTMAAGGGAPMADNNEGADGVGSSSGNWHCDSTWLGDRVITTSTRTWALPTYNNHLYKQISNGTSGGATNDNTYFGYGTPWGYFDFNRFHCHFSPRDWQRLINNNWGFRPKRLSFKLFNIQVKEVTQNEGTKTIANNLTSTIQVFTDSEYQLPYVLGSAHQGCLPPFPADVFTIPQYGYLTLNNGSQAVGRSSFYCLEYFPSQMLRTGNNFQFTYTFEDVPFHSSYAHSQSLDRLMNPLIDQYLYYLSRIQTTGGTANTQTLGFSQGGPNTMANQAKNWLPGPCYRQQRVSTTTGQNNNSNFAWTAGTKYHLNGRNSLANPGIAMATHKDDEERFFPSNGILIFGKQNAARDNADYSDVMPTSEEEIKTTNPVATEEYGIVADNLQQQNTAPQIGTVNSQGALPGMVWQNRDVYLQGPIWAKIPHTDGNFHPSPLMGGFGLKHPPPQILIKNTPVPADPPTTFNQSKLNSFITQYSTGQVSVEIEWELQKENSKRWNPEIQYTSNYYKSTSVDFAVNTEGVYSEPRPIGTRYLTRNL

SEQ ID NO: 2953 - protein, 738 aa, Artificial Sequence
  Description of Artificial Sequence: Synthetic polypeptide
MAADGYLPDWLEDNLSEGIREWWALKPGAPKPKANQQKQDDGRGLVLPGYKYLGPFNGLDKGEPVNAADAAALEHDKAYDQQLQAGDNPYLRYNHADAEFQERLQEDTSFGGNLGRAVFQAKKRVLEPLGLVEEGAKTAPGKKRPVEPSPQRSPDSSTGIGKKGQQPARKRLNFGQTGDSESVPDPQPLGEPPAAPSGVGPNTMAAGGGAPMADNNEGADGVGSSSGNWHCDSTWLGDRVITTSTRTWALPTYNNHLYKQISNGTSGGATNDNTYFGYSTPWGYFDFNRFHCHFSPRDWQRLINNNWGFRPKRLSFKLFNIQVKEVTQNEGTKTIANNLTSTIQVFTDSEYQLPYVLGSAHQGCLPPFPADVFTIPQYGYLTLNNGSQAVGRSSFYCLEYFPSQMLRTGNNFQFTYTFEDVPFHSSYAHSQSLDRPMNPLIDQYLYYLSRIQTTGGTANTQTLGFSQGGPNTMANQAKNWLPGPCYRQQRVSTTTGQNNNSNFAWTAGTKYHLNGRNSLANPGIAMATHKDDEERFFPSNGILIFGKQNAARDNADYSDVMPTSEEEIKTTNPVATEEYGIVADNLQQQNTAPQIGTVNSQGALPGMVWQNRDVYLQGPIWAKIPHTDGNFHPSPLMGGFGLKHPPPQILIKNTPVPADPPTTFNQSKLNSFITQYSTGQVSVEIEWELQKENSKRWNPEIQYTSNYYKSTSVDFAVNTEGVYSEPRPIGTRYLTRNL

SEQ ID NO: 2954 - protein, 738 aa, Artificial Sequence
  Description of Artificial Sequence: Synthetic polypeptide
MAADGYLPDWLEDNLSEGIREWWALKPGAPKPKANQQKQDDGRGLVLPGYKYLGPFNGLDKGEPVNAADAAALEHDKAYDQQLQAGDNPYLRYNHADAEFQERLQEDTSFGGNLGRAVFQAKKRVLEPLGLVEEGAKTAPGKKRPVEPSPQRSPDSSTGIGKKGQQPARKRLNFGQTGDSESVPDPQPLGEPPAAPSGVGPNTMAAGGGAPMADNNEGADGVGSSSGNWHCDSTWLGDRVITTSTRTWALPTYNNHLYKQISNGTSGGATNDNTYFGYSTPWGYFDFNRFHCHFSPRDWQRLINNNWGFRPKRLSLKLFNIQVKEVTQNEGTKTIANNLTSTIQVFTDSEYQLPYVLGSAHQGCLPPFPADVFTIPQYGYLTLNNGSQAVGRSSFYCLEYFPSQMLRTGNNFQFTYTFEDVPFHSSYAHSQSLDRLMNPLIDQYLYYLSRIQTTGGTANTQTLGFSQGGPNTMANQAKNWLPGPCYRQQRVSTTTGQNNNSNFAWTAGTKYHLNGRNSLANPGIAMATHKDDEERFFPSNGILIFGKQNAARDNADYSDVMPTSEEEIKTTNPVATEEYGIVADNLQQQNTAPQIGTVNSQGALPGMVWQNRDVYLQGPIWAKIPHTDGNFHPSPLMGGFGLKHPPPQILIKNTPVPADPPTTFNQSKLNSFITQYSTGQVSVEIEWELQKENSKRWNPEIQYTSNYYKSTSVDFAVNTEGVYSEPRPIGTRYLTRNL

SEQ ID NO: 2955 - protein, 738 aa, Artificial Sequence
  Description of Artificial Sequence: Synthetic polypeptide
MAADGYLPDWLEDNLSEGIREWWALKPGAPKPKANQQKQDDGRGLVLPGYKYLGPFNGLDKGEPVNAADAAALEHDKAYDQQLQAGDNPYLRYNHADAEFQERLQEDTSFGGNLGRAVFQAKKRVLEPLGLVEEGAKTAPGKKRPVEPSPQRSPDSSTGIGKKGQQPARKRLNFGQTGDSESVPDPQPLGEPPAAPSGVGPNTMAAGGGAPMADNNEGADGVGSSSGNWHCDSTWLGDRVITTSTRTWALPTYNNHLYKQISNGTSGGATNDNTYFGYSTPWGYFDFNRFHCHFSPRDWQRLINNNWGFRPKRLSFKLFNIQVKEVTQNEGTKTIANNLTSTIQVFTDSEYQLPYVLGSAHQGCLPPFPADVFTIPQYGYLTLNNGSQAVGRSSFYCLEYFPSQMLRTGNNFQFTYTFEDVPFHSSYAHSQSLDRLMNPLIDQYLYYLSRIQTTGGTANTQTLGFSQGGPNTMANQAKNWLPGPCYRQQRVSTTTGQNNNSNFAWTAGTKYHLNGRNSLANPGIAMATHKDDEERFFPSNGILIFGKQNAARDNADYSDVTPTSEEEIKTTNPVATEEYGIVADNLQQQNTAPQIGTVNSQGALPGMVWQNRDVYLQGPIWAKIPHTDGNFHPSPLMGGFGLKHPPPQILIKNTPVPADPPTTFNQSKLNSFITQYSTGQVSVEIEWELQKENSKRWNPEIQYTSNYYKSTSVDFAVNTEGVYSEPRPIGTRYLTRNL

SEQ ID NO: 2956 - protein, 738 aa, Artificial Sequence
  Description of Artificial Sequence: Synthetic polypeptide
MAADGYLPDWLEDNLSEGIREWWALKPGAPKPKANQQKQDDGRGLVLPGYKYLGPFNGLDKGEPVNAADAAALEHDKAYDQQLQAGDNPYLRYNHADAEFQERLQEDTSFGGNLGRAVFQAKKRVLEPLGLVEEGAKTAPGKKRPVEPSPQRSPDSSTGIGKKGQQPARKRLNFGQTGDSESVPDPQPLGEPPAAPSGVGPNTMAAGGGAPMADNNEGADGVGSSSGNWHCDSTWLGDRVITTSTRTWALPTYNNHLYKQISNGTSGGATNDNTYFGYSTPWGYFDFNRFHCHFSPRDWQRLINNNWGFRPKRLSFKLFNIQVKEVTQNEGTKTIANNLTSTIQVFTDSEYQLPYVLGSAHQGCLPPFPADVFTIPQYGYLTLNNGSQAVGRSSFYCLEYFPSQMLRTGNNFQFTYTFEDVPFHSSYAHSQSLDRLMNPLIDQYLYYLSRIQTTGGTANTQTLGFSQGGPNTMANQAKNWLPGPCYRQQRVSTTTGQNNNSNFAWTAGTKYHLNGRNSLANPGIAMATHKDDEERFFPSNGILIFGKQNAARDNADYSDVMPTSEEEIKTTNPVATEEYGIVADNLQQQNTAPQIGTVNSQGALPGMVRQNRDVYLQGPIWAKIPHTDGNFHPSPLMGGFGLKHPPPQILIKNTPVPADPPTTFNQSKLNSFITQYSTGQVSVEIEWELQKENSKRWNPEIQYTSNYYKSTSVDFAVNTEGVYSEPRPIGTRYLTRNL

SEQ ID NO: 2957 - protein, 738 aa, Artificial Sequence
  Description of Artificial Sequence: Synthetic polypeptide
MAADGYLPDWLEDNLSEGIREWWALKPGAPKPKANQQKQDDGRGLVLPGYKYLGPFNGLDKGEPVNAADAAALEHDKAYDQQLQAGDNPYLRYNHADAEFQERLQEDTSFGGNLGRAVFQAKKRVLEPLGLVEEGAKTAPGKKRPVEPSPQRSPDSSTDIGKKGQQPARKRLNFGQTGDSESVPDPQPLGEPPAAPSGVGPNTMAAGGGAPMADNNEGADGVGSSSGNWHCDSTWLGDRVITTSTRTWALPTYNNHLYKQISNGTSGGATNDNTYFGYSTPWGYFDFNRFHCHFSPRDWQRLINNNWGFRPKRLSFKLFNIQVKEVTQNEGTKTIANNLTSTIQVFTDSEYQLPYVLGSAHQGCLPPFPADVFTIPQYGYLTLNNGSQAVGRSSFYCLEYFPSQMLRTGNNFQFTYTFEDVPFHSSYAHSQSLDRLMNPLIDQYLYYLSRIQTTGGTANTQTLGFSQGGPNTMANQAKNWLPGPCYRQQRVSTTTGQNNNSNFAWTAGTKYHLNGRNSLANPGIAMATHKDDEERFFPSNGILIFGKQNAARDNADYSDVMPTSEEEIKTTNPVATEEYGIVADNLQQQNTAPQIGTVNSQGALPGMVWQNRDVYLQGPIWAKIPHTDGNFHPSPLMGGFGLKHPPPQILIKNTPVPADPPTTFNQSKLNSFITQYSTGQVSVEIEWELQKENSKRWNPEIQYTSNYYKSTSVDFAVNTEGVYSEPRPIGTRYLTRNL

SEQ ID NO: 2958 - protein, 738 aa, Artificial Sequence
  Description of Artificial Sequence: Synthetic polypeptide
MAADGYLPDWLEDNLSEGIREWWALKPGAPKPKANQQKQDDGRGLVLPGYKYLGPFNGLDKGEPVNAADAAALEHDKAYDQQLQAGDNPYLRYNHADAEFQERLQEDTSFGGNLGRAVFQAKKRVLEPLGLVEEGAKTAPGKKRPVEPSPQRSPDSSTGIGKKGQQPAGKRLNFGQTGDSESVPDPQPLGEPPAAPSGVGPNTMAAGGGAPMADNNEGADGVGSSSGNWHCDSTWLGDRVITTSTRTWALPTYNNHLYKQISNGTSGGATNDNTYFGYSTPWGYFDFNRFHCHFSPRDWQRLINNNWGFRPKRLSFKLFNIQVKEVTQNEGTKTIANNLTSTIQVFTDSEYQLPYVLGSAHQGCLPPFPADVFTIPQYGYLTLNNGSQAVGRSSFYCLEYFPSQMLRTGNNFQFTYTFEDVPFHSSYAHSQSLDRLMNPLIDQYLYYLSRIQTTGGTANTQTLGFSQGGPNTMANQAKNWLPGPCYRQQRVSTTTGQNNNSNFAWTAGTKYHLNGRNSLANPGIAMATHKDDEERFFPSNGILIFGKQNAARDNADYSDVMPTSEEEIKTTNPVATEEYGIVADNLQQQNTAPQIGTVNSQGALPGMVWQNRDVYLQGPIWAKIPHTDGNFHPSPLMGGFGLKHPPPQILIKNTPVPADPPTTFNQSKLNSFITQYSTGQVSVEIEWELQKENSKRWNPEIQYTSNYYKSTSVDFAVNTEGVYSEPRPIGTRYLTRNL

SEQ ID NO: 2959 - protein, 738 aa, Artificial Sequence
  Description of Artificial Sequence: Synthetic polypeptide
MAADGYLPDWLEDNLSEGIREWWALKPGAPKPKANQQKQDDGRGLVLPGYKYLGPFNGLDKGEPVNAADAAALEHDKAYDQQLQAGDNPYLRYNHADAEFQERLQEDTSFGGNLGRAVFQAKKRVLEPLGLVEEGAKTAPGKKRPVEPSPQRSPDSSTGIGKKGQQPARKRLNFGQTGDSESVPDPQPLGEPPAAPSGVGPNTMAAGGGAPMADNNEGADGVGSSSGNWHCDSTWLGDRVITTSTRTWALPTYNNHLYKQISNGTSGGATNDNTYFGYSTPWGYFDFNRFHCHFSPRDWQRLINNNWGFRPKRLSFKLFNIQVKEVTQNEGTKTIANNLTSTIQVFTDSEYQLPYVLGSAHQGCLPPFPADVFTIPQYGYLTLNNGSQAVGRPSFYCLEYFPSQMLRTGNNFQFTYTFEDVPFHSSYAHSQSLDRLMNPLIDQYLYYLSRIQTTGGTANTQTLGFSQGGPNTMANQAKNWLPGPCYRQQRVSTTTGQNNNSNFAWTAGTKYHLNGRNSLANPGIAMATHKDDEERFFPSNGILIFGKQNAARDNADYSDVMPTSEEEIKTTNPVATEEYGIVADNLQQQNTAPQIGTVNSQGALPGMVWQNRDVYLQGPIWAKIPHTDGNFHPSPLMGGFGLKHPPPQILIKNTPVPADPPTTFNQSKLNSFITQYSTGQVSVEIEWELQKENSKRWNPEIQYTSNYYKSTSVDFAVNTEGVYSEPRPIGTRYLTRNL

SEQ ID NO: 2960 - protein, 738 aa, Artificial Sequence
  Description of Artificial Sequence: Synthetic polypeptide
MAADGYLPDWLEDNLSEGIREWWALKPGAPKPKANQQKQDDGRGLVLPGYKYLGPFNGLDKGEPVNAADAAALEHDKAYDQQLQAGDNPYLRYNHADAEFQERLQEDTSFGGNLGRAVFQAKKRVLEPLGLVEEGAKTAPGKKRPVEPSPQRSPDSSTGIGKKGQQPARKRLNFGQTGDSESVPDPQPLGEPPAAPSGVGPNTMAAGGGAPMADNNEGADGVGSSSGNWHCDSTWLGDRVITTSTRTWALPTYNNHLYKQISNGTSGGATNDNTYFGYSTPWGYFDFNRFHCHFSPRDWQRLINNNWGFRPKRLSFKLFNIQVKAVTQNEGTKTIANNLTSTIQVFTDSEYQLPYVLGSAHQGCLPPFPADVFTIPQYGYLTLNNGSQAVGRSSFYCLEYFPSQMLRTGNNFQFTYTFEDVPFHSSYAHSQSLDRLMNPLIDQYLYYLSRIQTTGGTANTQTLGFSQGGPNTMANQAKNWLPGPCYRQQRVSTTTGQNNNSNFAWTAGTKYHLNGRNSLANPGIAMATHKDDEERFFPSNGILIFGKQNAARDNADYSDVMPTSEEEIKTTNPVATEEYGIVADNLQQQNTAPQIGTVNSQGALPGMVWQNRDVYLQGPIWAKIPHTDGNFHPSPLMGGFGLKHPPPQILIKNTPVPADPPTTFNQSKLNSFITQYSTGQVSVEIEWELQKENSKRWNPEIQYTSNYYKSTSVDFAVNTEGVYSEPRPIGTRYLTRNL

SEQ ID NO: 2961 - protein, 738 aa, Artificial Sequence
  Description of Artificial Sequence: Synthetic polypeptide
MAADGYLPDWLEDNLSEGIREWWALKPGAPKPKANQQKQDDGRGLVLPGYKYLGPFNGLDKGEPVNAADAAALEHDKAYDQQLQAGDNPYLRYNHADAEFQERLQEDTSFGGNLGRAVFQAKKRVLEPLGLVEEGAKTAPGKKRPVEPSPQRSPDSSTGIGKKGQQPARKRLNFGQTGDSESVPDPQPLGEPPAAPSGVGPNTMAAGGGAPMADNNEGADGVGSSSGNWHCDSTWLGDRVITTSTRTWALPTYNNHLYKQISNGTSGGATNDNTYFGYSTPWGYFDFNRFHCHFSPRDWQRLINNNWGFRPKRLSFKLFNIQVKEVTQNEGTKTIANNLTSTIQVFTDSEYQLPYVLGSAHQGCLPPFPADVFTIPQYGYLTLNNGSQAVGRSSFYCLEYFPSQMLRTGNNFQFTYTFEDVPFHSSYAHSQSLDRLMNPLIDQYLYYLSRIQTTGGTANTQTLGFSQGGPNTMANQAKNWLPGPCYRQQRVSTTTGQNNNSNFAWTAGTKYHLNGRNSLANPGIAMATHKDDEERFFPSNGILIFGKQNAARDNADYSDVMPTSEEEIKTTNPVATEEYGIVADNLQQQNTAPQIGTVNSQGALPGMVWQNRDVYLQGPIWAKIPHTDGNFHPSPLMGGFGLKHPPPQILIKNTPVPADPPTAFNQSKLNSFITQYSTGQVSVEIEWELQKENSKRWNPEIQYTSNYYKSTSVDFAVNTEGVYSEPRPIGTRYLTRNL

SEQ ID NO: 2962 - protein, 738 aa, Artificial Sequence
  Description of Artificial Sequence: Synthetic polypeptide
MAADGYLPDWLEDNLSEGIREWWALKPGAPKPKANQQKQDDGRGLVLPGYKYLGPFNGLDKGEPVNAADAAALEHDKAYDQQLQAGDNPYLRYNHADAEFQERLQEDTSFGGNLGRAVFQAKKRVLEPLGLVEEGAKTAPGKKRPVEPSPQRSPDSSTGIGKKGQQPARKRLNFGQTGDSESVPDPQPLGEPPAAPSGVGPNTMAAGGGAPMADNNEGADGVGSSSGNWHCDSTWLGDRVITTSTRTWALPTYNNHLYKQISNGTSGGATNDNTYFGYSTPWGYFDFNRFRCHFSPRDWQRLINNNWGFRPKRLSFKLFNIQVKEVTQNEGTKTIANNLTSTIQVFTDSEYQLPYVLGSAHQGCLPPFPADVFTIPQYGYLTLNNGSQAVGRSSFYCLEYFPSQMLRTGNNFQFTYTFEDVPFHSSYAHSQSLDRLMNPLIDQYLYYLSRIQTTGGTANTQTLGFSQGGPNTMANQAKNWLPGPCYRQQRVSTTTGQNNNSNFAWTAGTKYHLNGRNSLANPGIAMATHKDDEERFFPSNGILIFGKQNAARDNADYSDVMPTSEEEIKTTNPVATEEYGIVADNLQQQNTAPQIGTVNSQGALPGMVWQNRDVYLQGPIWAKIPHTDGNFHPSPLMGGFGLKHPPPQILIKNTPVPADPPTTFNQSKLNSFITQYSTGQVSVEIEWELQKENSKRWNPEIQYTSNYYKSTSVDFAVNTEGVYSEPRPIGTRYLTRNL

SEQ ID NO: 2963 - protein, 738 aa, Artificial Sequence
  Description of Artificial Sequence: Synthetic polypeptide
MAADGYLPDWLEDNLSEGIREWWALKPGAPKPKANQQKQDDGRGLVLPGYKYLGPFNGLDKGEPVNAADAAALEHDKAYDQQLQAGDNPYLRYNHADAEFQERLQEDTSFGGNLGRAVFQAKKRVLEPLGLVEEGAKTAPGKKRPVEPSPQRSPDSSTGIGKKGQQPARKRLNFGQTGDSESVPDPQPLGEPPAAPSGVGPNTMAAGGGAPMADNNEGADGVGSSSGNWHCDSTWLGDRVITTSTRTWALPTYNNHLYKQISNGTSGGATNDNTYFGYSTPWGYFDFNRFHCHFSPRDWQRLINNNWGFRPKRLSFKLFNIQVKEVTQNEGTKTIANNLTSTIQVFTDSEYQLPYVLGSAHQGCLPPFPADVFTIPQYGYLTLNNGSQAVGRSSFYCLEYFPSQMLRTGNNFQFTYTLEDVPFHSSYAHSQSLDRLMNPLIDQYLYYLSRIQTTGGTANTQTLGFSQGGPNTMANQAKNWLPGPCYRQQRVSTTTGQNNNSNFAWTAGTKYHLNGRNSLANPGIAMATHKDDEERFFPSNGILIFGKQNAARDNADYSDVMPTSEEEIKTTNPVATEEYGIVADNLQQQNTAPQIGTVNSQGALPGMVWQNRDVYLQGPIWAKIPHTDGNFHPSPLMGGFGLKHPPPQILIKNTPVPADPPTTFNQSKLNSFITQYSTGQVSVEIEWELQKENSKRWNPEIQYTSNYYKSTSVDFAVNTEGVYSEPRPIGTRYLTRNL

SEQ ID NO: 2964 - protein, 738 aa, Artificial Sequence
  Description of Artificial Sequence: Synthetic polypeptide
MAADGYLPDWLEDNLSEGIREWWALKPGAPKPKANQQKQDDGRGLVLPGYKYLGPFNGLDKGEPVNAADAAALEHDKAYDQQLQAGDNPYLRYNHADAEFQERLQEDTSFGGNLGRAVFQAKKRVLEPLGLVEEGAKTAPGKKRPVEPSPQRSPDSSTGIGKKGQQPARKRLNFGQTGDSESVPDPQPLGEPPAAPSGVGPNTMAAGGGAPMADNNEGADGVGSSSGNWHCDSTWLGDRVITTSTRTWALPTYNNHLYKQISNGTSGGATNDNTYFGYSTPWGYFDFNRFHCHFSPRDWQRLINNNWGFRPKRLSFKLFNIQVKEVTQNEGTKTIANNLTSTIQVFTDSEYQLPYVLGSAHQGCLPPFPADVFTIPQYGYLTLNNGSQAVGRSSFYCLEYFPSQMLRTGNNFQFTYTFEDVPFHSSYAHSQSLDRLMNPLIDQYLYYLSRIQTTGGTANTQTLGFSQGGPNTMANQAKNWLPGPCYRQQRVSTTTGQNNNSNFAWTAGTKYHLNGRNSLANPGIAMATHKDDEERFFPSNGILIFGKQNAARDNADYSDVMPTSEEEIKTTNPVATEEYGIVADNLQQQSTAPQIGTVNSQGALPGMVWQNRDVYLQGPIWAKIPHTDGNFHPSPLMGGFGLKHPPPQILIKNTPVPADPPTTFNQSKLNSFITQYSTGQVSVEIEWELQKENSKRWNPEIQYTSNYYKSTSVDFAVNTEGVYSEPRPIGTRYLTRNL

SEQ ID NO: 2965 - protein, 738 aa, Artificial Sequence
  Description of Artificial Sequence: Synthetic polypeptide
MAADGYLPDWLEDNLSEGIREWWALKPGAPKPKANQQKQDDGRGLVLPGYKYLGPFNGLDKGEPVNAADAAALEHDKAYDQQLQAGDNPYLRYNHADAEFQERLQEDTSFGGNLGRAVFQAKKRVLEPLGLVEEGAKTAPGKKRPVEPSPQRSPDSSTGIGKKGQQPARKRLNFGQTGDSESVPDPQPLGEPPAAPSGVGPNTMAAGGGAPMADNNEGADGVGSSSGNWHCDSTWLGDRVITTSTRTWALPTYNNHLYKQISNGTSGGATNDNTYFGYSTPWGYFDFNRFHCHFSPRDWQRLINNNWGFRPKRLSFKLFNIQVKEVTQNEGTKTIANNLTSTIQVFTDSEYQLPYVLGSAHQGCLPPFPADVFTIPQYGYLTLNNGSQAVGRSSFYCLEYFPSQMLRTGNNFQFTYTFEDVPFHSSYAHSQSLDRLMNPLIDQYLYYLSRIQTTGGTANTQTLGFSQGGPNTMANQAKNWLPGPCYRQQRVSTTTGQNNNSNFAWTAGTKYHLNGRNSLANPGIAMATHKDDEERFFPSNGILIFGKQNAARDNADYSDVMPTSEEEIKTTNPVATEEYGIVADNLQQQNTAPQIGTVSSQGALPGMVWQNRDVYLQGPIWAKIPHTDGNFHPSPLMGGFGLKHPPPQILIKNTPVPADPPTTFNQSKLNSFITQYSTGQVSVEIEWELQKENSKRWNPEIQYTSNYYKSTSVDFAVNTEGVYSEPRPIGTRYLTRNL

SEQ ID NO: 2966 - protein, 738 aa, Artificial Sequence
  Description of Artificial Sequence: Synthetic polypeptide
MAADGYLPDWLEDNLSEGIREWWALKPGAPKPKANQQKQDDGRGLVLPGYKYLGPFNGLDKGEPVNAADAAALEHDKAYDQQLQAGDNPYLRYNHADAEFQERLQEDTSFGGNLGRAVFQAKKRVLEPLGLVEEGAKTAPGKKRPVEPSPQRSPDSSTGIGKKGQQPARKRLNFGQTGDSESVPDPQPLGEPPAAPSGVGPNTMAAGGGAPMADNNEGADGVGSSSGNWHCDSTWLGDRVITTSTRTWALPTYNNHLYKQISNGTSGGATNDNTYFGYSTPWGYFDFNRFHCHFSPRDWQRLINNNWGFRPKRLSFKLFNIQVKEVTQNEGTKTIANNLTSTIQVFTDSEYQLPYVLGSAHQGCLPPFPADVFTIPQYGYLTLNNGSQAVGRSSFYCLEYFPSQMLRTGNNFQFTYTFEDVPFHSSYAHSQSLDRLMNPLIDQYLYYLSRIQTTGGTANTQTLGFSQGGPNTMANQAKNWLPGPCYRQQRVSTTTGQNNNSNFAWTAGTKYHLNGRNSLANPGIAMATHKDDEERFFPSNGILIFGKQSAARDNADYSDVMPTSEEEIKTTNPVATEEYGIVADNLQQQNTAPQIGTVNSQGALPGMVWQNRDVYLQGPIWAKIPHTDGNFHPSPLMGGFGLKHPPPQILIKNTPVPADPPTTFNQSKLNSFITQYSTGQVSVEIEWELQKENSKRWNPEIQYTSNYYKSTSVDFAVNTEGVYSEPRPIGTRYLTRNL

SEQ ID NO: 2967 - protein, 738 aa, Artificial Sequence
  Description of Artificial Sequence: Synthetic polypeptide
MAADGYLPDWLEDNLSEGIREWWALKPGAPKPKANQQKQDDGRGLVLPGYKYLGPFNGLDKGEPVNAADAAALEHDKAYDQQLQAGDNPYLRYNHADAEFQERLQEDTSFGGNLGRAVFQAKKRVLEPLGLVEEGAKTAPGKKRPVEPSPQRSPDSSTGIGKKGQQPARKRLNFGQTGDSESVPDPQPLGEPPAAPSGVGPNTMAAGGGAPMADNNEGADGVGSSSGNWHCDSTWLGDRVITTSTRTWALPTYNNHLYKQISNGTSGGATNDNTYFGYSTPWGYFDFNRFHCHFSPRDWQRLINNNWGFRPKRLSFKLFNIQVKEVTQNEGTKTIANNLTSTIQVFTDSEYQLPYVLGSAHQGCLPPFPADVFTIPQYGYLTLNNGSQAVGRSSFYCLEYFPSQMLRTGNNFQFTYTFEDVPFHSSYAHSQSLDRLMNPLIDQYLYYLSRIQTAGGTANTQTLGFSQGGPNTMANQAKNWLPGPCYRQQRVSTTTGQNNNSNFAWTAGTKYHLNGRNSLANPGIAMATHKDDEERFFPSNGILIFGKQNAARDNADYSDVMPTSEEEIKTTNPVATEEYGIVADNLQQQNTAPQIGTVNSQGALPGMVWQNRDVYLQGPIWAKIPHTDGNFHPSPLMGGFGLKHPPPQILIKNTPVPADPPTTFNQSKLNSFITQYSTGQVSVEIEWELQKENSKRWNPEIQYTSNYYKSTSVDFAVNTEGVYSEPRPIGTRYLTRNL

SEQ ID NO: 2968 - protein, 738 aa, Artificial Sequence
  Description of Artificial Sequence: Synthetic polypeptide
MAADGYLPDWLEDNLSEGIREWWALKPGAPKPKANQQKQDDGRGLVLPGYKYLGPFNGLDKGEPVNAADAAALEHDKAYDQQLQAGDNPYLRYNHADAEFQERLQEDTSFGGNLGRAVFQAKKRVLEPLGLVEEGAKTAPGKKRPVEPSPQRSPDSSTGIGKKGQQPARKRLNFGQTGDSESVPDPQPLGEPPAAPSGVGPNTMAAGGGAPMADNNEGADGVGSSSGNWHCDSTWLGDRVITTSTRTWALPTYNNHLYKQISNGTSGGATNDNTYFGYSTPWGYFDFNRFHCHFSPRDWQRLINNNWGFRPKRLSFKLFNIQVKEVTQNEGTKTIANNLTSTIQVFTDSEYQLPYVLGSAHQGCLPPFPADVFTIPQYGYLTLNNGSQAVGRSSFYCLEYFPSQMLRTGNNFQFTYTFEDVPFHSSYAHSQNLDRLMNPLIDQYLYYLSRIQTTGGTANTQTLGFSQGGPNTMANQAKNWLPGPCYRQQRVSTTTGQNNNSNFAWTAGTKYHLNGRNSLANPGIAMATHKDDEERFFPSNGILIFGKQNAARDNADYSDVMPTSEEEIKTTNPVATEEYGIVADNLQQQNTAPQIGTVNSQGALPGMVWQNRDVYLQGPIWAKIPHTDGNFHPSPLMGGFGLKHPPPQILIKNTPVPADPPTTFNQSKLNSFITQYSTGQVSVEIEWELQKENSKRWNPEIQYTSNYYKSTSVDFAVNTEGVYSEPRPIGTRYLTRNL

SEQ ID NO: 2969 - protein, 738 aa, Artificial Sequence
  Description of Artificial Sequence: Synthetic polypeptide
MAADGYLPDWLEDNLSEGIREWWALKPGAPKPKANQQKQDDGRGLVLPGYKYLGPFNGLDKGEPVNAADAAALEHDKAYDQQLQAGDNPYLRYNHADAEFQERLQEDTSFGGNLGRAVFQAKKRVLEPLGLVEEGAKTAPGKKRPVEPSPQRSPDSSTGIGKKGQQPARKRLNFGQTGDSESVPDPQPLGEPPAAPSGVGPNTMAAGGGAPMADNNEGADGVGSSSGNWHCDSTWLGDRVITTSTRTWALPTYNNHLYKQISNGTSGGATNDNTYFGYSTPWGYFDFNRFHCHFSPRDWQRLINNNWGFRPKRLSFKLFNIQVKAVTQNEGTKTIANNLTSTIQVFTDSEYQLPYVLGSAHQGCLPPFPADVFTIPQYGYLTLNNGSQAVGRSSFYCLEYFPSQMLRTGNNFQFTYTFEDVPFHSSYAHSQSLDRLMNPLIDQYLYYLSRIQTTGGTANTQTLGFSQGGPNTMANQAKNWLPGPCYRQQRVSTTTGQNNNSNFAWTAGTKYHLNGRNSLANPSIAMATHKDDEERFFPSNGILIFGKQNAARDNADYSDVMPTSEEEIKTTNPVATEEYGIVADNLQQQNTAPQIGTVNSQGALPGMVWQNRDVYLQGPIWAKIPHTDGNFHPSPLMGGFGLKHPPPQILIKNTPVPADPPTTFNQSKLNSFITQYSTGQVSVEIEWELQKENSKRWNPEIQYTSNYYKSTSVDFAVNTEGVYSEPRPIGTRYLTRNL

SEQ ID NO: 2970 - protein, 738 aa, Artificial Sequence
  Description of Artificial Sequence: Synthetic polypeptide
MAADGYLPDWLEDNLSEGIREWWALKPGAPKPKANQQKQDDGRGLVLPGYKYLGPFNGLDKGEPVNAADAAALEHDKAYDQQLQAGDNPYLRYNHADAEFQERLQEDTSFGGNLGRAVFQAKKRVLEPLGLVEEGAKTAPGKKRPVEPSPQRSPDSSTGIGKKGQQPARKRLNFGQTGDSESVPDPQPLGEPPAAPSGVGPNTMAAGGGAPMADNNEGADGVGSSSGNWHCDSTWLGDRVITTSTRTWALPTYNNHLYKQISNGTSGGATNDNTYFGYSTPWGYFDFNRFHCHFSPRDWQRLINNNWGFRPKRLSFKLFNIQVKEVTQNEGTKTIANNLTSTIQVFTDSEYQLPYVLGSAHQGCLPPFPADVFTIPQYGYLTLNNGSQAVGRSSFYCLEYFPSQMLRTGNNFQFTYTFEDVPFHSSYAHSQSLDRLMNPLIDQYLYYLSRIQTTGGTANTQTLGFSQGGPNTMANQAKNWLPGPCYRQQRVSTTTGQNNNSNFAWTAGTKYHLNGRNSLANPGIAMATHKDDEERFFPSNGILIFGKQNAARDNADYSDVMPTSEEEIKTTNPVATEEYDIVADNLQQQNTAPQIGTVNSQGALPGMVWQNRDVYLQGPIWAKIPHTDGNFHPSPLMGGFGLKHPPPQILIKNTPVPADPPTTFNQSKLNSFITQYSTGQVSVEIEWELQKENSKRWNPEIQYTSNYYKSTSVDFAVNTEGVYSEPRPIGTRYLTRNL

SEQ ID NO: 2971 - protein, 738 aa, Artificial Sequence
  Description of Artificial Sequence: Synthetic polypeptide
MAADGYLPDWLEDNLSEGIREWWALKPGAPKPKANQQKQDDGRGLVLPGYKYLGPFNGLDKGEPVNAADAAALEHDKAYDQQLQAGDNPYLRYNHADAEFQERLQEDTSFGGNLGRAVFQAKKRVLEPLGLVEEGAKTAPGKKRPVEPSPQRSPDSSTGIGKKGQQPARKRLNFGQTGDSESVPDPQPLGEPPAAPSGVGPNTMAAGGGAPMADNNEGADGVGSSSGNWHCDSTWLGDRVITTSTRTWALPTYNNHLYKQISNGTSGGATNDNTYFGYSTPWGYFDFNRFHCHFSPRDWQRLINNNWGFRPKRLSFKLFNIQVKEVTQNEGTKTIANNLTSTIQVFTDSEYQLPYVLGSAHQGCLPPFPADVFTIPQYGYLTLNNGSQAVGRSSFYCLEYFPSQMLRTGNNFQFTYTFEDVPFHSSYAHSQSLDRLMNPLIDQYLYYLSRIQTTGGTANTQTPGFSQGGPNTMANQAKNWLPGPCYRQQRVSTTTGQNNNSNFAWTAGTKYHLNGRNSLANPGIAMATHKDDEERFFPSNGILIFGKQNAARDNADYSDVMPTSEEEIKTTNPVATEEYGIVADNLQQQNTAPQIGTVNSQGALPGMVWQNRDVYLQGPIWAKIPHTDGNFHPSPLMGGFGLKHPPPQILIKNTPVPADPPTTFNQSKLNSFITQYSTGQVSVEIEWELQKENSKRWNPEIQYTSNYYKSTSVDFAVNTEGVYSEPRPIGTRYLTRNL

SEQ ID NO: 2972 - protein, 738 aa, Artificial Sequence
  Description of Artificial Sequence: Synthetic polypeptide
MAADGYLPDWLEDNLSEGIREWWALKPGAPKPKANQQKQDDGRGLVLPGYKYLGPFNGLDKGEPVNAADAAALEHDKAYDQQLQAGDNPYLRYNHADAEFQERLQEDTSFGGNLGRAVFQAKKRVLEPLGLVEEGAKTAPGKKRPVEPSPQRSPDSSTGIGKKGQQPARKRLNFGQTGDSESVPDPQPLGEPPAAPSGVGPNTMAAGGGAPMADNNEGADGVGSSSGNWHCDSTWLGDRVITTSTRTWALPTYNNHLYKQISNGTSGGATNDNTYFGYSTPWGYFDFNRFHCHFSPRDWQRLINNNWGFRPKRLSFKLFNIQVKEVTQNEGTKTIANNLTSTIQVFTDSEYQLPYVLGSAHQGCLPPFPADVFTIPQYGYLTLNNGSQAVGRSSSYCLEYFPSQMLRTGNNFQFTYTFEDVPFHSSYAHSQSLDRLMNPLIDQYLYYLSRIQTTGGTANTQTLGFSQGGPNTMANQAKNWLPGPCYRQQRVSTTTGQNNNSNFAWTAGTKYHLNGRNSLANPGIAMATHKDDEERFFPSNGILIFGKQNAARDNADYSDVMPTSEEEIKTTNPVATEEYGIVADNLQQQNTAPQIGTVNSQGALPGMVWQNRDVYLQGPIWAKIPHTDGNFHPSPLMGGFGLKHPPPQILIKNTPVPADPPTTFNQSKLNSFITQYSTGQVSVEIEWELQKENSKRWNPEIQYTSNYYKSTSVDFAVNTEGVYSEPRPIGTRYLTRNL

SEQ ID NO: 2973 - protein, 738 aa, Artificial Sequence
  Description of Artificial Sequence: Synthetic polypeptide
MAADGYLPDWLEDNLSEGIREWWALKPGAPKPKANQQKQDDGRGLVLPGYKYLGPFNGLDKGEPVNAADAAALEHDKAYDQQLQAGDNPYLRYNHADAEFQERLQEDTSFGGNLGRAAFQAKKRVLEPLGLVEEGAKTAPGKKRPVEPSPQRSPDSSTGIGKKGQQPARKRLNFGQTGDSESVPDPQPLGEPPAAPSGVGPNTMAAGGGAPMADNNEGADGVGSSSGNWHCDSTWLGDRVITTSTRTWALPTYNNHLYKQISNGTSGGATNDNTYFGYSTPWGYFDFNRFHCHFSPRDWQRLINNNWGFRPKRLSFKLFNIQVKEVTQNEGTKTIANNLTSTIQVFTDSEYQLPYVLGSAHQGCLPPFPADVFTIPQYGYLTLNNGSQAVGRSSFYCLEYFPSQMLRTGNNFQFTYTFEDVPFHSSYAHSQSLDRLMNPLIDQYLYYLSRIQTTGGTANTQTLGFSQGGPNTMANQAKNWLPGPCYRQQRVSTTTGQNNNSNFAWTAGTKYHLNGRNSLANPGIAMATHKDDEERFFPSNGILIFGKQNAARDNADYSDVMPTSEEEIKTTNPVATEEYGIVADNLQQQNTAPQIGTVNSQGALPGMVWQNRDVYLQGPIWAKIPHTDGNFHPSPLMGGFGLKHPPPQILIKNTPVPADPPTTFNQSKLNSFITQYSTGQVSVEIEWELQKENSKRWNPEIQYTSNYYKSTSVDFAVNTEGVYSEPRPIGTRYLTRNL

SEQ ID NO: 2974 - protein, 738 aa, Artificial Sequence
  Description of Artificial Sequence: Synthetic polypeptide
MAADGYLPDWLEDNLSEGIREWWALKPGAPKPKANQQKQDDGRGLVLPGYKYLGPFNGLDKGEPVNAADAAALEHDKAYDQQLQAGDNPYLRYNHADAEFQERLQEDTSFGGNLGRAVFQAKKRVLEPLGLVEEGAKTAPGKKRPVEPSPQRSPDSSTGIGKKGQQPARKRLNFGQTGDSESVPDPQPLGEPPAAPSGVGPNTMAAGGGAPMADNNEGADGVGSSSGNWHCDSTWLGDRVITTSTRTWALPTYNNHLYKQISNGTSGGATDDNTYFGYSTPWGYFDFNRFHCHFSPRDWQRLINNNWGFRPKRLSFKLFNIQVKEVTQNEGTKTIANNLTSTIQVFTDSEYQLPYVLGSAHQGCLPPFPADVFTIPQYGYLTLNNGSQAVGRSSFYCLEYFPSQMLRTGNNFQFTYTFEDVPFHSSYAHSQSLDRLMNPLIDQYLYYLSRIQTTGGTANTQTLGFSQGGPNTMANQAKNWLPGPCYRQQRVSTTTGQNNNSNFAWTAGTKYHLNGRNSLANPGIAMATHKDDEERFFPSNGILIFGKQNAARDNADYSDVMPTSEEEIKTTNPVATEEYGIVADNLQQQNTAPQIGTVNSQGALPGMVWQNRDVYLQGPIWAKIPHTDGNFHPSPLMGGFGLKHPPPQILIKNTPVPADPPTTFNQSKLNSFITQYSTGQVSVEIEWELQKENSKRWNPEIQYTSNYYKSTSVDFAVNTEGVYSEPRPIGTRYLTRNL

SEQ ID NO: 2975 - protein, 738 aa, Artificial Sequence
  Description of Artificial Sequence: Synthetic polypeptide
MAADGYLPDWLEDNLSEGIREWWALKPGAPKPKANQQKQDDGRGLVLPGYKYLGPFNGLDKGEPVNAADAAALEHDKAYDQQLQAGDNPYLRYNHADAEFQERLQEDTSFGGNLGRAVFQAKKRVLEPLGLVEEGAKTAPGKKRPVEPSPQRSPDSSTGIGKKGQQPARKRLNFGQTGDSESVPDPQPLGEPPAAPSGVGPNTMAAGGGAPMADNNEGADGVGSSSGNWHCDSTWLGDRVITTSTRTWALPTYNNHLYKQISNGTSGGATNDNTYFGYSTPWGYFDFNRFHCHFSPRDWQRLINNNWGFRPKRLSFKLFNIQVKEVTQNEGTKTIANNLTSTIQVFTDSEYQLPYVLGSAHQGCLPPFPADVFTIPQYGYLTLNNGSQAVGRSSFYCLEYFPSQMLRTGNNFQFTYTFEDVPFHSSYAHSQSLDRLMNPLIDQYLYYLSRIQTTGGTANTQTLGFSQGGPNTMANQAKNWLPGPCYRQQRVSTTTGQNNNSNFAWTAGTKYHLNGRNSLANPGIAMATHKDDEERFFPSNGILIFGKQNATRDNADYSDVMPTSEEEIKTTNPVATEEYGIVADNLQQQNTAPQIGTVNSQGALPGMVWQNRDVYLQGPIWAKIPHTDGNFHPSPLMGGFGLKHPPPQILIKNTPVPADPPTTFNQSKLNSFITQYSTGQVSVEIEWELQKENSKRWNPEIQYTSNYYKSTSVDFAVNTEGVYSEPRPIGTRYLTRNL

SEQ ID NO: 2976 - protein, 738 aa, Artificial Sequence
  Description of Artificial Sequence: Synthetic polypeptide
MAADGYLPDWLEDNLSEGIREWWALKPGAPKPKANQQKQDDGRGLVLPGYKYLGPFNGLDKGEPVNAADAAALEHDKAYDQQLQAGDNPYLRYNHADAEFQERLQEDTSFGGNLGRAVFQAKKRVLEPLGLVEEGAKTAPGKKRPVEPSPQRSPDSSTGIGKKGQQPARKRLNFGQTGDSESVPDPQPLGEPPAAPSGVGPNTMAAGGGAPMADNNEGADGVGSSSGNWHCDSTWLGDRVITTSTRTWALPTYNNHLYKQISNGTSGGATNDNTYFGYSTPWGYFDFNRFHCHFSPRDWQRLINNNWGFRPKRLSFKLFNIQVKEVTQNEGTKTIANNLTSTIQVFTDSEYQLPYVLGSAHQGCLPPFPADVFTIPQYGYLTLNNGSQAVGRSSFYCLEYFPSQMLRTGNNFQFTYTFEDVPFHSSYAHSQSLDRLMNPLIDQYLYYLSRIQTTGGTANTQTLGFSQGGPNTMANQAKNWLPGPCYRQQRVSTTTGQNNNSNFAWTAGTKYHLNGRNSLANPGIAMATHKDDEERFFPSNGILIFGKQNAARDNADYSDVMPTSEEEIKTTNPVATEEHGIVADNLQQQNTAPQIGTVNSQGALPGMVWQNRDVYLQGPIWAKIPHTDGNFHPSPLMGGFGLKHPPPQILIKNTPVPADPPTTFNQSKLNSFITQYSTGQVSVEIEWELQKENSKRWNPEIQYTSNYYKSTSVDFAVNTEGVYSEPRPIGTRYLTRNL

SEQ ID NO: 2977 - protein, 738 aa, Artificial Sequence
  Description of Artificial Sequence: Synthetic polypeptide
MAADGYLPDWLEDNLSEGIREWWALKPGAPKPKANQQKQDDGRGLVLPGYKYLGPFNGLDKGEPVNAADAAALEHDKAYDQQLQAGDNPYLRYNHADAEFQERLQEDTSFGGNLGRAVFQAKKRVLEPLGLVEEGAKTAPGKKRPVEPSPQRSPDSSTGIGKKGQQPARKRLNFGQTGDSESVPDPQPLGEPPAAPSGVGPNTMAAGGGAPMADNNEGADGVGSSSGNWHCDSTWLGDRVITTSTRTWALPTYNNHLYKQISNGTSGGATNDNTYFGYSTPWGYFDFNRFHCHFSPRDWQRLINNNWGFRPKRLSFKLFNIQVKEVTQNEGTKTIANNLTSTIQVFTDSEYQLPYVLGSAHQGCLPPFPADVFTIPQYGYLTLNNGSQAVGRSSFYCLEYFPSQMLRTGNNFQFTYTFEDVPFHSSYARSQSLDRLMNPLIDQYLYYLSRIQTTGGTANTQTLGFSQGGPNTMANQAKNWLPGPCYRQQRVSTTTGQNNNSNFAWTAGTKYHLNGRNSLANPGIAMATHKDDEERFFPSNGILIFGKQNAARDNADYSDVMPTSEEEIKTTNPVATEEYGIVADNLQQQNTAPQIGTVNSQGALPGMVWQNRDVYLQGPIWAKIPHTDGNFHPSPLMGGFGLKHPPPQILIKNTPVPADPPTTFNQSKLNSFITQYSTGQVSVEIEWELQKENSKRWNPEIQYTSNYYKSTSVDFAVNTEGVYSEPRPIGTRYLTRNL

SEQ ID NO: 2978 - protein, 738 aa, Artificial Sequence
  Description of Artificial Sequence: Synthetic polypeptide
MAADGYLPDWLEDNLSEGIREWWALKPGAPKPKANQQKQDDGRGLVLPGYKYLGPFNGLDKGEPVNAADAAALEHDKAYDQQLQAGDNPYLRYNHADAEFQERLQEDTSFGGNLGRAVFQAKKRVLEPLGLVEEGAKTAPGKKRPVEPSPQRSPDSSTGIGKKGQQPARKRLNFGQTGDSESVPDPQPLGEPPAAPSGVGPNTMAAGGGAPMADNNEGADGVGSSSGNWHCDSTWLGDRVITTSTRTWALPTYNNHLYKQISNGTSGGATNDNTYFGYSTPWGYFDFNRFHCHFSPRDWQRLINNNWGFRPKRLSFKLFNIQVKEVTQNEGTKTIANNLTSTIQVFTDSEYQLPYVLGSAHQGCLPPLPADVFTIPQYGYLTLNNGSQAVGRSSFYCLEYFPSQMLRTGNNFQFTYTFEDVPFHSSYAHSQSLDRLMNPLIDQYLYYLSRIQTTGGTANTQTLGFSQGGPNTMANQAKNWLPGPCYRQQRVSTTTGQNNNSNFAWTAGTKYHLNGRNSLANPGIAMATHKDDEERFFPSNGILIFGKQNAARDNADYSDVMPTSEEEIKTTNPVATEEYGIVADNLQQQNTAPQIGTVNSQGALPGMVWQNRDVYLQGPIWAKIPHTDGNFHPSPLMGGFGLKHPPPQILIKNTPVPADPPTTFNQSKLNSFITQYSTGQVSVEIEWELQKENSKRWNPEIQYTSNYYKSTSVDFAVNTEGVYSEPRPIGTRYLTRNL

SEQ ID NO: 2979 - protein, 738 aa, Artificial Sequence
  Description of Artificial Sequence: Synthetic polypeptide
MAADGYLPDWLEDNLSEGIREWWALKPGAPKPKANQQKQDDGRGLVLPGYKYLGPFNGLDKGEPVNAADAAALEHDKAYDQQLQAGDNPYLRYNHADAEFQERLQEDTSFGGNLGRAVFQAKKRVLEPLGLVEEGAKTAPGKKRPVEPSPQRSPDSSTGIGKKGQQPARKRLNFGQTGDSESVPDPQPLGEPPAAPSGVGPNTMAAGGGAPMADNNEGADGVGSSSGNWHCDSTWLGDRVITTSTRTRALPTYNNHLYKQISNGTSGGATNDNTYFGYSTPWGYFDFNRFHCHFSPRDWQRLINNNWGFRPKRLSFKLFNIQVKEVTQNEGTKTIANNLTSTIQVFTDSEYQLPYVLGSAHQGCLPPFPADVFTIPQYGYLTLNNGSQAVGRSSFYCLEYFPSQMLRTGNNFQFTYTFEDVPFHSSYAHSQSLDRLMNPLIDQYLYYLSRIQTTGGTANTQTLGFSQGGPNTMANQAKNWLPGPCYRQQRVSTTTGQNNNSNFAWTAGTKYHLNGRNSLANPGIAMATHKDDEERFFPSNGILIFGKQNAARDNADYSDVMPTSEEEIKTTNPVATEEYGIVADNLQQQNTAPQIGTVNSQGALPGMVWQNRDVYLQGPIWAKIPHTDGNFHPSPLMGGFGLKHPPPQILIKNTPVPADPPTTFNQSKLNSFITQYSTGQVSVEIEWELQKENSKRWNPEIQYTSNYYKSTSVDFAVNTEGVYSEPRPIGTRYLTRNL

SEQ ID NO: 2980 - protein, 738 aa, Artificial Sequence
  Description of Artificial Sequence: Synthetic polypeptide
MAADGYLPDWLEDNLSEGIREWWALKPGAPKPKANQQKQDDGRGLVLPGYKYLGPFNGLDKGEPVNAADAAALEHDKAYDQQLQAGDNPYLRYNHADAEFQERLQEDTSFGGNLGRAVFQAKKRVLEPLGLVEEGAKTAPGKKRPVEPSPQRSPDSSTGIGKKGQQPARKRLNFGQTGDSESVPDPQPLGEPPAAPSGVGPNTMAAGGGAPMADNNEGADGVGSSSGNWHCDSTWLGDRVITTSTRTWALPTYNNHLYKQISNGTSGGATNDNTYFGYSTPWGYFDFNRFHCHFSPRDWQRLINNNWGFRPKRLSFKLFNIQVKEVTQNEGTKTIANNLTSTIQVFTDSEYQLPYVLGSAHQGCLPPFPADVFTIPQYGYLTLNNGSQAVGRSSFYCLEYFPSQMLRTGNNFQFTYTFEDVPFHSSYAHSQSLDRLMNPLIDQYLYYLSRIQTTGGTANTQTLGFSQGGPNTMANQAKNWLPGPCYRQQRVSTTTGQNNNSNFAWTAGTKYHLNGRNSLANPGIAMTTHKDDEERFFPSNGILIFGKQNAARDNADYSDVMPTSEEEIKTTNPVATEEYGIVADNLQQQNTAPQIGTVNSQGALPGMVWQNRDVYLQGPIWAKIPHTDGNFHPSPLMGGFGLKHPPPQILIKNTPVPADPPTTFNQSKLNSFITQYSTGQVSVEIEWELQKENSKRWNPEIQYTSNYYKSTSVDFAVNTEGVYSEPRPIGTRYLTRNL

SEQ ID NO: 2981 - protein, 738 aa, Artificial Sequence
  Description of Artificial Sequence: Synthetic polypeptide
MAADGYLPDWLEDNLSEGIREWWALKPGAPKPKANQQKQDDGRGLVLPGYKYLGPFNGLDKGEPVNAADAAALEHDKAYDQQLQAGDNPYLRYNHADAEFQERLQEDTSFGGNLGRAVFQAKKRVLEPLGLVEEGAKTAPGKKRPVEPSPQRSPDSSTGIGKKGQQPARKRLNFGQTGDSESVPDPQPLGEPPAAPSGVGPNTMAAGGGAPMADNNEGADGVGSSSGNWHCDSTWLGDRVITTSTRTWALPTYNNHLYKQISNGTSGGATNDNTYFGYSTPWGYFDFNRFHCHFSPRDWQRLINNNWGFRPKRLSFKLFNIQVKEVTQNEGTKTIANNLTSTIQVFTDSEYQLPYVLGSAHQGCLPPFPADVFTIPQYGYLTLNNGSQAVGRSSFYCLEYFPSQMLRTGNNFQFTYTFEDVPFHSSYAHSQSLDRLMNPLIDQYLYYLSRIQTTGGTANTQTLGFSQGGPNTMANQAKNWLPGPCYRQQRVSTTTGQNNNSNFAWTAGTKYHLNGRNSLANPGIAMATHKDDEERFFPSNGILIFGKQNAARDNADYSDVMPTSEEEIKTTNPVATEEYGIVADNLQQQNTAPQIGTVNSQGVLPGMVWQNRDVYLQGPIWAKIPHTDGNFHPSPLMGGFGLKHPPPQILIKNTPVPADPPTTFNQSKLNSFITQYSTGQVSVEIEWELQKENSKRWNPEIQYTSNYYKSTSVDFAVNTEGVYSEPRPIGTRYLTRNL

SEQ ID NO: 2982 - protein, 738 aa, Artificial Sequence
  Description of Artificial Sequence: Synthetic polypeptide
MAADGYLPDWLEDNLSEGIREWWALKPGAPKPKANQQKQDDGRGLVLPGYKYLGPFNGLDKGEPVNAADAAALEHDKAYDQQLQAGDNPYLRYNHADAEFQERLQEDTSFGGNLGRAVFQAKKRVLEPLGLVEEGAKTAPGKKRPVEPSPQRSPDSSTGIGKKGQQPARKRLNFGQTGDSESVPDPQPLGEPPAAPSGVGPNTMAAGGGAPMADNNEGADGVGSSSGNWHCDSTWLGDRVITTSTRTWALPTYNNHLYKQISNGTSGGATNDNTYFGYSTPWGYFDFNRFHCHFSPRDWQRLVNNNWGFRPKRLSFKLFNIQVKEVTQNEGTKTIANNLTSTIQVFTDSEYQLPYVLGSAHQGCLPPFPADVFTIPQYGYLTLNNGSQAVGRSSFYCLEYFPSQMLRTGNNFQFTYTFEDVPFHSSYAHSQSLDRLMNPLIDQYLYYLSRIQTTGGTANTQTLGFSQGGPNTMANQAKNWLPGPCYRQQRVSTTTGQNNNSNFAWTAGTKYHLNGRNSLANPGIAMATHKDDEERFFPSNGILIFGKQNAARDNADYSDVMPTSEEEIKTTNPVATEEYGIVADNLQQQNTAPQIGTVNSQGALPGMVWQNRDVYLQGPIWAKIPHTDGNFHPSPLMGGFGLKHPPPQILIKNTPVPADPPTTFNQSKLNSFITQYSTGQVSVEIEWELQKENSKRWNPEIQYTSNYYKSTSVDFAVNTEGVYSEPRPIGTRYLTRNL

SEQ ID NO: 2983 - protein, 738 aa, Artificial Sequence
  Description of Artificial Sequence: Synthetic polypeptide
MAADGYLPDWLEDNLSEGIREWWALKPGAPKPKANQQKQDDGRGLVLPGYKYLGPFNGLDKGEPVNAADAAALEHDKAYDQQLQAGDNPYLRYNHADAEFRERLQEDTSFGGNLGRAVFQAKKRVLEPLGLVEEGAKTAPGKKRPVEPSPQRSPDSSTGIGKKGQQPARKRLNFGQTGDSESVPDPQPLGEPPAAPSGVGPNTMAAGGGAPMADNNEGADGVGSSSGNWHCDSTWLGDRVITTSTRTWALPTYNNHLYKQISNGTSGGATNDNTYFGYSTPWGYFDFNRFHCHFSPRDWQRLINNNWGFRPKRLSFKLFNIQVKEVTQNEGTKTIANNLTSTIQVFTDSEYQLPYVLGSAHQGCLPPFPADVFTIPQYGYLTLNNGSQAVGRSSFYCLEYFPSQMLRTGNNFQFTYTFEDVPFHSSYAHSQSLDRLMNPLIDQYLYYLSRIQTTGGTANTQTLGFSQGGPNTMANQAKNWLPGPCYRQQRVSTTTGQNNNSNFAWTAGTKYHLNGRNSLANPGIAMATHKDDEERFFPSNGILIFGKQNAARDNADYSDVMPTSEEEIKTTNPVATEEYGIVADNLQQQNTAPQIGTVNSQGALPGMVWQNRDVYLQGPIWAKIPHTDGNFHPSPLMGGFGLKHPPPQILIKNTPVPADPPTTFNQSKLNSFITQYSTGQVSVEIEWELQKENSKRWNPEIQYTSNYYKSTSVDFAVNTEGVYSEPRPIGTRYLTRNL

SEQ ID NO: 2984 - protein, 738 aa, Artificial Sequence
  Description of Artificial Sequence: Synthetic polypeptide
MAADGYLPDWLEDNLSEGIREWWALKPGAPKPKANQQKQDDGRGLVLPGYKYLGPFNGLDKGEPVNAADAAALEHDKAYDQQLQAGDNPYLRYNHADAEFQERLQEDTSFGGNLGRAVFQAKKRVLEPLGLVEEGAKTAPGKKRPVEPSPQRSPDSSTGIGKKGQQPARKRLNFGQTGDSESVPDPQPLGEPPAAPSGVGPNTMAAGGGAPMADNNEGADGVGSSSGNWHCDSTWLGDRVITTSTRTWALPTYNNHLYKQISNGTSGGATNDNTYFGYSTPWGYFDFNRFHCHFSPRDWQRLINNNWGFRPKRLSFKLFNIQVKEVTQNEGTKTIANNLTSTIQVFTDSEYQLPYVLGSAHQGCLPPFPADVFTIPQYGYPTLNNGSQAVGRSSFYCLEYFPSQMLRTGNNFQFTYTFEDVPFHSSYAHSQSLDRLMNPLIDQYLYYLSRIQTTGGTANTQTLGFSQGGPNTMANQAKNWLPGPCYRQQRVSTTTGQNNNSNFAWTAGTKYHLNGRNSLANPGIAMATHKDDEERFFPSNGILIFGKQNAARDNADYSDVMPTSEEEIKTTNPVATEEYGIVADNLQQQNTAPQIGTVNSQGALPGMVWQNRDVYLQGPIWAKIPHTDGNFHPSPLMGGFGLKHPPPQILIKNTPVPADPPTTFNQSKLNSFITQYSTGQVSVEIEWELQKENSKRWNPEIQYTSNYYKSTSVDFAVNTEGVYSEPRPIGTRYLTRNL

SEQ ID NO: 2985 - protein, 738 aa, Artificial Sequence
  Description of Artificial Sequence: Synthetic polypeptide
MAADGYLPDWLEDNLSEGIREWWALKPGAPKPKANQQKQDDGRGLVLPGYKYLGPFNGLDKGEPVNAADAAALEHDKAYDQQLQAGDNPYLRYNHADAEFQERLQEDTSFGGNLGRAVFQAKKRVLEPLGLVEEGAKTAPGKKRPVEPSPQRSPDSSTGIGKKGQQPARKRLNFGQTGDSESVPDPQPLGEPPAAPSGVGPNTMTAGGGAPMADNNEGADGVGSSSGNWHCDSTWLGDRVITTSTRTWALPTYNNHLYKQISNGTSGGATNDNTYFGYSTPWGYFDFNRFHCHFSPRDWQRLINNNWGFRPKRLSFKLFNIQVKEVTQNEGTKTIANNLTSTIQVFTDSEYQLPYVLGSAHQGCLPPFPADVFTIPQYGYLTLNNGSQAVGRSSFYCLEYFPSQMLRTGNNFQFTYTFEDVPFHSSYAHSQSLDRLMNPLIDQYLYYLSRIQTTGGTANTQTLGFSQGGPNTMANQAKNWLPGPCYRQQRVSTTTGQNNNSNFAWTAGTKYHLNGRNSLANPGIAMATHKDDEERFFPSNGILIFGKQNAARDNADYSDVMPTSEEEIKTTNPVATEEYGIVADNLQQQNTAPQIGTVNSQGALPGMVWQNRDVYLQGPIWAKIPHTDGNFHPSPLMGGFGLKHPPPQILIKNTPVPADPPTTFNQSKLNSFITQYSTGQVSVEIEWELQKENSKRWNPEIQYTSNYYKSTSVDFAVNTEGVYSEPRPIGTRYLTRNL

SEQ ID NO: 2986 - protein, 738 aa, Artificial Sequence
  Description of Artificial Sequence: Synthetic polypeptide
MAADGYLPDWLEDNLSEGIREWWALKPGAPKPKANQQKQDDGRGLVLPGYKYLGPFNGLDKGEPVNAADAAALEHDKAYDQQLQAGDNPYLRYNHADAEFQERLQEDTSFGGNLGRAVFQAKKRVLEPLGLVEEGAKTAPGKKRPVEPSPQRSPDSSTGIGKKGQQPARKRLNFGQTGDSESVPDPQPLGEPPAAPSGVGPNTMAAGGGAPMADNNEGADGVGSSSGNWHCDSTWLGDRVITTSTRTWALPTYNNHLYKQISNGTSGGATNDNTYFGYSTPWGYFDFNRFHCHFSPRDWQRLINNNWGFRPKRLSFKLFNIQVKEVTQNEGTKTIANNLTSTIQVFTDSEYQLPYVLGSAHQGCLPPFPADVFTIPQYGYLTLNNGSQAVGRSSFYCLEYFPSQMLRTGNNFQFTYTFEDVPFHSSYAHSQSLDRLMNPLIDQYLYYLSRIQTTGGTANTQTLGFSQGGPNTMANQAKNWLPGPCYRQQRVSTTTGQNNNSNFAWTAGTKYHLNGRNSLANPGIAMATHKDDEERFFPSNGILIFGKQNAARDNADYSDVMPTSEEEIKTTNPVATEEYGIVTDNLQQQNTAPQIGTVNSQGALPGMVWQNRDVYLQGPIWAKIPHTDGNFHPSPLMGGFGLKHPPPQILIKNTPVPADPPTTFNQSKLNSFITQYSTGQVSVEIEWELQKENSKRWNPEIQYTSNYYKSTSVDFAVNTEGVYSEPRPIGTRYLTRNL

SEQ ID NO: 2987 - protein, 738 aa, Artificial Sequence
  Description of Artificial Sequence: Synthetic polypeptide
MAADGYLPDWLEDNLSEGIREWWALKPGAPKPKANQQKQDDGRGLVLPGYKYLGPFNGLDKGEPVNAADAAALEHDKAYDQQLQAGDNPYLRYNHADAEFQERLQEDTSFGGNLGRAVFQAKKRVLEPLGLVEEGAKTAPGKKRPVEPSPQRSPDSSTGIGKKGQQPARKRLNFGQTGDSESVPDPQPLGEPPAAPSGVGPNTMAAGGGAPMADNNEGADGVGSSSGNWHCDSTWLGDRVITTSTRTWALPTYNNHLYKQISNGTSGGATNDNTYFGYSTPWGYFDFNRFHCHFSPRDWQRLINNNWGFRPKRLSFKLFNIQVKEVTQNEGTKTIANNLTSTIQVFTDSEYQLPYVLGSAHQGCLPPFPADVFTIPQYGYLTLNNGSQAVGRSSFYCLEYFPSQMLRTGNNFQFTYTFEDVPFHSSYAHSQSLDRLMNPLIDQYLYYLSRIQTTGGTANTQTLGFSQGGPNTMANQAKNWLPGPCYRQQRVSTTTGQNNNSNFAWTAGTKYHLNGRNSLANPGIAMATHKDDEERFFPSNGILIFGKQNAARDNADYSDVMPTSEEEIKTTNPVATEEYGIVADNLQQQNTAPQIGTVNSQGALPGMVWQNRDVYLQGPIWAKIPHTDGNFHPSPLMGGFGLKHPPPQILIKNTPVPADPPTTFNQSKLNSFITQYSTGQVSVEIEWELQKENSKRWNPEIQYTSNYYKSTSVDFAINTEGVYSEPRPIGTRYLTRNL

SEQ ID NO: 2988 - protein, 738 aa, Artificial Sequence
  Description of Artificial Sequence: Synthetic polypeptide
MAADGYLPDWLEDNLSEGIREWWALKPGAPKPKANQQKQDDGRGLVLPGYKYLGPFNGLDKGEPVNAADAAALEHDKAYDQQLQAGDNPYLRYNHADAEFQERLQEDTSFGGNLGRAVFQAKKRVLEPLGLVEEGAKTAPGKKRPVEPSPQRSPDSSTGIGKKGQQPARKRLNFGQTGDSESVPDPQPLGEPPAAPSGVGPNTMAAGGGAPMADNNEGADGVGSSSGNWHCDSTWLGDRVITTSTRTWALPTYNNHLYKQISNGTSGGATNDNTYFGYSTPWGYFDFNRFHCHFSPRDWQRLINNNWGFRPKRLSFKLFNIQVKEVTQNEGTKTIANNLTSTIQVFTDSEYQLPYVLGSAHQGCLPPFPADVFTIPQYGYLTLNNGSQAVGRSSFYCLEYFPSQMLRTGNNFQFTYTFEDVPFHSSYAHSQSLDRLMNPLIDQYLYYLSRIQTTGGTANTQTLGFSQGGPNTMANQAKNWLPGPCYRQQRVSTTTGQNNNSNFAWTAGTKYHLNGRNSLANPGIAMATHKDDEERFFPSNGILIFGKQNAARDNADYSDVMPTSEEEIKTTNPVATEEYGIVADNLQQQNTAPQIGTVNSQGALPGMVWQNRDVYLQGPIWAKIPHADGNFHPSPLMGGFGLKHPPPQILIKNTPVPADPPTTFNQSKLNSFITQYSTGQVSVEIEWELQKENSKRWNPEIQYTSNYYKSTSVDFAVNTEGVYSEPRPIGTRYLTRNL

SEQ ID NO: 2989 - protein, 738 aa, Artificial Sequence
  Description of Artificial Sequence: Synthetic polypeptide
MAADGYLPDWLEDNLSEGIREWWALKPGAPKPKANQQKQDDGRGLVLPGYKYLGPFNGLDKGEPVNAADAAALEHDKAYDQQLQAGDNPYLRYNHADAEFQERLQEDTSFGGNLGRAVFQAKKRVLEPLGLVEEGAKTAPGKKRPVEPSPQRSPDSSTGIGKKGQQPARKRLNFGQTGDSESVPDPQPLGEPPAAPSGVGPNTMAAGGGAPMADNNEGADGVGSSSGNWHCNSTWLGDRVITTSTRTWALPTYNNHLYKQISNGTSGGATNDNTYFGYSTPWGYFDFNRFHCHFSPRDWQRLINNNWGFRPKRLSFKLFNIQVKEVTQNEGTKTIANNLTSTIQVFTDSEYQLPYVLGSAHQGCLPPFPADVFTIPQYGYLTLNNGSQAVGRSSFYCLEYFPSQMLRTGNNFQFTYTFEDVPFHSSYAHSQSLDRLMNPLIDQYLYYLSRIQTTGGTANTQTLGFSQGGPNTMANQAKNWLPGPCYRQQRVSTTTGQNNNSNFAWTAGTKYHLNGRNSLANPGIAMATHKDDEERFFPSNGILIFGKQNAARDNADYSDVMPTSEEEIKTTNPVATEEYGIVADNLQQQNTAPQIGTVNSQGALPGMVWQNRDVYLQGPIWAKIPHTDGNFHPSPLMGGFGLKHPPPQILIKNTPVPADPPTTFNQSKLNSFITQYSTGQVSVEIEWELQKENSKRWNPEIQYTSNYYKSTSVDFAVNTEGVYSEPRPIGTRYLTRNL

SEQ ID NO: 2990 - protein, 738 aa, Artificial Sequence
  Description of Artificial Sequence: Synthetic polypeptide
MAADGYLPDWLEDNLSEGIREWWALKPGAPKPKANQQKQDDGRGLVLPGYKYLGPFNGLDKGEPVNAADAAALEHDKAYDQQLQAGDNPYLRYNHADAEFQERLQEDTSFGGNLGRAVFQAKKRVLEPLGLVEEGAKTAPGKKRPVEPSPQRSPDSSTGIGKKGQQPARKRLNFGQTGDSESVPDPQPLGEPPAAPSGVGPNTMAAGGGAPMADNNEGADGVGSSSGNWHCDSTWLGDRVITTSTRTWALPTYNNHLYKQISNGTSGGATNDNTYFGYSTPWGYFDFNRFHCHFSPRDWQRLINNNWGFRPKRLSFKLFNIQVKEVTQNEGTKTIANNLTSTIQVFTDSEYQLPYVLGSAHQGCLPPFPADVFTIPQYGYLTLNNGSQAVGRSSFYCLEYFPSQMLRTGNNFQFTYTFEDVPFHSSYAHSQSLDRLMNPLIDQYLYYLSRIQTTGGTANTQTLGFSQGGPNTMANQAKNWLPGPCYRQQRVSTTTGQNNNSNFAWTAGTKYHLNGRNSLANPGIAMATHKDDEERFFPSNGILIFGKQNAARDNADYSDVMPTSEEEIKTTNPVATEEYGIVADNLQQQNTAPQIGTVNSQGALPGMVWQNRDVYLQGPIWAKIPHTDGNFHPSPLMGGFGLKHPPPQILIKNTPVPADPPTTFNQSKLNSFITQYSTGQVSVEIEWELQKENSKRWNPEIQYTSNYYKSTSVDFAVNTEGAYSEPRPIGTRYLTRNL

SEQ ID NO: 2991 - protein, 738 aa, Artificial Sequence
  Description of Artificial Sequence: Synthetic polypeptide
MAADGYLPDWLEDNLSEGIREWWALKPGAPKPKANQQKQDDGRGLVLPGYKYLGPFNGLDKGEPVNAADAAALEHDKAYDQQLQAGDNPYLRYNHADAEFQERLQEDTSFGGNLGRAVFQAKKRVLEPLGLVEEGAKTAPGKKRPVEPSPQRSPDSSTGIGKKGQQPARKRLNFGQTGDSESVPDPQPLGEPPAAPSGVGPNTMAAGGGAPMADNNEGADGVGSSSGNWHCDSTWLGDRVITTSTRTWALPTYNNHLYKQISNGTSGGATNDNTYFGYSTPWGYFDFNRFHCHFSPRDWQRLINNNWGFRPKRLSFKLFNIQVKEVTQNEGTKTIANNLTSTIQVFTDSEYQLPYVLGSAHQGCLPPFPADVFTIPQYGYLTLNNGSQAVGRSSFYCLEYFPSQMLRTGNNFQFTYTFEDVPFHSSYAHSQSLDRLMNPLIDQYLYYLSRIQTTGGTANTQTLGFSQGGPNTMANQAKNWLPGPCYRQQRVSTTTGQNNNSNFAWTAGTKYHLNGRNSLANPGIAMATHKDDEERFFPSNGILIFGKQNAARDNADYSDVMPTSEEEIKTTNPVATEECGIVADNLQQQNTAPQIGTVNSQGALPGMVWQNRDVYLQGPIWAKIPHTDGNFHPSPLMGGFGLKHPPPQILIKNTPVPADPPTTFNQSKLNSFITQYSTGQVSVEIEWELQKENSKRWNPEIQYTSNYYKSTSVDFAVNTEGVYSEPRPIGTRYLTRNL

SEQ ID NO: 2992 - protein, 738 aa, Artificial Sequence
  Description of Artificial Sequence: Synthetic polypeptide
MAADGYLPDWLEDNLSEGIREWWALKPGAPKPKANQQKQDDGRGLVLPGYKYLGPFNGLDKGEPVNAADAAALEHDKAYDQQLQAGDNPYLRYNHADAEFQERLQEDTSFGGNLGRAVFQAKKRVLEPLGLVEEGAKTAPGKKRPVEPSPQRSPDSSTGIGKKGQQPARKRLNFGQTGDSESVPDPQPLGEPPAAPSGVGPNTMAAGGGAPMADNNEGADGVGSSSGNWHCDSTWLGDRVITTSTRTWALPTYNNHLYKQISNGTSGGATNDNTYFGYSTPWGYFDFNRFHCHFSPRDWQRLINNNWGFRPKRLSFKLFNIQVKEVTQNEGTKTIANNLTSTIQVFTDSEYQLPYVLGSAHQGCLPPFPADVFTIPQYGYLTLNNGSQAVGRSSFYCLEYFPSQMLRTGNNFQFTYTFEDVPFHSSYAHSQSLDRLMNPLIDQYLYYLSRIQTTGGTANTQTLGFSQGGPNTMANQAKNWLPGPCYRQQRVSTTTGQNNNSNFAWTAGTKYHLNGRNSLANPGIAMATHKDDEERFFPSNGILIFGKQNAARDNADYSDVMPTSEEEIKTTNPVATEEYGIVADNLQQQNTAPQIGTVNSQGALPGMVWQNRDVYLQGPIWAKIPHTDGNFHPSPLMGGFGLKHPPPQILIKNTPVPADPPTTFNQSKLNSFITQYSTGQVSVEIEWELQKENSKRWNPEIRYTSNYYKSTSVDFAVNTEGVYSEPRPIGTRYLTRNL

SEQ ID NO: 2993 - protein, 738 aa, Artificial Sequence
  Description of Artificial Sequence: Synthetic polypeptide
MAADGYLPDWLEDNLSEGIREWWALKPGAPKPKANQQKQDDGRGLVLPGYKYLGPFNGLDKGEPVNAADAAALEHDKAYDQQLQAGDNPYLRYNHADAEFQERLQEDTSFGGNLGRAVFQAKKRVLEPLGLVEEGAKTAPGKKRPVEPSPQRSPDSSTGIGKKGQQPARKRLNFGQTGDSESVPDPQPLGEPPAAPSGVGPNTMAAGGGAPMADNNEGADGVGSSSGNWHCDSTWLGDRVITTSTRTWALPTYNNHLYKQISNGTSGGATNDNTYFGYSTPWGYFDFNRFHCHFSPRDWQRLINNNWGFRPKRLSFKLFNIQVKEVTQNEGTKTIANNLTSTIQVFTDSEYQLPYVLGSAHQGCLPPFPADVFTIPQYGYLTLNNGSQAVGRSSFYCLEYFPSQMLRTGNNFQFTYTFEDVPFHSSYAHSQSLDRLMNPLIDQYLYYLSRIQTTGGTANTQTLGFSQGGPNTMANQAKNWLPGPCYRQQRVSTTTGQNNNSNFAWTAGTKYHLNGRNSLANPGIAMATHKDDEERFFPSNGILIFGKQNAARDNADCSDVMPTSEEEIKTTNPVATEEYGIVADNLQQQNTAPQIGTVNSQGALPGMVWQNRDVYLQGPIWAKIPHTDGNFHPSPLMGGFGLKHPPPQILIKNTPVPADPPTTFNQSKLNSFITQYSTGQVSVEIEWELQKENSKRWNPEIQYTSNYYKSTSVDFAVNTEGVYSEPRPIGTRYLTRNL

SEQ ID NO: 2994 - protein, 738 aa, Artificial Sequence
  Description of Artificial Sequence: Synthetic polypeptide
MAADGYLPDWLEDNLSEGIREWWALKPGAPKPKANQQKQDDGRGLVLPGYKYLGPFNGLDKGEPVNAADAAALEHDKAYDQQLQAGDNPYLRYNHADAEFQERLQEDTSFGGNLGRAVFQAKKRVLEPLGLVEEGAKTAPGKKRPVEPSPQRSPDSSTGIGKKGQQPARKRLNFGQTGDSESVPDPQPLGEPPAAPSGVGPNTMAAGGGAPMADNNEGADGVGSSSGNWHCDSTWLGDRVITTSTRTWALPTYNNHLYKQISNGTSGGATNDNTYFGYSTPWGYFDFNRFHCHFSPRDWQRLINNNWGFRPKRLSFKLFNIQVKEVTQNEGTKTIANNLTSTIQVFTDSEYQLPYVLGSAHQGCLPPFPADVFTIPQYGYLTLNNGSQAVGRSSFYCLEYFPSQMLRTGNNFQFTYTFEDVPFHSSYAHSQSLDRLMNPLIDQYLYYLSRIQTTGGTANTQTLGFSQGGPNTMANQAKNWLPGPCYRQQRVSTTTGQNNNSNFAWTAGTKYHLNGRNSLANPGIAMATHKDDEERFFPSNGILIFGKQNAARDNADYSDVMPTSEEEIKTTNPVATEEYGIAADNLQQQNTAPQIGTVNSQGALPGMVWQNRDVYLQGPIWAKIPHTDGNFHPSPLMGGFGLKHPPPQILIKNTPVPADPPTTFNQSKLNSFITQYSTGQVSVEIEWELQKENSKRWNPEIQYTSNYYKSTSVDFAVNTEGVYSEPRPIGTRYLTRNL

SEQ ID NO: 2995 - protein, 738 aa, Artificial Sequence
  Description of Artificial Sequence: Synthetic polypeptide
MAADGYLPDWLEDNLSEGIREWWALKPGAPKPKANQQKQDDGRGLVLPGYKYLGPFNGLDKGEPVNAADAAALEHDKAYDQQLQAGDNPYLRYNHADAEFQERLQEDTSFGGNLGRAVFQAKKRVLEPLGLVEEGAKTAPGKKRPVEPSPQRSPDSSTGIGKKGQQPARKRLNFGQTGDSESVPDPQPLGEPPAAPSGVGPNTMAAGGGAPMADNNEGADGVGSSSGNWHCDSTWLGDRVITTSTRTWALPTYNNHLYKQISNGTSGGATNDNTYFGYSTPWGYFDFNRFHCHFSPRDWQRLINNNWGFRPKRLSFKLFNIQVKEVTQNEGTKTIANNLTSTIQVFTDSEYQLPYVLGSAHQGCLPPFPADVFTIPQYGYLTLNNGSQAVGRSSFYCLEYFPSQMLRTGNNFQFTYTFEDVPFHSSYAHSQSLDRLMNPLIDQYLYYLSRIQTTGGTANTQTLGFSQGGPNTMANQAKNWLPGPCYRQQRVSTTTGQNNNSNFAWTAGTKYHLNGRNSLANPGIAMATHKDDEERFFPSNGILIFGKQNAARDNADYSDVMPTSEEEIKTTNPVATEEYGIVADNLQQQNTAPQIGTVNSQGALPGMIWQNRDVYLQGPIWAKIPHTDGNFHPSPLMGGFGLKHPPPQILIKNTPVPADPPTTFNQSKLNSFITQYSTGQVSVEIEWELQKENSKRWNPEIQYTSNYYKSTSVDFAVNTEGVYSEPRPIGTRYLTRNL

SEQ ID NO: 2996 - protein, 738 aa, Artificial Sequence
  Description of Artificial Sequence: Synthetic polypeptide
MAADGYLPDWLEDNLSEGIREWWALKPGAPKPKANQQKQDDGRGLVLPGYKYLGPFNGLDKGEPVNAADAAALEHDKAYDQRLQAGDNPYLRYNHADAEFQERLQEDTSFGGNLGRAVFQAKKRVLEPLGLVEEGAKTAPGKKRPVEPSPQRSPDSSTGIGKKGQQPARKRLNFGQTGDSESVPDPQPLGEPPAAPSGVGPNTMAAGGGAPMADNNEGADGVGSSSGNWHCDSTWLGDRVITTSTRTWALPTYNNHLYKQISNGTSGGATNDNTYFGYSTPWGYFDFNRFHCHFSPRDWQRLINNNWGFRPKRLSFKLFNIQVKEVTQNEGTKTIANNLTSTIQVFTDSEYQLPYVLGSAHQGCLPPFPADVFTIPQYGYLTLNNGSQAVGRSSFYCLEYFPSQMLRTGNNFQFTYTFEDVPFHSSYAHSQSLDRLMNPLIDQYLYYLSRIQTTGGTANTQTLGFSQGGPNTMANQAKNWLPGPCYRQQRVSTTTGQNNNSNFAWTAGTKYHLNGRNSLANPGIAMATHKDDEERFFPSNGILIFGKQNAARDNADYSDVMPTSEEEIKTTNPVATEEYGIVADNLQQQNTAPQIGTVNSQGALPGMVWQNRDVYLQGPIWAKIPHTDGNFHPSPLMGGFGLKHPPPQILIKNTPVPADPPTTFNQSKLNSFITQYSTGQVSVEIEWELQKENSKRWNPEIQYTSNYYKSTSVDFAVNTEGVYSEPRPIGTRYLTRNL

SEQ ID NO: 2997 - protein, 738 aa, Artificial Sequence
  Description of Artificial Sequence: Synthetic polypeptide
MAADGYLPDWLEDNLSEGIREWWALKPGAPKPKANQQKQDDGRGLVLPGYKYLGPFNGLDKGEPVNAADAAALEHDKAYDQQLQAGDNPYLRYNHADAEFQERLQEDTSFGGNLGRAVFQAKKRVLEPLGLVEEGAKTAPGKKRPVEPSPQRSPDSSTGIGKKGQQPARKRLNFGQTGDSESVPDPQPLGEPPAAPSGVGPNTMAAGGGAPMADNNEGADGVGSSSGNWHCDSTWLGDRVITTSTRTWALPTYNNHLYKQISNGTSGGATNDNTYFGYSTPWGYFDFNRFHCHFSPRDWQRLINNNWGFRPKRLSFKLFNIQVKEVTQNEGTKTIANNLTSTIQVFTDSEYQLPYVLGSAHQGCLPPFPADVFTIPQYGYLTLNNGSQAVGRSSFYCLEYFPSQMLRTGNNFQFTYTFEDVPFHSSYAHSQSLDRLMNPLIDQYLYYLSRIQTTGGTANTQTLGFSQGGPNTMANQAKNWLPGPCYRQQRVSTTTGQNNNSNFAWTAGTKYHLNGRNSLANPGIAMATHKDDEERFFPSNGILIFGKQNAARDNADYSDVMPTSEEEIKTTNPVATEEYGIVADNLQQQNTAPQIGTVNGQGALPGMVWQNRDVYLQGPIWAKIPHTDGNFHPSPLMGGFGLKHPPPQILIKNTPVPADPPTTFNQSKLNSFITQYSTGQVSVEIEWELQKENSKRWNPEIQYTSNYYKSTSVDFAVNTEGVYSEPRPIGTRYLTRNL

SEQ ID NO: 2998 - protein, 738 aa, Artificial Sequence
  Description of Artificial Sequence: Synthetic polypeptide
MAADGYLPDWLEDNLSEGIREWWALKPGAPKPKANQQKQDDGRGLVLPGYKYLGPFNGLDKGEPVNAADAAALEHDKAYDQQLQAGDNPYLRYNHADAEFQERLQEDTSFGGNLGRAVFQAKKRVLEPLGLVEEGAKTAPGKKRPVEPSPQRSPDSSTGIGKKGQQPARKRLNFGQTGDSESVPDPQPLGEPPAAPSGVGPNTMAAGGGAPMADNNEGADGVGSSSGNWHCDSTWLGDRVITTSTRTWALPTYNNHLYKQISNGTSGGATNDNTYFGYSTPWGYFDFNRFHCHFSPRDWQRLINNNWGFRPKRLSFKLFNIQVKEVTQNEGTKTIANNLTSTIQVFTDSEYQLPYVLGSAHQGCLPPFPADVFTIPQYGYLTLNNGSQAVGRSSFYCLEYFPSQMLRTGNNFQFTYTFEDVPFHSSYAHSQSLDRLMNPLIDQYLYYLSRIQTTGGTANTQTLGFSQGGPNTMANQAKNWLPGPCYRQQRVSTTTGQNNNSNFAWTAGTKYHLNGRNSLANPGIAMATHKDDEECFFPSNGILIFGKQNAARDNADYSDVMPTSEEEIKTTNPVATEEYGIVADNLQQQNTAPQIGTVNSQGALPGMVWQNRDVYLQGPIWAKIPHTDGNFHPSPLMGGFGLKHPPPQILIKNTPVPADPPTTFNQSKLNSFITQYSTGQVSVEIEWELQKENSKRWNPEIQYTSNYYKSTSVDFAVNTEGVYSEPRPIGTRYLTRNL

SEQ ID NO: 2999 - protein, 738 aa, Artificial Sequence
  Description of Artificial Sequence: Synthetic polypeptide
MAADGYLPDWLEDNLSEGIREWWALKPGAPKPKANQQKQDDGRGLVLPGYKYLGPFNGLDKGEPVNAADAAALEHDKAYDQQLQAGDNPYLRYNHADAEFQERLQEDTSFGGNLGRAVFQAKKRVLEPLGLVEEGAKTAPGKKRPVEPSPQRSPDSSTGIGKKGQQPARKRLNFGQTGDSESVPDPQPLGEPPAAPSGVGPNTMAAGGGAPMADNNEGADGVGSSSGNWHCDSTWLGDRVITTSTRTWALPTYNNHLYKQISNGTSGGATNDNTYFGYSTPWGYFDFNRFHCHFSPRDWQRLINNNWGFRPKRLSFKLFNIQVKEVTQNEGTKTIANNLTSTIQVFTDSEYQLPYVLGSAHQGCLPPFPADVFTIPQYGYLTLNNGSQAVGRSSFYCLEYFPSQMLRTGNNFQFTYTFEDVPFHSSYAHSQSLDRLMNPLIDQYLYYLSRIQTTGGTANTQTLGFSQGGPNTMANQAKNWLPGPCYRQQRVSTTTGQNNNSNFAWTAGTKYHLNGRNSLANPGIAMATHKDDEERFFPSNGILIFGKQNAARDNADYSDVMPTSEEEIKTTNPVATEEYGIVADNLQQQNTAPQIGTVNSQGALPGMVWQNRDAYLQGPIWAKIPHTDGNFHPSPLMGGFGLKHPPPQILIKNTPVPADPPTTFNQSKLNSFITQYSTGQVSVEIEWELQKENSKRWNPEIQYTSNYYKSTSVDFAVNTEGVYSEPRPIGTRYLTRNL

SEQ ID NO: 3000 - protein, 738 aa, Artificial Sequence
  Description of Artificial Sequence: Synthetic polypeptide
MAADGYLPDWLEDNLSEGIREWWALKPGAPKPKANQQKQDDGRGLVLPGYKYLGPFNGLDKGEPVNAADAAALEHDKAYDQQLQAGDNPYLRYNHADAEFQERLQEDTSFGGNLGRAVFQAKKRVLEPLGLVEEGAKTAPGKKRPVEPSPQRSPDSSTGIGKKGQQPARKRLNFGQTGDSESVPDPQPLGEPPAAPSGVGPNTMAAGGGAPMADNNEGADGVGSSSGNWHCDSTWLGDRVITTSTRTWALPTYNNHLYKQISNGTSGGATNDNTYFGYSTPWGYFDFNRFHCHFSPRDWQRLINNNWGFRPKRLSFKLFNIQVKEVTQNEGTKTIANNLTSTIQVFTDSEYQLPYVLGSAHQGCLPPFPADVFTIPQYGYLTLNNGSQAAGRSSFYCLEYFPSQMLRTGNNFQFTYTFEDVPFHSSYAHSQSLDRLMNPLIDQYLYYLSRIQTTGGTANTQTLGFSQGGPNTMANQAKNWLPGPCYRQQRVSTTTGQNNNSNFAWTAGTKYHLNGRNSLANPGIAMATHKDDEERFFPSNGILIFGKQNAARDNADYSDVMPTSEEEIKTTNPVATEEYGIVADNLQQQNTAPQIGTVNSQGALPGMVWQNRDVYLQGPIWAKIPHTDGNFHPSPLMGGFGLKHPPPQILIKNTPVPADPPTTFNQSKLNSFITQYSTGQVSVEIEWELQKENSKRWNPEIQYTSNYYKSTSVDFAVNTEGVYSEPRPIGTRYLTRNL

SEQ ID NO: 3001 - protein, 738 aa, Artificial Sequence
  Description of Artificial Sequence: Synthetic polypeptide
MAADGYLPDWLEDNLSEGIREWWALKPGAPKPKANQQKQDDGRGLVLPGYKYLGPFNGLDKGEPVNAADAAALEHDKAYDQQLQAGDNPYLRYNHADAEFQERLQEDTSFGGNLGRAVFQAKKRVLEPLGLVEEGAKTAPGKKRPVEPSPQRSPDSSTGIGKKGQQPARKRLNFGQTGDSESVPDPQPLGEPPAAPSGVGPNTMAAGGGAPMADNNEGADGVGSSSGNWHCDSTWLGDRVITTSTRTWALPTYNNHLYKQISNGTSGGATNDNTYFGYSTPWGYFDFNRFHCHFSPRDWQRLINNNWGFRPKRLSFKLFNIQVKEVTQNEGTKTIANNLTSTIQVFTDSEYQLPYVLGSAHQGCLPPFPADVFTIPQYGYLTLNNGSQAVGRSSFYCLEYFPSQMLRTGNNFQFTYTFEDVPFHSSYAHSQSLDRLMNPLIDQYLYYLSRIQTTGGTANTQTLGFSQGGPNTMANQAKNWLPGPCYRQQRVSTTTGQNNNSNFAWTAGTKYHLNGRNSLANPGIAMATHKDDEERFFPSNGILIFGKQNAARDNADYSDVMPTSEEEIKTTNPVATEEYGIVADNLQQQNTAPQIGTVNSQGALPGMVWQNRDVYLQGPIWAKIPHTDGNFHPSPLMGGFGLKHPPPQILIKNTPVPADPPTTFNQSKLNSFITQYSTGQVSVEIEWELQKENSKRWNPEIQYTSNYYKSTSVDLAVNTEGVYSEPRPIGTRYLTRNL

SEQ ID NO: 3002 - protein, 738 aa, Artificial Sequence
  Description of Artificial Sequence: Synthetic polypeptide
MAADGYLPDWLEDNLSEGIREWWALKPGAPKPKANQQKQDDGRGLVLPGYKYLGPFNGLDKGEPVNAADAAALEHDKAYDQQLQAGDNPYLRYNHADAEFQERLQEDTSFGGNLGRAVFQAKKRVLEPLGLVEEGAKTAPGKKRPVEPSPQRSPDSSTGIGKKGQQPARKRLNFGQTGDSESVPDPQPLGEPPAAPSGVGPNTMAAGGGAPMADNNEGADGVGSSSGNWHCDSTWLGDRVITTSTRTWALPTYNNHLYKQISNGTSGGATNDNTYFGYSTPWGYFDFNRFHCHFSPRDWQRLINNNWGFRPKRLSFKLFNIQVKEVTQNEGTKTIANNLTSTIQVFTDSEYQLPYVLGSAHQGCLPPFPADVFTIPQYGYLTLNNGSQAVGRSSFYCLEYFPSQMLRTGNNFQFTYTFEDVPFHSSYAHSQSLDRLMNPLIDQYLYYLSRIQTTGGTANTQTLGFSQGGPNTMANQAKNWLPGPCYRQQRVSTTTGQNNNSNFAWTAGTKYHLNGRNSLANPGIAMATHKDDEERFFPSNGILIFGKQNAARDNADYSDVMPTSEEEIKTTNPVATEEYGIVADNLQQQNTAPQIGTVNSQGALPGMVWQNRDVYLQGPIWAKIPHTDGNFHPSPLMGGFGLKHPPPQILIKNTPVPADPPTTFNQSKLNSFITQYSTGQVSVEIEWEPQKENSKRWNPEIQYTSNYYKSTSVDFAVNTEGVYSEPRPIGTRYLTRNL

SEQ ID NO: 3003 - protein, 738 aa, Artificial Sequence
  Description of Artificial Sequence: Synthetic polypeptide
MAADGYLPDWLEDNLSEGIREWWALKPGAPKPKANQQKQDDGRGLVLPGYKYLGPFNGLDKGEPVNAADAAALEHDKAYDQQLQAGDNPYLRYNHADAEFQERLQEDTSFGGNLGRAVFQAKKRVLEPLGLVEEGAKTAPGKKRPVEPSPQRSPDSSTGIGKKGQQPARKRLNFGQTGDSESVPDPQPLGEPPAAPSGVGPNTMAAGGGAPMADNNEGADGVGSSSGNWHCDSTWLGDRVITTSTRTWALPTYNNHLYKQISNGTSGGATNDNTYFGYSTPWGYFDFNRFHCHFSPRDWQRPINNNWGFRPKRLSFKLFNIQVKEVTQNEGTKTIANNLTSTIQVFTDSEYQLPYVLGSAHQGCLPPFPADVFTIPQYGYLTLNNGSQAVGRSSFYCLEYFPSQMLRTGNNFQFTYTFEDVPFHSSYAHSQSLDRLMNPLIDQYLYYLSRIQTTGGTANTQTLGFSQGGPNTMANQAKNWLPGPCYRQQRVSTTTGQNNNSNFAWTAGTKYHLNGRNSLANPGIAMATHKDDEERFFPSNGILIFGKQNAARDNADYSDVMPTSEEEIKTTNPVATEEYGIVADNLQQQNTAPQIGTVNSQGALPGMVWQNRDVYLQGPIWAKIPHTDGNFHPSPLMGGFGLKHPPPQILIKNTPVPADPPTTFNQSKLNSFITQYSTGQVSVEIEWELQKENSKRWNPEIQYTSNYYKSTSVDFAVNTEGVYSEPRPIGTRYLTRNL

SEQ ID NO: 3004 - protein, 738 aa, Artificial Sequence
  Description of Artificial Sequence: Synthetic polypeptide
MAADGYLPDWLEDNLSEGIREWWALKPGAPKPKANQQKQDDGRGLVLPGYKYLGPFNGLDKGEPVNAADAAALEHDKAYDQQLQAGDNPYLRYNHADAEFQERLQEDTSFGGNLGRAVFQAKKRVLEPLGLVEEGAKTAPGKKRPVEPSPQRSPDSSTGIGKKGQQPARKRLNFGQTGDSESVPDPQPLGEPPAAPSGVGPNTMAAGGGAPMADNNEGADGVGSSSGNWHCDSTWLGDRVITTSTRTWALPTYNNHLYKQISNGTSGGATNDNTYFGYSTPWGYFDFNRFHCHFSPRDWQRLINNNWGFRPKRLSFKLFNIQVKEVTQNEGTKTIANNLTSTIQVFTDSEYQLPYVLGSAHQGCLPPFPADVFTIPQYGYLTLNNGSQAVGRSSFYCLEYFPSQMLRTGNNFQFTYTFEDVPFHSSYAHSQSLDRLMNPLIDQYLYYLSRIQTTGGTANTQTLGFSQGGPNTMANQAKNWLPGPCYRQQRVSTTTGQNNNSNFAWTAGTKYHLNGRNSLANPGIAMATHKDDEERFFPSNGILIFGKQNAARDNADYSDVMPTSEEEIKTTNPAATEEYGIVADNLQQQNTAPQIGTVNSQGALPGMVWQNRDVYLQGPIWAKIPHTDGNFHPSPLMGGFGLKHPPPQILIKNTPVPADPPTTFNQSKLNSFITQYSTGQVSVEIEWELQKENSKRWNPEIQYTSNYYKSTSVDFAVNTEGVYSEPRPIGTRYLTRNL

SEQ ID NO: 3005 - protein, 738 aa, Artificial Sequence
  Description of Artificial Sequence: Synthetic polypeptide
MAADGYLPDWLEDNLSEGIREWWALKPGAPKPKANQQKQDDGRGLVLPGYKYLGPFNGLDKGEPVNAADAAALEHDKAYDQQLQAGDNPYLRYNHADAEFQERLQEDTSFGGNLGRAVFQAKKRVLEPLGLVEEGAKTAPGKKRPVEPSPQRSPDSSTGIGKKGQQPARKRLNFGQTGDSESVPDPQPLGEPPAAPSGVGPNTMAAGGGAPMADNNEGADGVGSSSGNWHCDSTWLGDRVITTSTRTWALPTYNNHLYKQISNGTSGGATNDNTYFGYSTPWGYFDFNRFHCHFSPRDWQRLINNNWGFRPKRLSFKLFNIQVKEVTQNEGTKTIANNLTSTIQVFTDSEYQLPYVLGSAHQGCLPPFPADVFTIPQYDYLTLNNGSQAVGRSSFYCLEYFPSQMLRTGNNFQFTYTFEDVPFHSSYAHSQSLDRLMNPLIDQYLYYLSRIQTTGGTANTQTLGFSQGGPNTMANQAKNWLPGPCYRQQRVSTTTGQNNNSNFAWTAGTKYHLNGRNSLANPGIAMATHKDDEERFFPSNGILIFGKQNAARDNADYSDVMPTSEEEIKTTNPVATEEYGIVADNLQQQNTAPQIGTVNSQGALPGMVWQNRDVYLQGPIWAKIPHTDGNFHPSPLMGGFGLKHPPPQILIKNTPVPADPPTTFNQSKLNSFITQYSTGQVSVEIEWELQKENSKRWNPEIQYTSNYYKSTSVDFAVNTEGVYSEPRPIGTRYLTRNL

SEQ ID NO: 3006 - protein, 738 aa, Artificial Sequence
  Description of Artificial Sequence: Synthetic polypeptide
MAADGYLPDWLEDNLSEGIREWWALKPGAPKPKANQQKQDDGRGLVLPGYKYLGPFNGLDKGEPVNAADAAALEHDKAYDQQLQAGDNPYLRYNHADAEFQERLQEDTSFGGNLGRAVFQAKKRVLEPLGLVEEGAKTAPGKKRPVEPSPQRSPDSSTGIGKKGQQPARKRLNFGQTGDSGSVPDPQPLGEPPAAPSGVGPNTMAAGGGAPMADNNEGADGVGSSSGNWHCDSTWLGDRVITTSTRTWALPTYNNHLYKQISNGTSGGATNDNTYFGYSTPWGYFDFNRFHCHFSPRDWQRLINNNWGFRPKRLSFKLFNIQVKEVTQNEGTKTIANNLTSTIQVFTDSEYQLPYVLGSAHQGCLPPFPADVFTIPQYGYLTLNNGSQAVGRSSFYCLEYFPSQMLRTGNNFQFTYTFEDVPFHSSYAHSQSLDRLMNPLIDQYLYYLSRIQTTGGTANTQTLGFSQGGPNTMANQAKNWLPGPCYRQQRVSTTTGQNNNSNFAWTAGTKYHLNGRNSLANPGIAMATHKDDEERFFPSNGILIFGKQNAARDNADYSDVMPTSEEEIKTTNPVATEEYGIVADNLQQQNTAPQIGTVNSQGALPGMVWQNRDVYLQGPIWAKIPHTDGNFHPSPLMGGFGLKHPPPQILIKNTPVPADPPTTFNQSKLNSFITQYSTGQVSVEIEWELQKENSKRWNPEIQYTSNYYKSTSVDFAVNTEGVYSEPRPIGTRYLTRNL

SEQ ID NO: 3007 - protein, 738 aa, Artificial Sequence
  Description of Artificial Sequence: Synthetic polypeptide
MAADGYLPDWLEDNLSEGIREWWALKPGAPKPKANQQKQDDGRGLVLPGYKYLGPFNGLDKGEPVNAADAAALEHDKAYDQQLQAGDNPYLRYNHADAEFQERLQEDTSFGGNLGRAVFQAKKRVLEPLGLVEEGAKTAPGKKRPVEPSPQRSPDSSTGIGKKGQQPARKRLNFGQTGDSESVPDPQPLGEPPAAPSGVGPNTMAAGGGAPMADNNEGADGVGSSSGNWHCDSTWLGDRVITTSTRTWALPTYNNHLYKQISNGTSGGATNDNTYFGYSTPWGYFDFNRFHCHFSPRDWQRLINNNWGFRPKRLSFKLFNIQVKEVTQNEGTKAIANNLTSTIQVFTDSEYQLPYVLGSAHQGCLPPFPADVFTIPQYGYLTLNNGSQAVGRSSFYCLEYFPSQMLRTGNNFQFTYTFEDVPFHSSYAHSQSLDRLMNPLIDQYLYYLSRIQTTGGTANTQTLGFSQGGPNTMANQAKNWLPGPCYRQQRVSTTTGQNNNSNFAWTAGTKYHLNGRNSLANPGIAMATHKDDEERFFPSNGILIFGKQNAARDNADYSDVMPTSEEEIKTTNPVATEEYGIVADNLQQQNTAPQIGTVNSQGALPGMVWQNRDVYLQGPIWAKIPHTDGNFHPSPLMGGFGLKHPPPQILIKNTPVPADPPTTFNQSKLNSFITQYSTGQVSVEIEWELQKENSKRWNPEIQYTSNYYKSTSVDFAVNTEGVYSEPRPIGTRYLTRNL

SEQ ID NO: 3008 - protein, 738 aa, Artificial Sequence
  Description of Artificial Sequence: Synthetic polypeptide
MAADGYLPDWLEDNLSEGIREWWALKPGAPKPKANQQKQDDGRGPVLPGYKYLGPFNGLDKGEPVNAADAAALEHDKAYDQQLQAGDNPYLRYNHADAEFQERLQEDTSFGGNLGRAVFQAKKRVLEPLGLVEEGAKTAPGKKRPVEPSPQRSPDSSTGIGKKGQQPARKRLNFGQTGDSESVPDPQPLGEPPAAPSGVGPNTMAAGGGAPMADNNEGADGVGSSSGNWHCDSTWLGDRVITTSTRTWALPTYNNHLYKQISNGTSGGATNDNTYFGYSTPWGYFDFNRFHCHFSPRDWQRLINNNWGFRPKRLSFKLFNIQVKEVTQNEGTKTIANNLTSTIQVFTDSEYQLPYVLGSAHQGCLPPFPADVFTIPQYGYLTLNNGSQAVGRSSFYCLEYFPSQMLRTGNNFQFTYTFEDVPFHSSYAHSQSLDRLMNPLIDQYLYYLSRIQTTGGTANTQTLGFSQGGPNTMANQAKNWLPGPCYRQQRVSTTTGQNNNSNFAWTAGTKYHLNGRNSLANPGIAMATHKDDEERFFPSNGILIFGKQNAARDNADYSDVMPTSEEEIKTTNPVATEEYGIVADNLQQQNTAPQIGTVNSQGALPGMVWQNRDVYLQGPIWAKIPHTDGNFHPSPLMGGFGLKHPPPQILIKNTPVPADPPTTFNQSKLNSFITQYSTGQVSVEIEWELQKENSKRWNPEIQYTSNYYKSTSVDFAVNTEGVYSEPRPIGTRYLTRNL

SEQ ID NO: 3009 - protein, 738 aa, Artificial Sequence
  Description of Artificial Sequence: Synthetic polypeptide
MAADGYLPDWLEDNLSEGIREWWALKPGAPKPKANQQKQDDGRGLVLPGYKYLGPFNGLDKGEPVNAADAAALEHDKAYDQQLQAGDNPYLRYNHADAEFQERLQEDTSFGGNLGRAVFQAKKRVLEPLGLVEEGAKTAPGKKRPVEPSPQRSPDSSTGIGKKGQQPARKRLNFGQTGDSESVPDPQPLGEPPAAPSGVGPNTMAAGGGAPMADNNEGADGVGSSSGNWHCDSTWLGDRVITTSTRTWALPTYNNHLYKQISNGTSGGATNDNTYFGYSTPWGYFDFNRFHCHFSPRDWQRLINNNWGFRPKRLSFKLFNIQVKEVTQNEGTKTIANNLTSTIQVFTDSEYQLPYVLGSAHQGCLPPFPADVFTIPQYGYLTLNNGSQAVGRSSFYCLEYFPSQMLRTGNNFQFTYTFEDVPFHSSYAHSQSLDRLMNPLIDQYLYYLSRIQTTGGTANTQTLGFSQGGPNTMANRAKNWLPGPCYRQQRVSTTTGQNNNSNFAWTAGTKYHLNGRNSLANPGIAMATHKDDEERFFPSNGILIFGKQNAARDNADYSDVMPTSEEEIKTTNPVATEEYGIVADNLQQQNTAPQIGTVNSQGALPGMVWQNRDVYLQGPIWAKIPHTDGNFHPSPLMGGFGLKHPPPQILIKNTPVPADPPTTFNQSKLNSFITQYSTGQVSVEIEWELQKENSKRWNPEIQYTSNYYKSTSVDFAVNTEGVYSEPRPIGTRYLTRNL

SEQ ID NO: 3010 - protein, 738 aa, Artificial Sequence
  Description of Artificial Sequence: Synthetic polypeptide
MAADGYLPDWLEDNLSEGIREWWALKPGAPKPKANQQKQDDGRGLVLPGYKYLGPFNGLDKGEPVNAADAAALEHDKAYDQQLQAGDNPYLRYNHADAEFQERLQEDTSFGGNLGRAVFQAKKRVLEPLGLVEEGAKTAPGKKRPVEPSPQRSPDSSTGIGKKGQQPARKRLNFGQTGDSESVPDPQPLGEPPAAPSGVGPNTMAAGGGAPMADNNEGADGVGSSSGNWHCDSTWLGDRVITTSTRTWALPTYNNHLYKQISNGTSGGATNDNTYFGYSTPWGYFDFNRFHCHFSPRDWQRLINNNWGFRPKRLSFKLFNIQVKEVTQNEGTKTIANNLTSTIQVFTDSEYQLPYVLGSAHQGCLPPFPADVFTIPQYGYLTLNNGSQAVGRSSFYCLEYFPSQMLRTGNNFQFTYTFEDVPFHSSYAHSQSLDRLMNPLIDQYLYYLSRIQTTGGTANTQTLGFSQGGPNTMANQAKNWLPGPCYRQQRVSTTTGQNNNSNFARTAGTKYHLNGRNSLANPGIAMATHKDDEERFFPSNGILIFGKQNAARDNADYSDVMPTSEEEIKTTNPVATEEYGIVADNLQQQNTAPQIGTVNSQGALPGMVWQNRDVYLQGPIWAKIPHTDGNFHPSPLMGGFGLKHPPPQILIKNTPVPADPPTTFNQSKLNSFITQYSTGQVSVEIEWELQKENSKRWNPEIQYTSNYYKSTSVDFAVNTEGVYSEPRPIGTRYLTRNL

SEQ ID NO: 3011 - protein, 738 aa, Artificial Sequence
  Description of Artificial Sequence: Synthetic polypeptide
MAADGYLPDWLEDNLSEGIREWWALKPGAPKPKANQQKQDDGRGLVLPGYKYLGPFNGLDKGEPVNAADAAALEHDKAYDQQLQAGDNPYLRYNHADAEFQERLQEDTSFGGNLGRAVFQAKKRVLEPLGLVEEGAKTAPGKKRPVEPSPQRSPDSSTGIGKKGQQPARKRLNFGQTGDSESVPDPQPLGEPPAAPSGVGPNTMAAGGGAPMADNNEGADGVGSSSGNWHCDSTWLGDRVITTSTRTWALPTYNNHLYKQISNGTSGGATNDNTYFGYSTPWGYFDFNRSHCHFSPRDWQRLINNNWGFRPKRLSFKLFNIQVKEVTQNEGTKTIANNLTSTIQVFTDSEYQLPYVLGSAHQGCLPPFPADVFTIPQYGYLTLNNGSQAVGRSSFYCLEYFPSQMLRTGNNFQFTYTFEDVPFHSSYAHSQSLDRLMNPLIDQYLYYLSRIQTTGGTANTQTLGFSQGGPNTMANQAKNWLPGPCYRQQRVSTTTGQNNNSNFAWTAGTKYHLNGRNSLANPGIAMATHKDDEERFFPSNGILIFGKQNAARDNADYSDVMPTSEEEIKTTNPVATEEYGIVADNLQQQNTAPQIGTVNSQGALPGMVWQNRDVYLQGPIWAKIPHTDGNFHPSPLMGGFGLKHPPPQILIKNTPVPADPPTTFNQSKLNSFITQYSTGQVSVEIEWELQKENSKRWNPEIQYTSNYYKSTSVDFAVNTEGVYSEPRPIGTRYLTRNL

SEQ ID NO: 3012 - protein, 738 aa, Artificial Sequence
  Description of Artificial Sequence: Synthetic polypeptide
MAADGYLPDWLEDNLSEGIREWWALKPGAPKPKANQQKQDDGRGLVLPGYKYLGPFNGLDKGEPVNAADAAALEHDKAYDQQLQAGDNPYLRYNHADAEFQERLQEDTSFGGNLGRAVFQAKKRVLEPLGLVEEGAKTAPGKKRPVEPSPQRSPDSSTGIGKKGQQPARKRLNFGQTGDSESVPDPQPLGEPPAAPSGVGPNTMAAGGGAPMADNNEGADGVGSSSGNWHCDSTWLGDRVITTSTRTWALPTYNNHLYKQISNGTSGGATNDNTYFGYSTPWGYFDFNRFHCHFSPRDWQRLINNNWGFRPKRLSFKLFNIQVKEVTQNEGTKTIANNLTSTIQVFTDSEYQLPYVLGSAHQGCLPPFPADVFTIPQYGYLTLNNGSQAVGRSSFYCLEYFPSQMLRTGNNFQFTYTFEDVPFHSSYAHSQSLDRLMNPLIDQYLYYLSRIQTTGGTANTQTLGFGQGGPNTMANQAKNWLPGPCYRQQRVSTTTGQNNNSNFAWTAGTKYHLNGRNSLANPGIAMATHKDDEERFFPSNGILIFGKQNAARDNADYSDVMPTSEEEIKTTNPVATEEYGIVADNLQQQNTAPQIGTVNSQGALPGMVWQNRDVYLQGPIWAKIPHTDGNFHPSPLMGGFGLKHPPPQILIKNTPVPADPPTTFNQSKLNSFITQYSTGQVSVEIEWELQKENSKRWNPEIQYTSNYYKSTSVDFAVNTEGVYSEPRPIGTRYLTRNL

SEQ ID NO: 3013 - protein, 738 aa, Artificial Sequence
  Description of Artificial Sequence: Synthetic polypeptide
MAADGYLPDWLEDNLSEGIREWWALKPGAPKPKANQQKQDDGRGLVLPGYKYLGPFNGLDKGEPVNAADAAALEHDKAYDQQLQAGDNPYLRYNHADAEFQERLQEDTSFGGNLGRAVFQAKKRVLEPLGLVEEGAKTAPGKKRPVEPSPQRSPDSSTGIGKKGQQPARKRLNFGQTGDSESVPDPQPLGEPPAAPSGVGPNTMAAGGGAPMADNNEGADGVGSSSGNWHCDSTWLGDRVITTSTRTWALPTYNNHLYKQISNGTSGGATNDNTYFGYSTPWGYFDFNRFHCHFSPRDWQRLINNNWGFRPKRLSFKLFNIQVKEVTQNEGTKTIANNLTSTIQVFTDSEYQLPYVLGSAHQGCLPPFPADVFTIPQYGYLTLNNGSQAVGRSSFYCLEYFPSQMLRTGNNFQFTYTFEDVPFHSSYAHSQSLDRLMNPLIDQYLYYLSRIQTTGGTANTQTLGFSQGGPNTMANQAKNWLPGPCYRQQRASTTTGQNNNSNFAWTAGTKYHLNGRNSLANPGIAMATHKDDEERFFPSNGILIFGKQNAARDNADYSDVMPTSEEEIKTTNPVATEEYGIVADNLQQQNTAPQIGTVNSQGALPGMVWQNRDVYLQGPIWAKIPHTDGNFHPSPLMGGFGLKHPPPQILIKNTPVPADPPTTFNQSKLNSFITQYSTGQVSVEIEWELQKENSKRWNPEIQYTSNYYKSTSVDFAVNTEGVYSEPRPIGTRYLTRNL

SEQ ID NO: 3014 - protein, 738 aa, Artificial Sequence
  Description of Artificial Sequence: Synthetic polypeptide
MAADGYLPDWLEDNLSEGIREWWALKPGAPKPKANQQKQDDGRGLVLPGYKYLGPFNGLDKGEPVNAADAAALEHDKAYDQQLQAGDNPYLRYNHADAEFQERLQEDTSFGGNLGRAVFQAKKRVLEPLGLVEEGAKTAPGKKRPVEPSPQRSPDSSTGIGKKGQQPARKRLNFGQTGDSESVPDPQPLGEPPAAPSGVGPNTMAAGGGAPMADNNEGADGVGSSSGNWHCDSTWLGDRVITTSTRTWALPTYNNHLYKQISNGTSGGATNDNTYFGYSTPWGYFDFNRFHCHFSPRDWQRLINNNWGFRPKRLSFKLFNIQVKEVTQNEGTKTIANNLTSTIQVFTDSEYQLPYVLGSAHQGCLPPFPADVFTIPQYGYLTLNNGSQAVGRSSFYCLEYFPSQMLRTGNNFQFTYTFEDVPFHSSYAHSQSLDRLMNPLIDQYLYYLSRIQTTGGTANTQTLGFSQGGPNTMANQAKNWLPGPCYRQQRVSTTTGQNNNSNFAWTAGTKYHLNGRNSLANPGIAMATHKDDEERFFPSNGILIFGKQNAARDNADYSDVIPTSEEEIKTTNPVATEEYGIVADNLQQQNTAPQIGTVNSQGALPGMVWQNRDVYLQGPIWAKIPHTDGNFHPSPLMGGFGLKHPPPQILIKNTPVPADPPTTFNQSKLNSFITQYSTGQVSVEIEWELQKENSKRWNPEIQYTSNYYKSTSVDFAVNTEGVYSEPRPIGTRYLTRNL

SEQ ID NO: 3015 - protein, 738 aa, Artificial Sequence
  Description of Artificial Sequence: Synthetic polypeptide
MAADGYLPDWLEDNLSEGIREWWALKPGAPKPKANQQKQDDGRGLVLPGYKYLGPFNGLDKGEPVNAADAAALEHDKAYDQQLQAGDNPYLRYNHADAEFQERLQEDTSFGGNLGRAVFQAKKRVLEPLGLVEEGAKTAPGKKRPVEPSPQRSPDSSTGIGKKGQQPARKRLNFGQTGDSESVPDPQPLGEPPAAPSGVGPNTMAAGGGAPMADNNEGADGVGSSSGNWHCDSTWLGDRVITTSTRTWALPTYNNHLYKQISNGTSGGATNDNTYFGYSTPWGYFDFNRFHCHFSPRDWQRLINNNWGFRPKRLSFKLFNIQVKEVTQNEGTKTIANNLTSTIQVFTDSEYQLPYVLGSAHQGCLPPFPADVFTIPQYGYLTLNNGSQAVGRSSFYCLEYFPSQMLRTGNNFQFTYTFEDVPFHSSYAHSQSLDRLMNPLIDQYLYYLSRIQTTGGTANTQTLGFSQGGPNTMANQAKNWLPGPCYRQQRVSTTTGQNNNSNFAWTAGTKYHLNGRNSLANPGIAMATHKDDEERFFPSNGILIFGKQNAARDNADYSDVMPTSEEEIKTTNPVATEEYGIVADNLQQQNTAPQIGTANSQGALPGMVWQNRDVYLQGPIWAKIPHTDGNFHPSPLMGGFGLKHPPPQILIKNTPVPADPPTTFNQSKLNSFITQYSTGQVSVEIEWELQKENSKRWNPEIQYTSNYYKSTSVDFAVNTEGVYSEPRPIGTRYLTRNL

SEQ ID NO: 3016 - protein, 738 aa, Artificial Sequence
  Description of Artificial Sequence: Synthetic polypeptide
MAADGYLPDWLEDNLSEGIREWWALKPGAPKPKANQQKQDDGRGLVLPGYKYLGPFNGLDKGEPVNAADAAALEHDKAYDQQLQAGDNPYLRYNHADAEFQERLQEDTSFGGNLGRAVFQAKKRVLEPLGLVEEGAKTAPGKKRPVEPSPQRSPDSSTGIGKKGQQPARKRLNFGQTGDSESVPDPQPLGEPPAAPSGVGPNTMAAGGGAPMADNNEGADGVGSSSGNWHCDSTWLGDRVITTSTRTWALPTYNNHLYKQISNGTSGGATNDNTYFGYSTPWGYFDFNRFHCHFSPRDWQRLINNNWGFRPKRLSFKLFNIQVKEVTQNEGTKTIANNLTSTIQVFTDSEYQLPYVLGSAHQGCLPPFPADVFTIPQYGYLTLNNGSQAVGRSSFYCLEYFPSQMLRTGNNFQFTYTFEDVPFHSSYAHSQSLDRLMNPLIDQYLYYLSRIQTTGGTANTQTLGFSQGGPNTMANQAKNWLPGPCYRQQRVSTTTGQNNNSNFAWTAGTKYHLNGRNSLANPGIAMATHKDDEERFFPSNGILIFGKQNAARDNADYSDVMPTSEEEIKTTNPVATEEYGIVADNLQQQNTAPQIGTVNSQGALPGMVWQNRDVYLQGPIWAKIPHTDGNFHPSPLMGGFGLKHPPPQILIKNTPVPADPPTTFNQSKLNSFITQYSTGQVGVEIEWELQKENSKRWNPEIQYTSNYYKSTSVDFAVNTEGVYSEPRPIGTRYLTRNL

SEQ ID NO: 3017 - protein, 738 aa, Artificial Sequence
  Description of Artificial Sequence: Synthetic polypeptide
MAADGYLPDWLEDNLSEGIREWWALKPGAPKPKANQQKQDDGRGLVLPGYKYLGPFNGLDKGEPVNAADAAALEHGKAYDQQLQAGDNPYLRYNHADAEFQERLQEDTSFGGNLGRAVFQAKKRVLEPLGLVEEGAKTAPGKKRPVEPSPQRSPDSSTGIGKKGQQPARKRLNFGQTGDSESVPDPQPLGEPPAAPSGVGPNTMAAGGGAPMADNNEGADGVGSSSGNWHCDSTWLGDRVITTSTRTWALPTYNNHLYKQISNGTSGGATNDNTYFGYSTPWGYFDFNRFHCHFSPRDWQRLINNNWGFRPKRLSFKLFNIQVKEVTQNEGTKTIANNLTSTIQVFTDSEYQLPYVLGSAHQGCLPPFPADVFTIPQYGYLTLNNGSQAVGRSSFYCLEYFPSQMLRTGNNFQFTYTFEDVPFHSSYAHSQSLDRLMNPLIDQYLYYLSRIQTTGGTANTQTLGFSQGGPNTMANQAKNWLPGPCYRQQRVSTTTGQNNNSNFAWTAGTKYHLNGRNSLANPGIAMATHKDDEERFFPSNGILIFGKQNAARDNADYSDVMPTSEEEIKTTNPVATEEYGIVADNLQQQNTAPQIGTVNSQGALPGMVWQNRDVYLQGPIWAKIPHTDGNFHPSPLMGGFGLKHPPPQILIKNTPVPADPPTTFNQSKLNSFITQYSTGQVSVEIEWELQKENSKRWNPEIQYTSNYYKSTSVDFAVNTEGVYSEPRPIGTRYLTRNL

SEQ ID NO: 3018 - protein, 738 aa, Artificial Sequence
  Description of Artificial Sequence: Synthetic polypeptide
MAADGYLPDWLEDNLSEGIREWWALKPGAPKPKANQQKQDDGRGLVLPGYKYLGPFNGLDKGEPVNAADAAALEHDKAYDQQLQAGDNPYLRYNHADAEFQERLQEDTSFGGNLGRAVFQAKKRVLEPLGLVEEGAKTAPGKKRPVEPSPQRSPDSSTGIGKKGQQPARKRLNFGQTGDSESVPDPQPLGEPPAAPSGVGPNTMAAGGGAPMADNNEGADGVGSSSGNWHCDSTWLGDRVITTSTRTWALPTYNNHLYKQISNGTSGGATNDNTYFGYSTPWGYFDFNRFHCHFSPRDWQRLINNNWGFRPKRLSFKLFNIQVKEVTQNEGTKTIANNLTSTIQVFTDSEYQLPYVLGSAHQGCLPPFPADVFTIPQYGYLTLNNGSQAVGRSSFYCLEYFPSQMLRTGNNFQFTYTFEDVPFHSSYAHSQSLDRLMNPLIDQYLYYLSRIQTTGGTANTQTLGFSQGGPNTMANQAKNWLPGPCYRQQRVSTTTGQNNNSNFAWTAGTKYHLNGRNSLANPGIAMATHKDDEERFFPSNGILIFGKQNAARDNADYSDVMPTSEEEIKTTNPVATGEYGIVADNLQQQNTAPQIGTVNSQGALPGMVWQNRDVYLQGPIWAKIPHTDGNFHPSPLMGGFGLKHPPPQILIKNTPVPADPPTTFNQSKLNSFITQYSTGQVSVEIEWELQKENSKRWNPEIQYTSNYYKSTSVDFAVNTEGVYSEPRPIGTRYLTRNL

SEQ ID NO: 3019 - protein, 738 aa, Artificial Sequence
  Description of Artificial Sequence: Synthetic polypeptide
MAADGYLPDWLEDNLSEGIREWWALKPGAPKPKANQQKQDDGRGLVLPGYKYLGPFNGLDKGEPVNAADAAALEHDKAYDQQLQAGDNPYLRYNHADAEFQERLQEDTSFGGNLGRAVFQAKKRVLEPLGLVEEGAKTAPGKKRPVEPSPQRSPDSSTGIGKKGQQPARKRLNFGQTGDSESVPDPQPLGEPPAAPSGVGPNTMAAGGGAPMADNNEGADGVGSSSGNWHCDSTWLGDRVITTSTRTWALPTHNNHLYKQISNGTSGGATNDNTYFGYSTPWGYFDFNRFHCHFSPRDWQRLINNNWGFRPKRLSFKLFNIQVKEVTQNEGTKTIANNLTSTIQVFTDSEYQLPYVLGSAHQGCLPPFPADVFTIPQYGYLTLNNGSQAVGRSSFYCLEYFPSQMLRTGNNFQFTYTFEDVPFHSSYAHSQSLDRLMNPLIDQYLYYLSRIQTTGGTANTQTLGFSQGGPNTMANQAKNWLPGPCYRQQRVSTTTGQNNNSNFAWTAGTKYHLNGRNSLANPGIAMATHKDDEERFFPSNGILIFGKQNAARDNADYSDVMPTSEEEIKTTNPVATEEYGIVADNLQQQNTAPQIGTVNSQGALPGMVWQNRDVYLQGPIWAKIPHTDGNFHPSPLMGGFGLKHPPPQILIKNTPVPADPPTTFNQSKLNSFITQYSTGQVSVEIEWELQKENSKRWNPEIQYTSNYYKSTSVDFAVNTEGVYSEPRPIGTRYLTRNL

SEQ ID NO: 3020 - protein, 738 aa, Artificial Sequence
  Description of Artificial Sequence: Synthetic polypeptide
MAADGYLPDWLEDNLSEGIREWWALKPGAPKPKANQQKQDDGRGLVLPGYKYLGPFNGLDKGEPVNAADAAALEHDKAYDQQLQAGDNPYLRYNHADAEFQERLQEDTSFGGNLGRAVFQAKKRVLEPLGLVEEGAKTAPGKKRPVEPSPQRSPDSSTGIGKKGQQPARKRLNFGQTGDSESVPDPQPLGEPPAAPSGVGPNTMAAGGGAPMADNNEGADGVGSSSGNWHCDSTWLGDRVITTSTRTWALPTYNNHLYKQISNGTSGGATNDNTYFGYSTPWGYFDFNRFHCHFSPRDWQRLINNNWGFRPKRLSFKLFNIQVKEVTQNEGTKTIANNLTSTIQVFTDSEYQLPYVLGSAHQGCLPPFPADVFTIPQYGYLTLNNGSQAVGRSSFYCLEYFPSQMLRTGNNFQFTYTFEDVPFHSSYAHSQSLDRLMNPLIDQYLYYLSRIQTTGGTANTQTLGFSQGGPNTMANQAKNWLPGPCYRQQRVSTTTGQNNNSNFAWTAGTKYHLNGRNSLANPGIAMATHKDDEERFFPSNGILIFGKQNAAIDNADYSDVMPTSEEEIKTTNPVATEEYGIVADNLQQQNTAPQIGTVNSQGALPGMVWQNRDVYLQGPIWAKIPHTDGNFHPSPLMGGFGLKHPPPQILIKNTPVPADPPTTFNQSKLNSFITQYSTGQVSVEIEWELQKENSKRWNPEIQYTSNYYKSTSVDFAVNTEGVYSEPRPIGTRYLTRNL

SEQ ID NO: 3021 - protein, 738 aa, Artificial Sequence
  Description of Artificial Sequence: Synthetic polypeptide
MAADGYLPDWLEDNLSEGIREWWALKPGAPKPKANQQKQDDGRGLVLPGYKYLGPFNGLDKGEPVNAADAAALEHDKAYDQQLQAGDNPYLRYNHADAEFQERLQEDTSFGGNLGRAVFQAKKRVLEPLGLVEEGAKTAPGKKRPVEPSPQRSPDSSTGIGKKGQQPARKRLNFGQTGDSESVPDPQPLGEPPAAPSGVGPNTMAAGGGAPMADNNEGADGVGSSSGNWHCDSTWLGDRVITTSTRTWALPTYNNHLYKQISNGTSGGATNDNTYFGYSTPWGYFDFNRFHCHFSPRDWQRLINNNWGFRPKRLSFKLFNIQVKEVTQNEGTKTIANNLTSTIQVFTDSEYQLPYVLGSAHQGCLPPFPADVFTIPQYGYLTLNNGSQAVGRSSFYCLEYFPSQMLRTGNNFQFTYTFEDVPFHSSYAHSQSLDRLMNPLIDQYLYYLSRIQTTGGTANTQTLGFSQGGPNTMANQAKNWLPGPCYRQQRVSTTTGQNNNSNFAWTAGTKYHLNGRNSLANPGIAMATHKDDEGRFFPSNGILIFGKQNAARDNADYSDVMPTSEEEIKTTNPVATEEYGIVADNLQQQNTAPQIGTVNSQGALPGMVWQNRDVYLQGPIWAKIPHTDGNFHPSPLMGGFGLKHPPPQILIKNTPVPADPPTTFNQSKLNSFITQYSTGQVSVEIEWELQKENSKRWNPEIQYTSNYYKSTSVDFAVNTEGVYSEPRPIGTRYLTRNL

SEQ ID NO: 3022 - protein, 738 aa, Artificial Sequence
  Description of Artificial Sequence: Synthetic polypeptide
MAADGYLPDWLEDNLSEGIREWWALKPGAPKPKANQQKQDDGRGLVLPGYKYLGPFNGLDKGEPVNAADAAALEHDKAYDQQLQAGDNPYLRYNHADAEFQERLQEDTSFGGNLGRAVFQAKKRVLEPLGLVEEGAKTAPGKKRPVEPSPQRSPDSSTGIGKKGQQPARKRLNFGQTGDSESVPDPQPLGEPPAAPSGVGPNTMAAGGGAPMADNNEGADGVGSSSGNWHCDSTWLGDRVITTSTRTWALPTYNNHLYKQISNGTSGGATNDNTYFGYSTPWGYFDFNRFHCHFSPRDWQRLINNNWGFRTKRLSFKLFNIQVKEVTQNEGTKTIANNLTSTIQVFTDSEYQLPYVLGSAHQGCLPPFPADVFTIPQYGYLTLNNGSQAVGRSSFYCLEYFPSQMLRTGNNFQFTYTFEDVPFHSSYAHSQSLDRLMNPLIDQYLYYLSRIQTTGGTANTQTLGFSQGGPNTMANQAKNWLPGPCYRQQRVSTTTGQNNNSNFAWTAGTKYHLNGRNSLANPGIAMATHKDDEERFFPSNGILIFGKQNAARDNADYSDVMPTSEEEIKTTNPVATEEYGIVADNLQQQNTAPQIGTVNSQGALPGMVWQNRDVYLQGPIWAKIPHTDGNFHPSPLMGGFGLKHPPPQILIKNTPVPADPPTTFNQSKLNSFITQYSTGQVSVEIEWELQKENSKRWNPEIQYTSNYYKSTSVDFAVNTEGVYSEPRPIGTRYLTRNL

SEQ ID NO: 3023 - protein, 738 aa, Artificial Sequence
  Description of Artificial Sequence: Synthetic polypeptide
MAADGYLPDWLEDNLSEGIREWWALKPGAPKPKANQQKQDDGRGLVLPGYKYLGPFNGLDKGEPVNAADAAALEHDKAYDQQLQAGDNPYLRYNHADAEFQERLQEDTSFGGNLGRAVFQAKKRVLEPLGLVEEGAKTAPGKKRPVEPSPQRSPDSSTGIGKKGQQPARKRLNFGQTGDSESVPDPQPLGEPPAAPSGVGPNTMAAGGGAPMADNNEGADGVGSSSGNWHCDSTWLGDRVITTSTRTWALPTYNNHLYKQISNGTSGGATNDNTYFGYSTPWGYFDFNRFHCHFSPRDWQRLINNNWGFRPKRLSFKLFNIQVKEVTQNEGTKTIANNLTSTIQVFTDSEYQLPYVLGSAHQGCLPPFPADVFTIPQYGYLTLNNGSQAVGRSSFYCLEYFPSQMLRTGNNFQFTYTFEDVPFHSSYAHSQSLDRLMNPLIDQYLYYLSRIQTTGGTANTQTLGFSQGGPNTMANQAKNWLPGPCYRQQRVSTTTGQNNNSNFAWTAGTKYHLNGRNSLANPGIAMATHKDDEERFFPSNGILIFGKQNAARDNADYSDVMPTSEEEIKTTNPVATEEYGIVADNLQQQNTAPQIGTVNSQGALPGMVWQNRDVYLQGPIWAKIPHTDGNFHPSPLMGGFGLKHPPPQILIKNTPVPADPPTTFNQSKLNSFITQCSTGQVSVEIEWELQKENSKRWNPEIQYTSNYYKSTSVDFAVNTEGVYSEPRPIGTRYLTRNL

SEQ ID NO: 3024 - protein, 738 aa, Artificial Sequence
  Description of Artificial Sequence: Synthetic polypeptide
MAADGYLPDWLEDNLSEGIREWWALKPGAPKPKANQQKQDDGRGLVLPGYKYLGPFNGLDKGEPVNAADAAALEHDKAYDQQLQAGDNPYLRYNHADAEFQERLQEDTSFGGNLGRAVFQAKKRVLEPLGLVEEGAKTAPGKKRPVEPSPQRSPDSSTGIGKKGQQPARKRLNFGQTGDSESVPDPQPLGEPPAAPSGVGPNTMAAGGGAPMADNNEGADGVGSSSGNWHCDSTWLGDRVITTSTRTWALPTYNNHLYKQISNGTSGGATNDNTYFGYSTPWGYFDFNRFHCHFSPRDWQRLINNNWGFRPKRLSFKLFNIQVKEVTQNEGTKTIANNLTSTIQVFTDSEYQLPYVLGSAHQGCLPPFPADVFTIPQYGYLTLNNGSQAVGRSSFYCLEYFPSQMLRTGNNFQFTYTFEDVPFRSSYAHSQSLDRLMNPLIDQYLYYLSRIQTTGGTANTQTLGFSQGGPNTMANQAKNWLPGPCYRQQRVSTTTGQNNNSNFAWTAGTKYHLNGRNSLANPGIAMATHKDDEERFFPSNGILIFGKQNAARDNADYSDVMPTSEEEIKTTNPVATEEYGIVADNLQQQNTAPQIGTVNSQGALPGMVWQNRDVYLQGPIWAKIPHTDGNFHPSPLMGGFGLKHPPPQILIKNTPVPADPPTTFNQSKLNSFITQYSTGQVSVEIEWELQKENSKRWNPEIQYTSNYYKSTSVDFAVNTEGVYSEPRPIGTRYLTRNL

SEQ ID NO: 3025 - protein, 738 aa, Artificial Sequence
  Description of Artificial Sequence: Synthetic polypeptide
MAADGYLPDWLEDNLSEGIREWWALKPGAPKPKANQQKQDDGRGLVLPGYKHLGPFNGLDKGEPVNAADAAALEHDKAYDQQLQAGDNPYLRYNHADAEFQERLQEDTSFGGNLGRAVFQAKKRVLEPLGLVEEGAKTAPGKKRPVEPSPQRSPDSSTGIGKKGQQPARKRLNFGQTGDSESVPDPQPLGEPPAAPSGVGPNTMAAGGGAPMADNNEGADGVGSSSGNWHCDSTWLGDRVITTSTRTWALPTYNNHLYKQISNGTSGGATNDNTYFGYSTPWGYFDFNRFHCHFSPRDWQRLINNNWGFRPKRLSFKLFNIQVKEVTQNEGTKTIANNLTSTIQVFTDSEYQLPYVLGSAHQGCLPPFPADVFTIPQYGYLTLNNGSQAVGRSSFYCLEYFPSQMLRTGNNFQFTYTFEDVPFHSSYAHSQSLDRLMNPLIDQYLYYLSRIQTTGGTANTQTLGFSQGGPNTMANQAKNWLPGPCYRQQRVSTTTGQNNNSNFAWTAGTKYHLNGRNSLANPGIAMATHKDDEERFFPSNGILIFGKQNAARDNADYSDVMPTSEEEIKTTNPVATEEYGIVADNLQQQNTAPQIGTVNSQGALPGMVWQNRDVYLQGPIWAKIPHTDGNFHPSPLMGGFGLKHPPPQILIKNTPVPADPPTTFNQSKLNSFITQYSTGQVSVEIEWELQKENSKRWNPEIQYTSNYYKSTSVDFAVNTEGVYSEPRPIGTRYLTRNL

SEQ ID NO: 3026 - protein, 738 aa, Artificial Sequence
  Description of Artificial Sequence: Synthetic polypeptide
MAADGYLPDWLEDNLSEGIREWWALKPGAPKPKANQQKQDDGRGLVLPGYKYLGPFNGLDKGEPVNAADAAALEHDKAYDQQLQAGDNPYLRYNHADAEFQERLQEDTSFGGNLGRAVFQAKKRVLEPLGLVEEGAKTAPGKKRPVEPSPQRSPDSSTGIGKKGQQPARKRLNFGQTGDSESVPDPQPLGEPPAAPSGVGPNTMAAGGGAPMADNNEGADGVGSSSGNWHCDSTWLGDRVITTSTRTWALPTYNNHLYKQISNGTSGGATNDNTYFGYSTPWGYFDFNRFHCHFSPRDWQRLINNNWGFRPKRLSFKLFNIQVKEVTQNEGTKTIANNLTSTIQVFTDSEYQLPYVLGSAHQGCLPPFPADVFTIPQYGYLTLNNGSQAVGRSSFYCLEYFPSQMLRTGNNFQFTYTFEDVPFHSSYAHSQSLDRLMNPLIDQYLYYLSRIQTTGGTANTQTLGFSQGGPNTMANQAKNWLPGPCYRQQRVSATTGQNNNSNFAWTAGTKYHLNGRNSLANPGIAMATHKDDEERFFPSNGILIFGKQNAARDNADYSDVMPTSEEEIKTTNPVATEEYGIVADNLQQQNTAPQIGTVNSQGALPGMVWQNRDVYLQGPIWAKIPHTDGNFHPSPLMGGFGLKHPPPQILIKNTPVPADPPTTFNQSKLNSFITQYSTGQVSVEIEWELQKENSKRWNPEIQYTSNYYKSTSVDFAVNTEGVYSEPRPIGTRYLTRNL

SEQ ID NO: 3027 - protein, 738 aa, Artificial Sequence
  Description of Artificial Sequence: Synthetic polypeptide
MAADGYLPDWLEDNLSEGIREWWALKPGAPKPKANQQKQDDGRGLVLPGYKYLGPFNGLDKGEPVNAADAAALEHDKAYDQQLQAGDNPYLRYNHADAEFQERLQEDTSFGGNLGRAVFQAKKRVLEPLGLVEEGAKTAPGKKRPVEPSPQRSPDSSTGIGKKGQQPARKRLNFGQTGGSESVPDPQPLGEPPAAPSGVGPNTMAAGGGAPMADNNEGADGVGSSSGNWHCDSTWLGDRVITTSTRTWALPTYNNHLYKQISNGTSGGATNDNTYFGYSTPWGYFDFNRFHCHFSPRDWQRLINNNWGFRPKRLSFKLFNIQVKEVTQNEGTKTIANNLTSTIQVFTDSEYQLPYVLGSAHQGCLPPFPADVFTIPQYGYLTLNNGSQAVGRSSFYCLEYFPSQMLRTGNNFQFTYTFEDVPFHSSYAHSQSLDRLMNPLIDQYLYYLSRIQTTGGTANTQTLGFSQGGPNTMANQAKNWLPGPCYRQQRVSTTTGQNNNSNFAWTAGTKYHLNGRNSLANPGIAMATHKDDEERFFPSNGILIFGKQNAARDNADYSDVMPTSEEEIKTTNPVATEEYGIVADNLQQQNTAPQIGTVNSQGALPGMVWQNRDVYLQGPIWAKIPHTDGNFHPSPLMGGFGLKHPPPQILIKNTPVPADPPTTFNQSKLNSFITQYSTGQVSVEIEWELQKENSKRWNPEIQYTSNYYKSTSVDFAVNTEGVYSEPRPIGTRYLTRNL

SEQ ID NO: 3028 - protein, 738 aa, Artificial Sequence
  Description of Artificial Sequence: Synthetic polypeptide
MAADGYLPDWLEDNLSEGIREWWALKPGAPKPKANQQKQDDGRGLVLPGYKYLGPFNGLDKGEPVNAADAAALEHDKAYDQQLQAGDNPYLRYNHADAEFQERLQEDTSFGGNLGRAVFQAKKRVLEPLGLVEEGAKTAPGKKRPVEPSPQRSPDSSTGIGKKGQQPARKRLNFGQTGDSESVPDPQPLGEPPAAPSGVGPNTMAAGGGAPMADNNEGADGVGSSSGNWHCDSAWLGDRVITTSTRTWALPTYNNHLYKQISNGTSGGATNDNTYFGYSTPWGYFDFNRFHCHFSPRDWQRLINNNWGFRPKRLSFKLFNIQVKEVTQNEGTKTIANNLTSTIQVFTDSEYQLPYVLGSAHQGCLPPFPADVFTIPQYGYLTLNNGSQAVGRSSFYCLEYFPSQMLRTGNNFQFTYTFEDVPFHSSYAHSQSLDRLMNPLIDQYLYYLSRIQTTGGTANTQTLGFSQGGPNTMANQAKNWLPGPCYRQQRVSTTTGQNNNSNFAWTAGTKYHLNGRNSLANPGIAMATHKDDEERFFPSNGILIFGKQNAARDNADYSDVMPTSEEEIKTTNPVATEEYGIVADNLQQQNTAPQIGTVNSQGALPGMVWQNRDVYLQGPIWAKIPHTDGNFHPSPLMGGFGLKHPPPQILIKNTPVPADPPTTFNQSKLNSFITQYSTGQVSVEIEWELQKENSKRWNPEIQYTSNYYKSTSVDFAVNTEGVYSEPRPIGTRYLTRNL

SEQ ID NO: 3029 - protein, 738 aa, Artificial Sequence
  Description of Artificial Sequence: Synthetic polypeptide
MAADGYLPDWLEDNLSEGIREWWALKPGAPKPKANQQKQDDGRGLVLPGYKYLGPFNGLDKGEPVNAADAAALEHDKAYDQQLQAGDNPYLRYNHADAEFQERLQEDTSFGGNLGRAVFQAKKRVLEPLGLVEEGAKTAPGKKRPVEPSPQRSPDSSTGIGKKGQQPARKRLNFGQTGDSESVPDPQPLGEPPAAPSGVGPNTMAAGGGAPMADNNEGADGVGSSSGNWHCDSTWLGDRVITTSTRTWALPTYNNHLYKQISNGTSGGATNDNTYFGYSTPWGYFDFNRFHCHFSPRDWQRLINNNWGFRPKRLSFKLFNIQVKEVTQNEGTKTIANNLTSTIQVFTDSEYQLPYVLGSAHRGCLPPFPADVFTIPQYGYLTLNNGSQAVGRSSFYCLEYFPSQMLRTGNNFQFTYTFEDVPFHSSYAHSQSLDRLMNPLIDQYLYYLSRIQTTGGTANTQTLGFSQGGPNTMANQAKNWLPGPCYRQQRVSTTTGQNNNSNFAWTAGTKYHLNGRNSLANPGIAMATHKDDEERFFPSNGILIFGKQNAARDNADYSDVMPTSEEEIKTTNPVATEEYGIVADNLQQQNTAPQIGTVNSQGALPGMVWQNRDVYLQGPIWAKIPHTDGNFHPSPLMGGFGLKHPPPQILIKNTPVPADPPTTFNQSKLNSFITQYSTGQVSVEIEWELQKENSKRWNPEIQYTSNYYKSTSVDFAVNTEGVYSEPRPIGTRYLTRNL

SEQ ID NO: 3030 - protein, 738 aa, Artificial Sequence
  Description of Artificial Sequence: Synthetic polypeptide
MAADGYLPDWLEDNLSEGIREWWALKPGAPKPKANQQKQDDGRGLVLPGYKYLGPFNGLDKGEPVNAADAAALEHDKAYDQQLQAGDNPYLRYNHADAEFQERLQEDTSFGGNLGRAVFQAKKRVLEPLGLVEEGAKTAPGKKRPVEPSPQRSPDSSTGIGKKGQQPARKRLNFGQTGDSESVPDPQPLGEPPAAPSGVGPNTMAAGGGAPMADNNEGADGVGSSSGNWHCDSTWLGDRVITTSTRTWALPTYNNHLYKQISNGTSGGATNDNTYFGYSTPWGYFDFNRFHCHFSPRDWQRLINNNWGFRPKRLSFKLFNIQVKEVTQNEGTKTIANNLTSTIQVFTDSEYQLPYVLGSAHQGCLPPFPADVFTIPQYGYLTLNNGSQAVGRSSFYCLEYFPSQMLRTGNNFQFTYTFEDVPFHSSYAHSQSLDRLMNPLIDQYLYYLSRIQTTGGTANTQTLGFSQGGPNTMANQAKNWLPGPCYRQQRVSTTTGQNNNSNFAWTAGTKYHLNGRNSLANPGIAMATHKDDEERFFPSNGILIFGKQNAARDNADYSDVMPTSEEEIKTTNPVATEEYGIVADNLQQQNTAPQIGTVNSQGALPGMVWQNRDVYLQGPIWAKIPHTDGNFHPSPLMGGFGLKHPPPQILIKNTPVSADPPTTFNQSKLNSFITQYSTGQVSVEIEWELQKENSKRWNPEIQYTSNYYKSTSVDFAVNTEGVYSEPRPIGTRYLTRNL

SEQ ID NO: 3031 - protein, 738 aa, Artificial Sequence
  Description of Artificial Sequence: Synthetic polypeptide
MAADGYLPDWLEDNLSEGIREWWALKPGAPKPKANQQKQDDGRGLVLPGYRYLGPFNGLDKGEPVNAADAAALEHDKAYDQQLQAGDNPYLRYNHADAEFQERLQEDTSFGGNLGRAVFQAKKRVLEPLGLVEEGAKTAPGKKRPVEPSPQRSPDSSTGIGKKGQQPARKRLNFGQTGDSESVPDPQPLGEPPAAPSGVGPNTMAAGGGAPMADNNEGADGVGSSSGNWHCDSTWLGDRVITTSTRTWALPTYNNHLYKQISNGTSGGATNDNTYFGYSTPWGYFDFNRFHCHFSPRDWQRLINNNWGFRPKRLSFKLFNIQVKEVTQNEGTKTIANNLTSTIQVFTDSEYQLPYVLGSAHQGCLPPFPADVFTIPQYGYLTLNNGSQAVGRSSFYCLEYFPSQMLRTGNNFQFTYTFEDVPFHSSYAHSQSLDRLMNPLIDQYLYYLSRIQTTGGTANTQTLGFSQGGPNTMANQAKNWLPGPCYRQQRVSTTTGQNNNSNFAWTAGTKYHLNGRNSLANPGIAMATHKDDEERFFPSNGILIFGKQNAARDNADYSDVMPTSEEEIKTTNPVATEEYGIVADNLQQQNTAPQIGTVNSQGALPGMVWQNRDVYLQGPIWAKIPHTDGNFHPSPLMGGFGLKHPPPQILIKNTPVPADPPTTFNQSKLNSFITQYSTGQVSVEIEWELQKENSKRWNPEIQYTSNYYKSTSVDFAVNTEGVYSEPRPIGTRYLTRNL

SEQ ID NO: 3032 - protein, 738 aa, Artificial Sequence
  Description of Artificial Sequence: Synthetic polypeptide
MAADGYLPDWLEDNLSEGIREWWALKPGAPKPKANQQKQDDGRGLVLPGYKYLGPFNGLDKGEPVNAADAAALEHDKAYDQQLQAGDNPYLRYNHADAEFQERLQEDTSFGGNLGRAVFQAKKRVLEPLGLVEEGAKTAPGKKRPVEPSPQRSPDSSTGIGKKGQQPARKRLNFGQTGDSESVPDPQPLGEPPAAPSGVGPNTMAAGGGAPMADNNEGADGVGSSSGNWHCDSTWLGDRVITTSTRTWALPTYNNHLYKQISNGTSGGATNDNTYFGYSTPWGYFDFNRFHCHFSPRDWQRLINNNWGFRPKRLSFKLFNIQVKEVTQNEGTKTIANNLTSTIQVFTDSEYQLPYVLGSAHQGCLPPFPADVFTIPQYGYLTLNNGSQAVGRSSFYCLEYFPSQMLRTGNNFQFTYTFEDVPFHSSYAHSQSLDRLMNPLIDQYLYYLSRIQTTGGTANTQTLGFSQGGPNTMANQAKNWLPGPCYRQQRVSTTTGQNNNSNFAWTAGTKYRLNGRNSLANPGIAMATHKDDEERFFPSNGILIFGKQNAARDNADYSDVMPTSEEEIKTTNPVATEEYGIVADNLQQQNTAPQIGTVNSQGALPGMVWQNRDVYLQGPIWAKIPHTDGNFHPSPLMGGFGLKHPPPQILIKNTPVPADPPTTFNQSKLNSFITQYSTGQVSVEIEWELQKENSKRWNPEIQYTSNYYKSTSVDFAVNTEGVYSEPRPIGTRYLTRNL

SEQ ID NO: 3033 - protein, 738 aa, Artificial Sequence
  Description of Artificial Sequence: Synthetic polypeptide
MAADGYLPDWLEDNLSEGIREWWALKPGAPKPKANQQKQDDGRGLVLPGYKYLGPFNGLDKGEPVNAADAAALEHDKAYDQQLQAGDNPYLRYNHADAEFQERLQEDTSFGGNLGRAVFQAKKRVLEPLGLVEEGAKTAPGKKRPVEPSPQRSPDSSTGIGKKGQQPARKRLNFGQTGDSESAPDPQPLGEPPAAPSGVGPNTMAAGGGAPMADNNEGADGVGSSSGNWHCDSTWLGDRVITTSTRTWALPTYNNHLYKQISNGTSGGATNDNTYFGYSTPWGYFDFNRFHCHFSPRDWQRLINNNWGFRPKRLSFKLFNIQVKEVTQNEGTKTIANNLTSTIQVFTDSEYQLPYVLGSAHQGCLPPFPADVFTIPQYGYLTLNNGSQAVGRSSFYCLEYFPSQMLRTGNNFQFTYTFEDVPFHSSYAHSQSLDRLMNPLIDQYLYYLSRIQTTGGTANTQTLGFSQGGPNTMANQAKNWLPGPCYRQQRVSTTTGQNNNSNFAWTAGTKYHLNGRNSLANPGIAMATHKDDEERFFPSNGILIFGKQNAARDNADYSDVMPTSEEEIKTTNPVATEEYGIVADNLQQQNTAPQIGTVNSQGALPGMVWQNRDVYLQGPIWAKIPHTDGNFHPSPLMGGFGLKHPPPQILIKNTPVPADPPTTFNQSKLNSFITQYSTGQVSVEIEWELQKENSKRWNPEIQYTSNYYKSTSVDFAVNTEGVYSEPRPIGTRYLTRNL

SEQ ID NO: 3034 - protein, 738 aa, Artificial Sequence
  Description of Artificial Sequence: Synthetic polypeptide
MAADGYLPDWLEDNLSEGIREWWALKPGAPKPKANQQKQDDGRGLVLPGYKYLGPFNGLDKGEPVNAADAAALEHDKAYDQQLQAGDNPYLRYNHADAEFQERLQEDTSFGGNLGRAVFQAKKRVLEPLGLVEEGAKTAPGKKRPVEPSPQRSPDPSTGIGKKGQQPARKRLNFGQTGDSESVPDPQPLGEPPAAPSGVGPNTMAAGGGAPMADNNEGADGVGSSSGNWHCDSTWLGDRVITTSTRTWALPTYNNHLYKQISNGTSGGATNDNTYFGYSTPWGYFDFNRFHCHFSPRDWQRLINNNWGFRPKRLSFKLFNIQVKEVTQNEGTKTIANNLTSTIQVFTDSEYQLPYVLGSAHQGCLPPFPADVFTIPQYGYLTLNNGSQAVGRSSFYCLEYFPSQMLRTGNNFQFTYTFEDVPFHSSYAHSQSLDRLMNPLIDQYLYYLSRIQTTGGTANTQTLGFSQGGPNTMANQAKNWLPGPCYRQQRVSTTTGQNNNSNFAWTAGTKYHLNGRNSLANPGIAMATHKDDEERFFPSNGILIFGKQNAARDNADYSDVMPTSEEEIKTTNPVATEEYGIVADNLQQQNTAPQIGTVNSQGALPGMVWQNRDVYLQGPIWAKIPHTDGNFHPSPLMGGFGLKHPPPQILIKNTPVPADPPTTFNQSKLNSFITQYSTGQVSVEIEWELQKENSKRWNPEIQYTSNYYKSTSVDFAVNTEGVYSEPRPIGTRYLTRNL

SEQ ID NO: 3035 - protein, 738 aa, Artificial Sequence
  Description of Artificial Sequence: Synthetic polypeptide
MAADGYLPDWLEDNLSEGIREWWALKPGAPKPKANQQKQDDGRGLVLPGYKYLGPFNGLDKGEPVNAADAAALEHDKAYDQQLQAGDNPYLRYNHADAEFQERLQEDTSFGGNLGRAVFQAKKRVLEPLGLVEEGAKTAPGKKRPVEPSPQRSPDSSTGIGKKGQQPARKRLNFGQTGDSESVPDPQPLGEPPAAPSGVGPNTMAAGGGAPMADNNEGADGVGSSSGNWHCDSTWLGDRVITTSTRTWALPTYNNHLYKQISNGTSGGATNDNTYFGYSTPWGYFDFNRFHCHFSPRDWQRLINNNWGFRPKRLSFKLFNIQVKEVTQNEGTKTIANNLTSTIQVFTDSEYRLPYVLGSAHQGCLPPFPADVFTIPQYGYLTLNNGSQAVGRSSFYCLEYFPSQMLRTGNNFQFTYTFEDVPFHSSYAHSQSLDRLMNPLIDQYLYYLSRIQTTGGTANTQTLGFSQGGPNTMANQAKNWLPGPCYRQQRVSTTTGQNNNSNFAWTAGTKYHLNGRNSLANPGIAMATHKDDEERFFPSNGILIFGKQNAARDNADYSDVMPTSEEEIKTTNPVATEEYGIVADNLQQQNTAPQIGTVNSQGALPGMVWQNRDVYLQGPIWAKIPHTDGNFHPSPLMGGFGLKHPPPQILIKNTPVPADPPTTFNQSKLNSFITQYSTGQVSVEIEWELQKENSKRWNPEIQYTSNYYKSTSVDFAVNTEGVYSEPRPIGTRYLTRNL

SEQ ID NO: 3036 - protein, 738 aa, Artificial Sequence
  Description of Artificial Sequence: Synthetic polypeptide
MAADGYLPDWLEDNLSEGIREWWALKPGAPKPKANQQKQDDGRGLVLPGYKYLGPFNGLDKGEPVNAADAAALEHDKAYDQQLQAGDNPYLRYNHADAEFQERLQEDTSFGGNLGRAVFQAKKRVLEPLGLVEEGAKTAPGKKRPVEPSPQRSPDSSTGIGKKGQQPARKRLNFGQTGDSESVPDPQPLGEPPAAPSGVGPNTMAAGGGAPMADNNEGADGVGSSSGNWHCDSTWLGDRVITTSTRTWALPTYNNHLYKQISNGTSGGATNDNTYFGYSTPWGYFDFNRFHCHFSPRDWQRLINNNWGFRPKRLSFKLFNIQVKEVTQNEGTKTIANNLTSTIQVFTDSEYQLPYVLGSAHQGCLPPFPADVFTIPQYGYLTLNNGSQAVGRSSFYCLEYFPSQMLRTGNNFQFTYTFEDVPFHSSYAHSQSLDRLMNPLIDQYLYYLSRIQTTGGTANTQTLGFSQGGPNTMANQAKNWLPGPCYRQQRVSTTTGQNNNSNFAWTAGTKYHLNGRNSLANPGIAMATHKDDEERFFPSNGILIFGKQNAARDNADYSDVMPTSEEEIKTTNPVATEEYGIVADNLQQQNTAPQIGTVNSQGALPGMVWQNRDVYLQGPIWAKIPHTDGNFHPSPLMGGFGLKHPPPQILIKNTPVPADPPTTFNQPKLNSFITQYSTGQVSVEIEWELQKENSKRWNPEIQYTSNYYKSTSVDFAVNTEGVYSEPRPIGTRYLTRNL

SEQ ID NO: 3037 - protein, 738 aa, Artificial Sequence
  Description of Artificial Sequence: Synthetic polypeptide
MAADGYLPDWLEDNLSEGIREWWALKPGAPKPKANQQKQDDGRGLVLPGYKYLGPFNGLDKGEPVNAADAAALEHDKAYDQQLQAGGNPYLRYNHADAEFQERLQEDTSFGGNLGRAVFQAKKRVLEPLGLVEEGAKTAPGKKRPVEPSPQRSPDSSTGIGKKGQQPARKRLNFGQTGDSESVPDPQPLGEPPAAPSGVGPNTMAAGGGAPMADNNEGADGVGSSSGNWHCDSTWLGDRVITTSTRTWALPTYNNHLYKQISNGTSGGATNDNTYFGYSTPWGYFDFNRFHCHFSPRDWQRLINNNWGFRPKRLSFKLFNIQVKEVTQNEGTKTIANNLTSTIQVFTDSEYQLPYVLGSAHQGCLPPFPADVFTIPQYGYLTLNNGSQAVGRSSFYCLEYFPSQMLRTGNNFQFTYTFEDVPFHSSYAHSQSLDRLMNPLIDQYLYYLSRIQTTGGTANTQTLGFSQGGPNTMANQAKNWLPGPCYRQQRVSTTTGQNNNSNFAWTAGTKYHLNGRNSLANPGIAMATHKDDEERFFPSNGILIFGKQNAARDNADYSDVMPTSEEEIKTTNPVATEEYGIVADNLQQQNTAPQIGTVNSQGALPGMVWQNRDVYLQGPIWAKIPHTDGNFHPSPLMGGFGLKHPPPQILIKNTPVPADPPTTFNQSKLNSFITQYSTGQVSVEIEWELQKENSKRWNPEIQYTSNYYKSTSVDFAVNTEGVYSEPRPIGTRYLTRNL

SEQ ID NO: 3038 - protein, 738 aa, Artificial Sequence
  Description of Artificial Sequence: Synthetic polypeptide
MAADGYLPDWLEDNLSEGIREWWALKPGAPKPKANQQKQDDGRGLVLPGYKYLGPFNGLDKGEPVNAADAAALEHDKAYDQQLQAGDNPYLRYNHADAEFQERLQEDTSFGGNLGRAVFQAKKRVLEPLGLVEEGAKTAPGKKRPVEPSPQRSPDSSTGIGKKGQQPARKRLNFGQTGDSESVPDPQPLGEPPAAPSGVGPNTMAAGGGAPMADNNEGADGVGSSSGNWHCDSTWLGDRVITTSTRTWALPTYNNHLYKQISNGTSGGATNDNTYFGYSTPWGYFDFNRFHCHFSPRDWQRLINNNWGFRPKRLSFKLFNIQVKEVTQNEGTKTIANNLTSTIQVFTDSEYQLPYVLGSAHQGCLPPFPADVFTIPQYGYLTLNNGSQAVGRSSFYCLEYFPSQMLRTGNNFQFTYTFEDVPFHSSYAHSQSLDRLMNPLIDQYLYYLSRIQTTGGTANTQTLGFSQGGPNTMANQAKNWLPGPCYRQQRVSTATGQNNNSNFAWTAGTKYHLNGRNSLANPGIAMATHKDDEERFFPSNGILIFGKQNAARDNADYSDVMPTSEEEIKTTNPVATEEYGIVADNLQQQNTAPQIGTVNSQGALPGMVWQNRDVYLQGPIWAKIPHTDGNFHPSPLMGGFGLKHPPPQILIKNTPVPADPPTTFNQSKLNSFITQYSTGQVSVEIEWELQKENSKRWNPEIQYTSNYYKSTSVDFAVNTEGVYSEPRPIGTRYLTRNL

SEQ ID NO: 3039 - protein, 738 aa, Artificial Sequence
  Description of Artificial Sequence: Synthetic polypeptide
MAADGYLPDWLEDNLSEGIREWWALKPGAPKPKANQQKQDDGRGLVLPGYKYLGPFNGLDKGEPVNAADAAALEHDKAYDQQLQAGDNPYLRYNHADAEFQERLQEDTSFGGNLGRAVFQAKKRVLEPLGLVEEGAKTAPGKKRPVEPSPQRSPDSSTGIGKKGQQPARKRLNFGQTGDSESVPDPQPLGEPPAAPSGVGPNTMAAGGGAPMADNNEGADGVGSSSGNWHCDSTWLGDRVITTSTRTWALPTYNNHLYKQISNGTSGGATNDNTYFGYSTPWGYFDFNRFHCHFSPRDWQRLINNNWGFRPKRLSFKLFNIQVKEVTQNEGTKTIANNLTSTIQVFTDSEYQLPYVLGSAHQGCPPPFPADVFTIPQYGYLTLNNGSQAVGRSSFYCLEYFPSQMLRTGNNFQFTYTFEDVPFHSSYAHSQSLDRLMNPLIDQYLYYLSRIQTTGGTANTQTLGFSQGGPNTMANQAKNWLPGPCYRQQRVSTTTGQNNNSNFAWTAGTKYHLNGRNSLANPGIAMATHKDDEERFFPSNGILIFGKQNAARDNADYSDVMPTSEEEIKTTNPVATEEYGIVADNLQQQNTAPQIGTVNSQGALPGMVWQNRDVYLQGPIWAKIPHTDGNFHPSPLMGGFGLKHPPPQILIKNTPVPADPPTTFNQSKLNSFITQYSTGQVSVEIEWELQKENSKRWNPEIQYTSNYYKSTSVDFAVNTEGVYSEPRPIGTRYLTRNL

SEQ ID NO: 3040 - protein, 738 aa, Artificial Sequence
  Description of Artificial Sequence: Synthetic polypeptide
MAADGYLPDWLEDNLSEGIREWWALKPGAPKPKANQQKQDDGRGLVLPGYKYLGPFNGLDKGEPVNAADAAALEHDKAYDQQPQAGDNPYLRYNHADAEFQERLQEDTSFGGNLGRAVFQAKKRVLEPLGLVEEGAKTAPGKKRPVEPSPQRSPDSSTGIGKKGQQPARKRLNFGQTGDSESVPDPQPLGEPPAAPSGVGPNTMAAGGGAPMADNNEGADGVGSSSGNWHCDSTWLGDRVITTSTRTWALPTYNNHLYKQISNGTSGGATNDNTYFGYSTPWGYFDFNRFHCHFSPRDWQRLINNNWGFRPKRLSFKLFNIQVKEVTQNEGTKTIANNLTSTIQVFTDSEYQLPYVLGSAHQGCLPPFPADVFTIPQYGYLTLNNGSQAVGRSSFYCLEYFPSQMLRTGNNFQFTYTFEDVPFHSSYAHSQSLDRLMNPLIDQYLYYLSRIQTTGGTANTQTLGFSQGGPNTMANQAKNWLPGPCYRQQRVSTTTGQNNNSNFAWTAGTKYHLNGRNSLANPGIAMATHKDDEERFFPSNGILIFGKQNAARDNADYSDVMPTSEEEIKTTNPVATEEYGIVADNLQQQNTAPQIGTVNSQGALPGMVWQNRDVYLQGPIWAKIPHTDGNFHPSPLMGGFGLKHPPPQILIKNTPVPADPPTTFNQSKLNSFITQYSTGQVSVEIEWELQKENSKRWNPEIQYTSNYYKSTSVDFAVNTEGVYSEPRPIGTRYLTRNL

SEQ ID NO: 3041 - protein, 738 aa, Artificial Sequence
  Description of Artificial Sequence: Synthetic polypeptide
MAADGYLPDWLEDNLSEGIREWWALKPGAPKPKANQQKQDDGRGLVLPGYKYLGPFNGLDKGEPVNAADAAALEHDKAYDQQLQAGDNPYLRYNHADAEFQERLQEDTSFGGNLGRAVFQAKKRVLEPLGLVEEGAKTAPGKKRPVEPSPQRSPDSSTGIGKKGQQPARKRLNFGQTGDSESVPDPQPLGEPPAAPSGVGPNTMAAGGGAPMADNNEGADGVGSSSGNWHCDSTWLGDRVITTSTRTWALPTYNNHLYKQISNGTSGGATNDNTYFGYSTPWGYFDFNRFHCHFSPRDWQRLINNNWGFRPKRLSFKLFNIQVKEVTQNEGTKTIANNLTSTIQVFTDSEYQLPYVLGSAHQGCLPPFPADVFTIPQYGYLTLNNGSQAVGRSSFYCLEYLPSQMLRTGNNFQFTYTFEDVPFHSSYAHSQSLDRLMNPLIDQYLYYLSRIQTTGGTANTQTLGFSQGGPNTMANQAKNWLPGPCYRQQRVSTTTGQNNNSNFAWTAGTKYHLNGRNSLANPGIAMATHKDDEERFFPSNGILIFGKQNAARDNADYSDVMPTSEEEIKTTNPVATEEYGIVADNLQQQNTAPQIGTVNSQGALPGMVWQNRDVYLQGPIWAKIPHTDGNFHPSPLMGGFGLKHPPPQILIKNTPVPADPPTTFNQSKLNSFITQYSTGQVSVEIEWELQKENSKRWNPEIQYTSNYYKSTSVDFAVNTEGVYSEPRPIGTRYLTRNL

SEQ ID NO: 3042 - protein, 738 aa, Artificial Sequence
  Description of Artificial Sequence: Synthetic polypeptide
MAADGYLPDWLEDNLSEGIREWWALKPGAPKPKANQQKQDDGRGLVLPGYKYLGPFNGLDKGEPVNAADAAALEHDKAYDQQLRAGDNPYLRYNHADAEFQERLQEDTSFGGNLGRAVFQAKKRVLEPLGLVEEGAKTAPGKKRPVEPSPQRSPDSSTGIGKKDQQPARKRLNFGQTGDSESVPDPQPLGEPPAAPSGVGPNTMAAGGGAPMADNNEGADGVGSSSGNWHCDSTWLGDRVITTSTRTWALPTYNNHLYKQISNGTSGGATNDNTYFGYSTPWGYFDFNRFHCHFSPRDWQRLINNNWGFRPKRLSFKLFNIQVKEVTQNEGTKTIANNLTSTIQVFTDSEYQLPYVLGSAHQGCLPPFPADVFTIPQYGYLTLNNGSQAVGRSSFYCLEYFPSQMLRTGNNFQFTYTFEDVPFHSSYAHSQSLDRLMNPLIDQYLYYLSRIQTTGGTANTQTLGFSQGGPNTMANQAKNWLPGPCYRQQRVSTTTGQNNNSNFAWTAGTKYHLNGRNSLANPGIAMATHKDDEERFFPSNGILIFGKQNAARDNADYSDVMPTSEEEIKTTNPVATEEYGIVADNLQQQNTAPQIGTVNSQGALPGMVWQNRDVYLQGPIWAKIPHTDGNFHPSPLMGGFGLKHPPPQILIKNTPVPADPPTTFNQSKLNSFITQYSTGQVSVEIEWELQKENSKRWNPEIQYTSNYYKSTSVDFAVNTEGVYSEPRPIGTRYLTRNL

SEQ ID NO: 3043 - protein, 738 aa, Artificial Sequence
  Description of Artificial Sequence: Synthetic polypeptide
MAADGYLPDWLEDNLSEGIREWWALKPGAPKPKANQQKQDDGRGLVLPGYKYLGPFNGLDKGEPVNAADAAALEHDKAYDQQLQAGDNPYLRYNHADAEFQERLQEDTSFGGNLGRAVFQAKKRVLEPLGLVEEGAKTAPGKKRPVEPSPQRSPDSSTGIGKKGQQPARKRLNFGQTGDSESVPDPQPLGEPPAAPSGVGPNTMAAGGGAPMADNNEGADGVGSSSGNWHCDSTWLGDRVITTSTRTWALPTYNNHLYKQISNGTSGGATNDNTYFGYSTPWGYFDFNRFHCHFSPRDWQRLINNNWGFRPKRLSFKLFNIQVKEVTQNEGTKTIANNLTSTIQVFTDSEYQLPYVLGSAHQGCLPPFPADVFTIPQYGYLTLNNGSQAVGRSSFYCLEYFPSQMLRTGNNFQFTYTFEDVPFHSSYAHSQSLDRLMNPLIDQYLYYLSRIQTTGGTANTQTLGFSQGGPNTMANQAKNWLPGPCYRQQRVSTTTGQNNNSNFAWTAGTKYHLNGRNSLANPGIAMATHKDDEERFFPSNGILIFGKQNAARDNADYSDVMPTSEEEIKTTNPVATEEYGIVADNLQQQNTAPQIGTVNSQGALPGMVWQNRDVYLQGPIWAKIPRTDGNFHPSPLMGGFGLKHPPPQILIKNTPVPADPPTTFNQSKLNSFITQYSTGQVSVEIEWELQKENSKRWNPEIQYTSNYYKSTSVDFAVNTEGVYSEPRPIGTRYLTRNL

SEQ ID NO: 3044 - protein, 738 aa, Artificial Sequence
  Description of Artificial Sequence: Synthetic polypeptide
MAADGYLPDWLEDNLSEGIREWWALKPGAPKPKANQQKQDDGRGLVLPGYKYLGPFNGLDKGEPVNAADAAALEHDKAYDQQLQAGDNPYLRYNHADAEFQERLQEDTSFGGNLGRAVFQAKKRVLEPLGLVEEGAKTAPGKKRPVEPSPQRSPDSSTGIGKKGQQPARKRLNFGQTGDSESVPDPQPLGEPPAAPSGVGPNTMAAGGGAPMADNNEGADGVGSSSGNWHCDSTWLGDRVITTSTRTWALPTYNNHLYKQISNGTSGGATNDNTYFGYSTPWGYFDFNRFHCHFSPRDWQRLINNNWGFRPKRLSFKLFNIQVKEVTQNEGTKTIANNLTSTIQVFTDSEYQLPYVLGSAHQGCLPPFPADVFTIPQYGYLTLNNGSQAVGRSSFYCLEYFPSQMLRTGNNFQFTYTFEDVPFHSSYAHSQSLDRLMNPLIDQYLYYLSRIQTTGGTANTQTLGFSQGGPNTMANQAKNWLPGPCYRQQRVSTTTGQNNNSNFAWTAGTKYHLNGRNSLANPGIAMATHKDDEERFFPSNGILIFGKQNAARDNADYSDVMPTSEEEIKTTNPVATEEYGIVADNLQQQNTAPQIGTVNSQGALPGMVWQNRDVYLQGPIWAKIPHTDGNFHPSPLMGGFGLKHPPPQILIKNTPVPADPPTTFNQSKLNSFITQYSTGQVSVEIGWELQKENSKRWNPEIQYTSNYYKSTSVDFAVNTEGVYSEPRPIGTRYLTRNL

SEQ ID NO: 3045 - protein, 738 aa, Artificial Sequence
  Description of Artificial Sequence: Synthetic polypeptide
MAADGYLPDWLEDNLSEGIREWWALKPGAPKPKANQQKQDDGRGLVLPGYKYLGPFNGLDKGEPVNAADAAALEHDKAYDQQLQAGDNPYLRYNHADAEFQERLQEDTSFGGNLGRAVFQAKKRVLEPLGLVEEGAKTAPGKKRPVEPSPQRSPDSSTGIGKKGQQPARKRLNFGQTGDSESVPDPQPLGEPPAAPSGVGPNTMATGGGAPMADNNEGADGVGSSSGNWHCDSTWLGDRVITTSTRTWALPTYNNHLYKQISNGTSGGATNDNTYFGYSTPWGYFDFNRFHCHFSPRDWQRLINNNWGFRPKRLSFKLFNIQVKEVTQNEGTKTIANNLTSTIQVFTDSEYQLPYVLGSAHQGCLPPFPADVFTIPQYGYLTLNNGSQAVGRSSFYCLEYFPSQMLRTGNNFQFTYTFEDVPFHGSYAHSQSLDRLMNPLIDQYLYYLSRIQTTGGTANTQTLGFSQGGPNTMANQAKNWLPGPCYRQQRVSTTTGQNNNSNFAWTAGTKYHLNGRNSLANPGIAMATHKDDEERFFPSNGILIFGKQNAARDNADYSDVMPTSEEEIKTTNPVATEEYGIVADNLQQQNTAPQIGTVNSQGALPGMVWQNRDVYLQGPIWAKIPHTDGNFHPSPLMGGFGLKHPPPQILIKNTPVPADPPTTFNQSKLNSFITQYSTGQVSVEIEWELQKENSKRWNPEIQYTSNYYKSTSVDFAVNTEGVYSEPRPIGTRYLTRNL

SEQ ID NO: 3046 - protein, 738 aa, Artificial Sequence
  Description of Artificial Sequence: Synthetic polypeptide
MAADGYLPDWLEDNLSEGIREWWALKPGAPKPKANQQKQDDGRGLVLPGYKYLGPFNGLDKGEPVNAADAAALEHDKAYDQQLQAGDNPYLRYNHADAEFQERLQEDTSFGGNLGRAVFQAKKRVLEPLGLVEEGAKTAPGKKRPVEPSPQRSPDSSTGIGKKGQQPARKRLNFGQTGDSESVPDPQPLGEPPAAPSGVGPNTMAAGGGAPMADNNEGADGVGSSSGNWHCDSTWLGDRVITTSTRTWALPTYNNHLYKQISNGTSGGATNDNTYFGYSTPWGYFDFNRFHCHFSPRDWQRLINNNWGFRPKRLSFKLFNIQVKEVTQNEGTKTIANNLTSTIQVFTDSEYLLPYVLGSAHQGCLPPFPADVFTIPQYGYLTLNNGSQAVGRSSFYCLEYFPSQMLRTGNNFQFTYTFEDVPFHSSYAHSQSLDRLMNPLIDQYLYYLSRIQTTGGTANTQTLGFSQGGPNTMANQAKNWLPGPCYRQQRVSTTTGQNNNSNFAWTAGTKYHLNGRNSLANPGIAMATHKDDEERFFPSNGILIFGKQNAARDNADYSDVMPTSEEEIKTTNPVATEEYGIVADNLQQQNTAPQIGTVNSQGALPGMVWQNRDVYLQGPIWAKIPHTDGNFHPSPLMGGFGLKHPPPQILIKNTPVPADPPTTFNQSKLNSFITQYSTGQVSVEIEWELQKENSKRWNPEIQYTSNYYKSTSVDFAVNTEGVYSEPRPIGTRYLTRNL

SEQ ID NO: 3047 - protein, 738 aa, Artificial Sequence
  Description of Artificial Sequence: Synthetic polypeptide
MAADGYPPDWLEDNLSEGIREWWALKPGAPKPKANQQKQDDGRGLVLPGYKYLGPFNGLDKGEPVNAADAAALEHDKAYDQQLQAGDNPYLRYNHADAEFQERLQEDTSFGGNLGRAVFQAKKRVLEPLGLVEEGAKTAPGKKRPVEPSPQRSPDSSTGIGKKGQQPARKRLNFGQTGDSESVPDPQPLGEPPAAPSGVGPNTMAAGGGAPMADNNEGADGVGSSSGNWHCDSTWLGDRVITTSTRTWALPTYNNHLYKQISNGTSGGATNDNTYFGYSTPWGYFDFNRFHCHFSPRDWQRLINNNWGFRPKRLSFKLFNIQVKEVTQNEGTKTIANNLTSTIQVFTDSEYQLPYVLGSAHQGCLPPFPADVFTIPQYGYLTLNNGSQAVGRSSFYCLEYFPSQMLRTGNNFQFTYTFEDVPFHSSYAHSQSLDRLMNPLIDQYLYYLSRIQTTGGTANTQTLGFSQGGPNTMANQAKNWLPGPCYRQQRVSTTTGQNNNSNFAWTAGTKYHLNGRNSLANPGIAMATHKDDEERFFPSNGILIFGKQNAARDNADYSDVMPTSEEEIKTTNPVATEEYGIVADNLQQQNTAPQIGTVNSQGALPGMVWQNRDVYLQGPIWAKIPHTDGNFHPSPLMGGFGLKHPPPQILIKNTPVPADPPTTFNQSKLNSFITQYSTGQVSVEIEWELQKENSKRWNPEIQYTSNYYKSTSVDFAVNTEGVYSEPRPIGTRYLTRNL

SEQ ID NO: 3048 - protein, 738 aa, Artificial Sequence
  Description of Artificial Sequence: Synthetic polypeptide
MAADGYLPDWLEDNLSEGIREWWALKPGAPKPKANQQKQDDGRGLVLPGYKYLGPFNGLDKGEPVNAADAAALEHDKAYDQQLQAGDNPYLRYNHADAEFQERLQEDTSFGGNLGRAVFQAKKRVLEPLGLVEEGAKTAPGKKRPVEPSPQRSPDSSTGIGKKGQQPARKRLNFGQTGDSESVPDPQPLGEPPAAPSGVGPNTMAAGGGAPMADNNEGADGVGSSSGNWHCDSTWLGDRVITTSTRTWALPTYNNHLYKQISNGTSGGATNDNTYFGYSTPWGYFDFNRFHCHFSPRDWQRLINNNWGFRPKRLSFKLFNIQVKEVTQNEGTKTIANNLTSTIQVFTDSEYQLPYVLGSAHQGCLPPFPADVFTIPQYGYLTLNNGSQAVGRSSFYCLEYFPSQMLRTGNNFQFTYTFEDVPFHSSYAHSQSLDRLMNPLIDQYLYYLSRIQTTGGTANTQTLGSSQGGPNTMANQAKNWLPGPCYRQQRVSTTTGQNNNSNFAWTAGTKYHLNGRNSLANPGIAMATHKDDEERFFPSNGILIFGKQNAARDNADYSDVMPTSEEEIKTTNPVATEEYGIVADNLQQQNTAPQIGTVNSQGALPGMVWQNRDVYLQGPIWAKIPHTDGNFHPSPLMGGFGLKHPPPQILIKNTPVPADPPTTFNQSKLNSFITQYSTGQVSVEIEWELQKENSKRWNPEIQYTSNYYKSTSVDFAVNTEGVYSEPRPIGTRYLTRNL

SEQ ID NO: 3049 - protein, 738 aa, Artificial Sequence
  Description of Artificial Sequence: Synthetic polypeptide
MAADGYLPDWLEDNLSEGIREWWALKPGAPKPKANQQKQDDGRGLVLPGYKYLGPFNGLDKGEPVNAADAAALEHDKAYDQQLQAGDNPYLRYNHADAEFQERLQEDTSFGGNLGRAVFQAKKRVLEPLGLVEEGAKTAPGKKRPVEPSPQRSPDSSTGIGKKGQQPARKRLNFGQTGDSESVPDPQPLGEPPAAPSGVGPNTMAAGGGAPMADNNEGADGVGSSSGNWHCDSTWLGDRVITTSTRTWALPTYNNHLYKQISNGTSGGATNDNTYFGYSTPWGYFDFNRFHCHFSPRDWQRLINNNWGFRPKRLSFKLFNIQVKEVTQNEGTKTIANNLTSTIQVFTDSEYQLPYVLGSAHQGCLPPFPADVFTIPQYGYLTLNNGSQAVGRSSFYCLEYFPSQMLRTGNNFQFTYTFEDVPFHSSYAHSQSLDRLMNPLIGQYLYYLSRIQTTGGTANTQTLGFSQGGPNTMANQAKNWLPGPCYRQQRVSTTTGQNNNSNFAWTAGTKYHLNGRNSLANPGIAMATHKDDEERFFPSNGILIFGKQNAARDNADYSDVMPTSEEEIKTTNPVATEEYGIVADNLQQQNTAPQIGTVNSQGALPGMVWQNRDVYLQGPIWAKIPHTDGNFHPSPLMGGFGLKHPPPQILIKNTPVPADPPTTFNQSKLNSFITQYSTGQVSVEIEWELQKENSKRWNPEIQYTSNYYKSTSVDFAVNTEGVYSEPRPIGTRYLTRNL

SEQ ID NO: 3050 - protein, 738 aa, Artificial Sequence
  Description of Artificial Sequence: Synthetic polypeptide
MAADGYLPDWLEDNLSEGIREWWALKPGAPKPKANQQKQDDGRGLVLPGYKYLGPFNGLDKGEPVNAADAAALEHDKAYDQQLQAGDNPYLRYNHADAEFQERLQEDTSFGGNLGRAVFQAKKRVLEPLGLVEEGAKTAPGKKRPVEPSPQRSPDSSTGIGKKGQQPARKRLNFGQTGDSESVPDPQPLGEPPAAPSGVGPNTMAAGGGAPMADNNEGADGVGSSSGNWHCDSTWLGDRVITTSTRTWALPTYNNHLYKQISNGTSGGATNDNTYFGYSTPWGYFDFNRFHCHFSPRDWQRLINNNWGFRPKRPSFKLFNIQVKEVTQNEGTKTIANNLTSTIQVFTDSEYQLPYVLGSAHQGCLPPFPADVFTIPQYGYLTLNNGSQAVGRSSFYCLEYFPSQMLRTGNNFQFTYTFEDVPFHSSYAHSQSLDRLMNPLIDQYLYYLSRIQTTGGTANTQTLGFSQGGPNTMANQAKNWLPGPCYRQQRVSTTTGQNNNSNFAWTAGTKYHLNGRNSLANPGIAMATHKDDEERFFPSNGILIFGKQNAARDNADYSDVMPTSEEEIKTTNPVATEEYGIVADNLQQQNTAPQIGTVNSQGALPGMVWQNRDVYLQGPIWAKIPHTDGNFHPSPLMGGFGLKHPPPQILIKNTPVPADPPTTFNQSKLNSFITQYSTGQVSVEIEWELQKENSKRWNPEIQYTSNYYKSTSVDFAVNTEGVYSEPRPIGTRYLTRNL

SEQ ID NO: 3051 - protein, 738 aa, Artificial Sequence
  Description of Artificial Sequence: Synthetic polypeptide
MAADGYLPDWLEDNLSEGIREWWALKPGAPKPKANQQKQDDGRGLVLPGYKYLGPFNGLDKGEPVNAADAAALEHDKAYDQQLQAGDNPYLRYNHADAEFQERLQEDTSFGGNLGRAVFQAKKRVLEPLGLVEEGAKTAPGKKRPVEPSPQRSPDSSTGIGKKGQQPARKRLNFGQTGDSESVPDPQPLGEPPAAPSGVGPNTMAAGGGAPMADNNEGADGVGSSSGNWHCDSTWLGDRVITTSTRTWALPTYNNHLYKQISNGTSGGATNDNTYFGYSTPWGYFDFNRFHCHFSPRDWQRLINNNWGFRPKRLSFKLFNIQVKEVTQNEGTKTIANNLTSTIQVFTDSEYQLPYVLGSAHQGCLPPFPADVFTIPQYGYLTLNNGSQAVGRSSFYCLEYFPSQMLRTGNNFQFTYTFEDVPFHSSYAHSQSLDRLMNPLIDQYLYYLSRIQTTGGTANTQTLGFSQGGPNTMANQAKNWLPGPCYRQQRVSTTTGQNNNSNFAWTAGTKYHLNGRNSLANPGIAMATHKDDGERFFPSNGILIFGKQNAARDNADYSDVMPTSEEEIKTTNPVATEEYGIVADNLQQQNTAPQIGTVNSQGALPGMVWQNRDVYLQGPIWAKIPHTDGNFHPSPLMGGFGLKHPPPQILIKNTPVPADPPTTFNQSKLNSFITQYSTGQVSVEIEWELQKENSKRWNPEIQYTSNYYKSTSVDFAVNTEGVYSEPRPIGTRYLTRNL

SEQ ID NO: 3052 - protein, 738 aa, Artificial Sequence
  Description of Artificial Sequence: Synthetic polypeptide
MAADGYLPDWLEDNLSEGIREWWALKPGAPKPKANQQKQDDGRGLVLPGYKYLGPFNGLDKGEPVNAADAAALEHDKAYDQQLQAGDNPYLRYNHADAEFQERLQEDTSFGGNLGRAVFQAKKRVLEPLGLVEEGAKTAPGKKRPVEPSPQRSPDSSTGIGKKGQQPARKRLNFGQTGDSESVPDPQPLGEPPAAPSGVGPNTMAAGGGAPMADNNEGADGVGSSSGNWHCDSTWLGDRVITTSTRTWAPPTYNNHLYKQISNGTSGGATNDNTYFGYSTPWGYFDFNRFHCHFSPRDWQRLINNNWGFRPKRLSFKLFNIQVKEVTQNEGTKTIANNLTSTIQVFTDSEYQLPYVLGSAHQGCLPPFPADVFTIPQYGYLTLNNGSQAVGRSSFYCLEYFPSQMLRTGNNFQFTYTFEDVPFHSSYAHSQSLDRLMNPLIDQYLYYLSRIQTTGGTANTQTLGFSQGGPNTMANQAKNWLPGPCYRQQRVSTTTGQNNNSNFAWTAGTKYHLNGRNSLANPGIAMATHKDDEERFFPSNGILIFGKQNAARDNADYSDVMPTSEEEIKTTNPVATEEYGIVADNLQQQNTAPQIGTVNSQGALPGMVWQNRDVYLQGPIWAKIPHTDGNFHPSPLMGGFGLKHPPPQILIKNTPVPADPPTTFNQSKLNSFITQYSTGQVSVEIEWELQKENSKRWNPEIQYTSNYYKSTSVDFAVNTEGVYSEPRPIGTRYLTRNL

SEQ ID NO: 3053 - protein, 738 aa, Artificial Sequence
  Description of Artificial Sequence: Synthetic polypeptide
MAADGYLPDWLEDNLSEGIREWWALKPGAPKPKANQQKQDDGRGLVLPGYKYLGPFNGLDKGEPVNAADAAALEHDKAYDQQLQAGDNPYLRYNHADAEFQERLQEDTSFGGNLGRAVFQAKKRVLEPLGLVEEGAKTAPGKKRPVEPSPQRSPDSSTGIGKKGQQPARKRLNFGQTGDSESVPDPQPLGEPPAAPSGVGPNTMAAGGGAPMADNNEGADGVGSSSGNWHCDSTWLGDRVITTSTRTWALPTYNNHLYKQISNGTSGGATNDNTYFGYSTPWGYFDFNRFHCHFSPRDWQRLINNNWGFRPKRLGFKLFNIQVKEVTQNEGTKTIANNLTSTIQVFTDSEYQLPYVLGSAHQGCLPPFPADVFTIPQYGYLTLNNGSQAVGRSSFYCLEYFPSQMLRTGNNFQFTYTFEDVPFHSSYAHSQSLDRLMNPLIDQYLYYLSRIQTTGGTANTQTLGFSQGGPNTMANQAKNWLPGPCYRQQRVSTTTGQNNNSNFAWTAGTKYHLNGRNSLANPGIAMATHKDDEERFFPSNGILIFGKQNAARDNADYSDVMPTSEEEIKTTNPVATEEYGIVADNLQQQNTAPQIGTVNSQGALPGMVWQNRDVYLQGPIWAKIPHTDGNFHPSPLMGGFGLKHPPPQILIKNTPVPADPPTTFNQSKLNSFITQYSTGQVSVEIEWELQKENSKRWNPEIQYTSNYYKSTSVDFAVNTEGVYSEPRPIGTRYLTRNL

SEQ ID NO: 3054 - protein, 738 aa, Artificial Sequence
  Description of Artificial Sequence: Synthetic polypeptide
MAADGYLPDWLEDNLSEGIREWWALKPGAPKPKANQQKQDDGRGLVLPGYKYLGPFNGLDKGEPVNAADAAALEHDKAYDQQLQAGDNPYLRYNHADAEFQERLQEDTSFGGNLGRAVFQAKKRVLEPLGLVEEGAKTAPGKKRPVEPSPQRSPDSSTGIGKKGQQPARKRLNFGRTGDSESVPDPQPLGEPPAAPSGVGPNTMAAGGGAPMADNNEGADGVGSSSGNWHCDSTWLGDRVITTSTRTWALPTYNNHLYKQISNGTSGGATNDNTYFGYSTPWGYFDFNRFHCHFSPRDWQRLINNNWGFRPKRLSFKLFNIQVKEVTQNEGTKTIANNLTSTIQVFTDSEYQLPYVLGSAHQGCLPPFPADVFTIPQYGYLTLNNGSQAVGRSSFYCLEYFPSQMLRTGNNFQFTYTFEDVPFHSSYAHSQSLDRLMNPLIDQYLYYLSRIQTTGGTANTQTLGFSQGGPNTMANQAKNWLPGPCYRQQRVSTTTGQNNNSNFAWTAGTKYHLNGRNSLANPGIAMATHKDDEERFFPSNGILIFGKQNAARDNADYSDVMPTSEEEIKTTNPVATEEYGIVADNLQQQNTAPQIGTVNSQGALPGMVWQNRDVYLQGPIWAKIPHTDGNFHPSPLMGGFGLKHPPPQILIKNTPVPADPPTTFNQSKLNSFITQYSTGQVSVEIEWELQKENSKRWNPEIQYTSNYYKSTSVDFAVNTEGVYSEPRPIGTRYLTRNL

SEQ ID NO: 3055 - protein, 738 aa, Artificial Sequence
  Description of Artificial Sequence: Synthetic polypeptide
MAADGYLPDWLEDNLSEGIREWWALKPGAPKPKANQQKQDDGRGLVLPGYKYLGPFNGLDKGEPVNAADAAALEHDKAYDQQLQAGDNPYLRYNHADAEFQERLQEDTSFGGNLGRAVFQAKKRVLEPLGLVEEGAKTAPGKKRPVEPSPQRSPDSSTGIGKKGQQPARKRLNFGQTGDSESVPDPQPLGEPPAAPSGVGPNTMAAGGGAPMADNNEGADGVGSSSGNWHCDSTWLGDRVITTSTRTWALPTYNNHLYKQISNGTSGGATNDNTYFGYSTPWGYFDFNRFHCHFSPRDWQRLINNNWGFRPKRLSFKLFNIQVKEVTQNEGTKTIANNLTSTIQVFTDSEYQLPYVLGSAHQGCLPPFPADVFTIPQYGYLTLNNGSQAVGRSSFYCLEYFPSQMLRTGNNFQFTYTFEDVPFHSSYAHSQSLDRLMNPLIDQYLYYLSRIQTTGGTANTQTLGFSQGGPNTVANQAKNWLPGPCYRQQRVSTTTGQNNNSNFAWTAGTKYHLNGRNSLANPGIAMATHKDDEERFFPSNGILIFGKQNAARDNADYSDVMPTSEEEIKTTNPVATEEYGIVADNLQQQNTAPQIGTVNSQGALPGMVWQNRDVYLQGPIWAKIPHTDGNFHPSPLMGGFGLKHPPPQILIKNTPVPADPPTTFNQSKLNSFITQYSTGQVSVEIEWELQKENSKRWNPEIQYTSNYYKSTSVDFAVNTEGVYSEPRPIGTRYLTRNL

SEQ ID NO: 3056 - protein, 738 aa, Artificial Sequence
  Description of Artificial Sequence: Synthetic polypeptide
MAADGYLPDWLEDNLSEGIREWWALKPGAPKPKANQQKQDDGRGLVLPGYKYLGPFNGLDKGEPVNAADAAALEHDKAYDQQLQAGDNPYLRYNHADAEFQERLQEDTSFGGNLGRAVFQAKKRVLEPLGLVEEGAKTAPGKKRPVEPSPQRSPDSSTGIGKKGQQPARKRLNFGQTGDSESVPDPQPLGEPPAAPSGVGPNTMAAGGGAPMADNNEGADGVGSSSGNWHCDSTWLGDRVITTSTRTWALPTYNNHLYKQISNGTSGGATNDNTYFGYSTPWGYFDFNRFHCHFSPRDWQRLINNNWGFRPKRLSFKLFNIQVKEVTQNEGTKTIANNLTSTIQVFTDSEYQLPYVLGSAHQGCLPPFPADVFTIPQYGYLTLNNGSQAVGRSSFYCPEYFPSQMLRTGNNFQFTYTFEDVPFHSSYAHSQSLDRLMNPLIDQYLYYLSRIQTTGGTANTQTLGFSQGGPNTMANQAKNWLPGPCYRQQRVSTTTGQNNNSNFAWTAGTKYHLNGRNSLANPGIAMATHKDDEERFFPSNGILIFGKQNAARDNADYSDVMPTSEEEIKTTNPVATEEYGIVADNLQQQNTAPQIGTVNSQGALPGMVWQNRDVYLQGPIWAKIPHTDGNFHPSPLMGGFGLKHPPPQILIKNTPVPADPPTTFNQSKLNSFITQYSTGQVSVEIEWELQKENSKRWNPEIQYTSNYYKSTSVDFAVNTEGVYSEPRPIGTRYLTRNL

SEQ ID NO: 3057 - protein, 738 aa, Artificial Sequence
  Description of Artificial Sequence: Synthetic polypeptide
MAADGYLPDWLEDNLSEGIREWWALKPGAPKPKANQQKQDDGRGLVLPGYKYLGPFNGLDKGEPVNAADAAALEHDKAYDQQLQAGDNPYLRYNHADAEFQERLQEDTSFGGNLGRAVFQAKKRVLEPLGLVEEGAKTAPGKKRPVEPSPQRSPDSSTGIGKKGQQPARKRLNFGQTGDSESVPDPQPLGEPPAAPSGVGPNTMAAGGGAPMADNNEGADGVGSSSGNWHCDSTWLGDRVITTSTRTWALPTYNNHLYKQISNGTSGGATNDNTYFGYSTPWGYFDFNRFHCHFSPRDWQRLINNNWGFRPKRLSFKLFNIQVKEVTQNEGTKTIANNLTSTIQVFTDSEYQLPYVLGSAHQGCLPPFPADVFTIPQYGYLTLNNGSQAVGRSSFYCLEYFPSQMLRTGNNFQFTYTFEDVPFHSSYAHSQSLDRLMNPLIDQYLYYLSRIQTTGGTANTQTLGFSQGGPNTMANQAKNWLPGPCYRQQRVSTTTGQNNNSNFAWTAGTKYHLNGRNSLANPGIAMATHKDDEERFFPSNGILIFGKQNAARDNADYSDVMPTSEEEIKTTNPVATEEYGIVADSLQQQNTAPQIGTVNSQGALPGMVWQNRDVYLQGPIWAKIPHTDGNFHPSPLMGGFGLKHPPPQILIKNTPVPADPPTTFNQSKLNSFITQYSTGQVSVEIEWELQKENSKRWNPEIQYTSNYYKSTSVDFAVNTEGVYSEPRPIGTRYLTRNL

SEQ ID NO: 3058 - protein, 738 aa, Artificial Sequence
  Description of Artificial Sequence: Synthetic polypeptide
MAADGYLPDWLEDNLSEGIREWWALKPGAPKPKANQQKQGDGRGLVLPGYKYLGPFNGLDKGEPVNAADAAALEHDKAYDQQLQAGDNPYLRYNHADAEFQERLQEDTSFGGNLGRAVFQAKKRVLEPLGLVEEGAKTAPGKKRPVEPSPQRSPDSSTGIGKKGQQPARKRLNFGQTGDSESVPDPQPLGEPPAAPSGVGPNTMAAGGGAPMADNNEGADGVGSSSGNWHCDSTWLGDRVITTSTRTWALPTYNNHLYKQISNGTSGGATNDNTYFGYSTPWGYFDFNRFHCHFSPRDWQRLINNNWGFRPKRLSFKLFNIQVKEVTQNEGTKTIANNLTSTIQVFTDSEYQLPYVLGSAHQGCLPPFPADVFTIPQYGYLTLNNGSQAVGRSSFYCLEYFPSQMLRTGNNFQFTYTFEDVPFHSSYAHSQSLDRLMNPLIDQYLYYLSRIQTTGGTANTQTLGFSQGGPNTMANQAKNWLPGPCYRQQRVSTTTGQNNNSNFAWTAGTKYHLNGRNSLANPGIAMATHKDDEERFFPSNGILIFGKQNAARDNADYSDVMPTSEEEIKTTNPVATEEYGIVADNLQQQNTAPQIGTVNSQGALPGMVWQNRDVYLQGPIWAKIPHTDGNFHPSPLMGGFGLKHPPPQILIKNTPVPADPPTTFNQSKLNSFITQYSTGQVSVEIEWELQKENSKRWNPEIQYTSNYYKSTSVDFAVNTEGVYSEPRPIGTRYLTRNL

SEQ ID NO: 3059 - protein, 738 aa, Artificial Sequence
  Description of Artificial Sequence: Synthetic polypeptide
MAADGYLPDWLEDNLSEGIREWWALKPGAPKPKANQQKQDDGRGLVLPGYKYLGPFNGLDKGEPVNAADAAALEHDKAYDQQLQAGDNPYLRYNHADAEFQERLQEDTSFGGNLGRAVFQAKKRVLEPLGLVEEGAKTAPGKKRPVEPSPQRSPDSSTGIGKKGQQPARKRLNFGQTGDSESVPDPQPLGEPPAAPSGVGPNTMAAGGGAPMADNNEGADGVGSSSGNWHCDSTWLGDRVITTSTRTWALPTYNNHLYKQISNGTSGGATNDNTYFGYSTPWGYFDFNRFHCHFSPRDWQRLINNNWGFRPKRLSSKLFNIQVKEVTQNEGTKTIANNLTSTIQVFTDSEYQLPYVLGSAHQGCLPPFPADVFTIPQYGYLTLNNGSQAVGRSSFYCLEYFPSQMLRTGNNFQFTYTFEDVPFHSSYAHSQSLDRLMNPLIDQYLYYLSRIQTTGGTANTQTLGFSQGGPNTMANQAKNWLPGPCYRQQRVSTTTGQNNNSNFAWTAGTKYHLNGRNSLANPGIAMATHKDDEERFFPSNGILIFGKQNAARDNADYSDVMPTSEEEIKTTNPVATEEYGIVADNLQQQNTAPQIGTVNSQGALPGMVWQNRDVYLQGPIWAKIPHTDGNFHPSPLMGGFGLKHPPPQILIKNTPVPADPPTTFNQSKLNSFITQYSTGQVSVEIEWELQKENSKRWNPEIQYTSNYYKSTSVDFAVNTEGVYSEPRPIGTRYLTRNL

SEQ ID NO: 3060 - protein, 738 aa, Artificial Sequence
  Description of Artificial Sequence: Synthetic polypeptide
MAADGYLPDWLEDNLSEGIREWWALKPGAPKPKANQQKQDDGRGLVLPGYKYLGPFNGLDKGEPVNAADAAALEHDKAYDQQLQAGDNPYLRYNHADAEFQERLQEDTSFGGNLGRAVFQAKKRVLEPLGLVEEGAKTAPGKKRPVEPSPQRSPDSSTGIGKKGQQPARKRLNFGQTGDSESVPDPQPLGEPPAAPSGVGPNTMAAGGGAPMADNNEGADGVGSSSGNWHCDSTWLGDRVITTSTRTWALPTYNNHLYKQISNGTSGGATNDNTYFGYSTPWGYFDFNRFHCHFSPRDWQRLINNNWGFRPKRLSFKLFNIQVKEVTQNEGTKTIANNLTSTIQVFTDSEYQLPYVLGSAHQGCLPPFPADVFTIPQYGYLTLNNGSQAVGRSSFYCLEYFPSQMLRTGNNFQFTYAFEDVPFHSSYAHSQSLDRLMNPLIDQYLYYLSRIQTTGGTANTQTLGFSQGGPNTMANQAKNWLPGPCYRQQRVSTTTGQNNNSNFAWTAGTKYHLNGRNSLANPGIAMATHKDDEERFFPSNGILIFGKQNAARDNADYSDVMPTSEEEIKTTNPVATEEYGIVADNLQQQNTAPQIGTVNSQGALPGMVWQNRDVYLQGPIWAKIPHTDGNFHPSPLMGGFGLKHPPPQILIKNTPVPADPPTTFNQSKLNSFITQYSTGQVSVEIEWELQKENSKRWNPEIQYTSNYYKSTSVDFAVNTEGVYSEPRPIGTRYLTRNL

SEQ ID NO: 3061 - protein, 738 aa, Artificial Sequence
  Description of Artificial Sequence: Synthetic polypeptide
MAADGYLPDWLEDNLSEGIREWWALKPGAPKPKANQQKQDDGRGLVLPGYKYLGPFNGLDKGEPVNAADAAALEHDKAYDQQLQAGDNPYLRYNHADAEFQERLQEDTSFGGNLGRAVFQAKKRVLEPLGLVEEGAKTAPGKKRPVEPSPQRSPDSSTGIGKKGQQPARKRLNFGQTGDSESVPDPQPLGEPPAAPSGVGPNTMAAGGGAPMADNNEGADGVGSSSGNWHCDSTWLGDRVITTSTRTWALPAYNNHLYKQISNGTSGGATNDNTYFGYSTPWGYFDFNRFHCHFSPRDWQRLINNNWGFRPKRLSFKLFNIQVKEVTQNEGTKTIANNLTSTIQVFTDSEYQLPYVLGSAHQGCLPPFPADVFTIPQYGYLTLNNGSQAVGRSSFYCLEYFPSQMLRTGNNFQFTYTFEDVPFHSSYAHSQSLDRLMNPLIDQYLYYLSRIQTTGGTANTQTLGFSQGGPNTMANQAKNWLPGPCYRQQRVSTTTGQNNNSNFAWTAGTKYHLNGRNSLANPGIAMATHKDDEERFFPSNGILIFGKQNAARDNADYSDVMPTSEEEIKTTNPVATEEYGIVADNLQQQNTAPQIGTVNSQGALPGMVWQNRDVYLQGPIWAKIPHTDGNFHPSPLMGGFGLKHPPPQILIKNTPVPADPPTTFNQSKLNSFITQYSTGQVSVEIEWELQKENSKRWNPEIQYTSNYYKSTSVDFAVNTEGVYSEPRPIGTRYLTRNL

SEQ ID NO: 3062 - protein, 738 aa, Artificial Sequence
  Description of Artificial Sequence: Synthetic polypeptide
MAADGYLPDWLEDNLSEGIREWWALKPGAPKPKANQQKQDDGRGLVLPGYKYLGPFNGLDKGEPVNAADAAALEHDKAYDQQLQAGDNPYLRYNHADAEFQERLQEDTSFGGSLGRAVFQAKKRVLEPLGLVEEGAKTAPGKKRPVEPSPQRSPDSSTGIGKKGQQPARKRLNFGQTGDSESVPDPQPLGEPPAAPSGVGPNTMAAGGGAPMADNNEGADGVGSSSGNWHCDSTWLGDRVITTSTRTWALPTYNNHLYKQISNGTSGGATNDNTYFGYSTPWGYFDFNRFHCHFSPRDWQRLINNNWGFRPKRLSFKLFNIQVKEVTQNEGTKTIANNLTSTIQVFTDSEYQLPYVLGSAHQGCLPPFPADVFTIPQYGYLTLNNGSQAVGRSSFYCLEYFPSQMLRTGNNFQFTYTFEDVPFHSSYAHSQSLDRLMNPLIDQYLYYLSRIQTTGGTANTQTLGFSQGGPNTMANQAKNWLPGPCYRQQRVSTTTGQNNNSNFAWTAGTKYHLNGRNSLANPGIAMATHKDDEERFFPSNGILIFGKQNAARDNADYSDVMPTSEEEIKTTNPVATEEYGIVADNLQQQNTAPQIGTVNSQGALPGMVWQNRDVYLQGPIWAKIPHTDGNFHPSPLMGGFGLKHPPPQILIKNTPVPADPPTTFNQSKLNSFITQYSTGQVSVEIEWELQKENSKRWNPEIQYTSNYYKSTSVDFAVNTEGVYSEPRPIGTRYLTRNL

SEQ ID NO: 3063 - protein, 738 aa, Artificial Sequence
  Description of Artificial Sequence: Synthetic polypeptide
MAADGYLPDWLEDNLSEGIREWWALKPGAPKPKANQQKQDDGRGLVLPGYKYLGPFNGLDKGEPVNAADAAALEHDKAYDQQLQAGDNPYLRYNHADAEFQERLQEDTSFGGNLGRAVFQAKKRVLEPLGLVEEGAKTAPGKKRPVEPSPQRSPDSSTGIGKKGQQPARKRLNFGQTGDSESVPDPQPLGEPPAAPSGVGPNTMAAGGGAPMADNNEGADGVGSSSGNWHCDSTWLGDRVITTSTRTWALPTYNNHLYKQISNGTSGGATNDNTYFGYSTPWGYFDFNRFHCHFSPRDWQRLINNNWGFRPKRLSFKLFNIQVKEVTQNEGTKTIANNLTSTIQVFTDSEYQLPYVLGSAHQGCLPPFPADVFTIPQYGYLTLNNGSQAVGRSSFYCLEYFPSQMLRTGNNFQFTYTFEDVPFHSSYAHSQSLDRLMNPLIDQYLYYLSRIQTTGGTANTQTLGFSQGGPNTMANQATNWLPGPCYRQQRVSTTTGQNNNSNFAWTAGTKYHLNGRNSLANPGIAMATHKDDEERFFPSNGILIFGKQNAARDNADYSDVMPTSEEEIKTTNPVATEEYGIVADNLQQQNTAPQIGTVNSQGALPGMVWQNRDVYLQGPIWAKIPHTDGNFHPSPLMGGFGLKHPPPQILIKNTPVPADPPTTFNQSKLNSFITQYSTGQVSVEIEWELQKENSKRWNPEIQYTSNYYKSTSVDFAVNTEGVYSEPRPIGTRYLTRNL

SEQ ID NO: 3064 - protein, 738 aa, Artificial Sequence
  Description of Artificial Sequence: Synthetic polypeptide
MAADGYLPDWLEDNLSEGIREWWALKPGAPKPKANQQKQDDGRGLVLPGYKYLGPFNGLDKGEPVNAADAAALEHDKAYGQQLQAGDNPYLRYNHADAEFQERLQEDTSFGGNLGRAVFQAKKRVLEPLGLVEEGAKTAPGKKRPVEPSPQRSPDSSTGIGKKGQQPARKRLNFGQTGDSESVPDPQPLGEPPAAPSGVGPNTMAAGGGAPMADNNEGADGVGSSSGNWHCDSTWLGDRVITTSTRTWALPTYNNHLYKQISNGTSGGATNDNTYFGYSTPWGYFDFNRFHCHFSPRDWQRLINNNWGFRPKRLSFKLFNIQVKEVTQNEGTKTIANNLTSTIQVFTDSEYQLPYVLGSAHQGCLPPFPADVFTIPQYGYLTLNNGSQAVGRSSFYCLEYFPSQMLRTGNNFQFTYTFEDVPFHSSYAHSQSLDRLMNPLIDQYLYYLSRIQTTGGTANTQTLGFSQGGPNTMANQAKNWLPGPCYRQQRVSTTTGQNNNSNFAWTAGTKYHLNGRNSLANPGIAMATHKDDEERFFPSNGILIFGKQNAARDNADYSDVMPTSEEEIKTTNPVATEEYGIVADNLQQQNTAPQIGTVNSQGALPGMVWQNRDVYLQGPIWAKIPHTDGNFHPSPLMGGFGLKHPPPQILIKNTPVPADPPTTFNQSKLNSFITQYSTGQVSVEIEWELQKENSKRWNPEIQYTSNYYKSTSVDFAVNTEGVYSEPRPIGTRYLTRNL

SEQ ID NO: 3065 - protein, 738 aa, Artificial Sequence
  Description of Artificial Sequence: Synthetic polypeptide
MAADGYLPDWLEDNLSEGIREWWALKPGAPKPKANQQKQDDGRGLVLPGYKYLGPFNGLDKGEPVNAADAAALEHDKAYDQQLQAGDNPYLRYNHADAEFQERLQEDTSFGGNLGRAVFQAKKRVLEPLGLVEEGAKTAPGKKRPVEPSPQRSPDSSTGIGKKGQQPARKRLNFGQTGDSESVPDPQPLGEPPAAPSGVGPNTMAAGGGAPMADNNEGADGVGSSSGNWHCDSTWLGDRVITTSTRTWALPTYNNHLYKQISNGTSGGATNDNTYFGYSTPWGYFDFNRFHCHFSPRDWQRLINNNWGFRPKRLSFKLLNIQVKEVTQNEGTKTIANNLTSTIQVFTDSEYQLPYVLGSAHQGCLPPFPADVFTIPQYGYLTLNNGSQAVGRSSFYCLEYFPSQMLRTGNNFQFTYTFEDVPFHSSYAHSQSLDRLMNPLIDQYLYYLSRIQTTGGTANTQTLGFSQGGPNTMANQAKNWLPGPCYRQQRVSTTTGQNNNSNFAWTAGTKYHLNGRNSLANPGIAMATHKDDEERFFPSNGILIFGKQNAARDNADYSDVMPTSEEEIKTTNPVATEEYGIVADNLQQQNTAPQIGTVNSQGALPGMVWQNRDVYLQGPIWAKIPHTDGNFHPSPLMGGFGLKHPPPQILIKNTPVPADPPTTFNQSKLNSFITQYSTGQVSVEIEWELQKENSKRWNPEIQYTSNYYKSTSVDFAVNTEGVYSEPRPIGTRYLTRNL

SEQ ID NO: 3066 - protein, 738 aa, Artificial Sequence
  Description of Artificial Sequence: Synthetic polypeptide
MAADGYLPDWLEDNLSEGIREWWALKPGAPKPKANQQKQDDGRGLVLPGYKYLGPFNGLDKGEPVNAADAAALEHDKAYDQQLQAGDNPYLRYNHADAEFQERLQEDTSFGGNLGRAVFQAKKRVLEPLGLVEEGAKTAPGKKRPVEPSPQRSPDSSTGIGKKGQQPARKRLNFGQTGDSESVPDPQPLGEPPAAPSGVGPNTMAAGGGAPMADNNEGADGVGSSSGNWHCDSTWLGDRVITTSTRTWALPTYNNHLYKQISNGTSGGATNDNTYFGYSTPWGYFDFNRFHCHFSPRDWQRLINNNWGFRPKRLSFKLFNIQVKEVTQNEGTKTIANNLTSTIQVFTDSEYQLPYVLGSAHQGCLPPFPADVFTIPQYGYLTLNNGSQAVGRSSFYCLEYFPSQMLRTGNNFQFTYTFEDVPFHSSYAHSQSLDRLMNPLIDQYLYYLSRIQTTGGTANTQTLGFSQGGPNTMANQAKNWLPGPCYRQQRVSTTTGQNNNSNFAWTAGTKYHLNGRNSLANPGIAMATHKDDEERFFPSNGILIFGKQNAARDNADYSDVVPTSEEEIKTTNPVATEEYGIVADNLQQQNTAPQIGTVNSQGALPGMVWQNRDVYLQGPIWAKIPHTDGNFHPSPLMGGFGLKHPPPQILIKNTPVPADPPTTFNQSKLNSFITQYSTGQVSVEIEWELQKENSKRWNPEIQYTSNYYKSTSVDFAVNTEGVYSEPRPIGTRYLTRNL

SEQ ID NO: 3067 - protein, 738 aa, Artificial Sequence
  Description of Artificial Sequence: Synthetic polypeptide
MAADGYLPDWLEDNLSEGIREWWALKPGAPKPKANQQKQDDGRGLVLPGYKYLGPFNGLDKGEPVNAADAAALEHDKAYDQQLQAGDNPYLRYNHADAEFQERLQEDTSFGGNLGRAVFQAKKRVLEPLGLVEEGAKTAPGKKRPVEPSPQRSPDSSTGIGKKGRQPARKRLNFGQTGDSESVPDPQPLGEPPAAPSGVGPNTMAAGGGAPMADNNEGADGVGSSSGNWHCDSTWLGDRVITTSTRTWALPTYNNHLYKQISNGTSGGATNDNTYFGYSTPWGYFDFNRFHCHFSPRDWQRLINNNWGFRPKRLSFKLFNIQVKEVTQNEGTKTIANNLTSTIQVFTDSEYQLPYVLGSAHQGCLPPFPADVFTIPQYGYLTLNNGSQAVGRSSFYCLEYFPSQMLRTGNNFQFTYTFEDVPFHSSYAHSQSLDRLMNPLIDQYLYYLSRIQTTGGTANTQTLGFSQGGPNTMANQAKNWLPGPCYRQQRVSTTTGQNNNSNFAWTAGTKYHLNGRNSLANPGIAMATHKDDEERFFPSNGILIFGKQNAARDNADYSDVMPTSEEEIKTTNPVATEEYGIVADNLQQQNTAPQIGTVNSQGALPGMVWQNRDVYLQGPIWAKIPHTDGNFHPSPLMGGFGLKHPPPQILIKNTPVPADPPTTFNQSKLNSFITQYSTGQVSVEIEWELQKENSKRWNPEIQYTSNYYKSTSVDFAVNTEGVYSEPRPIGTRYLTRNL

SEQ ID NO: 3068 - protein, 738 aa, Artificial Sequence
  Description of Artificial Sequence: Synthetic polypeptide
MAADGYLPDWLEDNLSEGIREWWALKPGAPKPKANQQKQDDGRGLVLPGYKYLGPFNGLDKGEPVNAADAAALEHDKAYDQQLQAGDNPYLRYNHADAEFQERLQEDTSFGGNLGRAVFQAKKRVLEPLGLVEEGAKTAPGKKRPVESSPQRSPDSSTGIGKKGQQPARKRLNFGQTGDSESVPDPQPLGEPPAAPSGVGPNTMAAGGGAPMADNNEGADGVGSSSGNWHCDSTWLGDRVITTSTRTWALPTYNNHLYKQISNGTSGGATNDNTYFGYSTPWGYFDFNRFHCHFSPRDWQRLINNNWGFRPKRLSFKLFNIQVKEVTQNEGTKTIANNLTSTIQVFTDSEYQLPYVLGSAHQGCLPPFPADVFTIPQYGYLTLNNGSQAVGRSSFYCLEYFPSQMLRTGNNFQFTYTFEDVPFHSSYAHSQSLDRLMNPLIDQYLYYLSRIQTTGGTANTQTLGFSQGGPNTMANQAKNWLPGPCYRQQRVSTTTGQNNNSNFAWTAGTKYHLNGRNSLANPGIAMATHKDDEERFFPSNGILIFGKQNAARDNADYSDVMPTSEEEIKTTNPVATEEYGIVADNLQQQNTAPQIGTVNSQGALPGMVWQNRDVYLQGPIWAKIPHTDGNFHPSPLMGGFGLKHPPPQILIKNTPVPADPPTTFNQSKLNSFITQYSTGQVSVEIEWELQKENSKRWNPEIQYTSNYYKSTSVDFAVNTEGVYSEPRPIGTRYLTRNL

SEQ ID NO: 3069 - protein, 738 aa, Artificial Sequence
  Description of Artificial Sequence: Synthetic polypeptide
MAADGYLPDWLEDNLSEGIREWWALKPGAPKPKANQQKQDDGRGLVLPGYKYLGPFNGLDKGEPVNAADAAALEHDKAYDQQLQAGDNPYLRYNHADAEFQERLQEDTSFGGNLGRAVFQAKKRVLEPLGLVEEGAKTAPGKKRPVEPSPQRSPDSSTGIGKKGQQPARKRLNFGQTGDSESVPDPQPLGEPPAAPSGAGPNTMAAGGGAPMADNNEGADGVGSSSGNWHCDSTWLGDRVITTSTRTWALPTYNNHLYKQISNGTSGGATNDNTYFGYSTPWGYFDFNRFHCHFSPRDWQRLINNNWGFRPKRLSFKLFNIQVKEVTQNEGTKTIANNLTSTIQVFTDSEYQLPYVLGSAHQGCLPPFPADVFTIPQYGYLTLNNGSQAVGRSSFYCLEYFPSQMLRTGNNFQFTYTFEDVPFHSSYAHSQSLDRLMNPLIDQYLYYLSRIQTTGGTANTQTLGFSQGGPNTMANQAKNWLPGPCYRQQRVSTTTGQNNNSNFAWTAGTKYHLNGRNSLANPGIAMATHKDDEERFFPSNGILIFGKQNAARDNADYSDVMPTSEEEIKTTNPVATEEYGIVADNLQQQNTAPQIGTVNSQGALPGMVWQNRDVYLQGPIWAKIPHTDGNFHPSPLMGGFGLKHPPPQILIKNTPVPADPPTTFNQSKLNSFITQYSTGQVSVEIEWELQKENSKRWNPEIQYTSNYYKSTSVDFAVNTEGVYSEPRPIGTRYLTRNL

SEQ ID NO: 3070 - protein, 738 aa, Artificial Sequence
  Description of Artificial Sequence: Synthetic polypeptide
MAADGYLPDWLEDNLSEGIREWWALKPGAPKPKANQQKQDDGRGLVLPGYKYLGPFNGLDKGEPVNAADAAALEHDKAYDQQLQAGDNPYLRYNHADAEFQERLQEDTSFGGNLGRAVFQAKKRVLEPLGLVEEGAKTAPGKKRPVEPSPQRSPDSSTGIGKKGQQPARKRLNFGQTGDSESVPDPQPLGEPPAAPSGVGPNTMAAGGGAPMADNNEGADGVGSSSGNWHCDSTWLGDRVITTSTRTWALPTYNNHLYKQISNGTSGGATNDNTYFGYSTPWGYFDFNRFHCHFSPRDWQRLINNNWGFRPKRLSFKLFNIQVKEVTQNEGTKTIANNLTSTIQVFTDSEYQLPYVLGSAHQGCLPPFPADVFTIPQYGYLTLNNGSQAVGRSSFYCLEYFPSQMLRTGNNFQFTYTFEDVPFHSSYAHSQSLDRLMNPLIDQYPYYLSRIQTTGGTANTQTLGFSQGGPNTMANQAKNWLPGPCYRQQRVSTTTGQNNNSNFAWTAGTKYHLNGRNSLANPGIAMATHKDDEERFFPSNGILIFGKQNAARDNADYSDVMPTSEEEIKTTNPVATEEYGIVADNLQQQNTAPQIGTVNSQGALPGMVWQNRDVYLQGPIWAKIPHTDGNFHPSPLMGGFGLKHPPPQILIKNTPVPADPPTTFNQSKLNSFITQYSTGQVSVEIEWELQKENSKRWNPEIQYTSNYYKSTSVDFAVNTEGVYSEPRPIGTRYLTRNL

SEQ ID NO: 3071 - protein, 738 aa, Artificial Sequence
  Description of Artificial Sequence: Synthetic polypeptide
MAADGYLPDWLEDNLSEGIREWWALKPGAPKPKANQQKQDDGRGLVLPGYKYLGPFNGLDKGEPVNAADAAALEHDKAYDQQLQAGDNPYLRYNHADAEFQERLQEDTSFGGNLGRAVFQAKKRVLEPLGLVEEGAKTAPGKKRPVEPSPQRSPDSSTGIGKKGQQPARKRLNFGQTGDSESVPDPQPLGEPPAAPSGVGPNTMAAGGGAPMADNNEGADGVGSSSGNWHCDSTWLGDRVITTSTRTWALPTYNNHLYKQISNGTSGGATNDNTYFGYSTPWGYFDFNRFHCHFSPRDWQRLINNNWGFRPKRLSFKLFNIQVKEVTQNEGTKTIANNLTSTIQVFTDSEYQLPYVLGSAHQGCLPPFPADVFTIPQYGYLTLNNGSQAVGRSSFYCLEYFPSQMLRTGNNFQFTYTFEDVPFHSSYAHSQSLDRLMNPLIDQYLYYLSRIQTTGGTANTQTLGFSQGGPNTMANQAKNWLPGPCYRQQRVSTTTGQSNNSNFAWTAGTKYHLNGRNSLANPGIAMATHKDDEERFFPSNGILIFGKQNAARDNADYSDVMPTSEEEIKTTNPVATEEYGIVADNLQQQNTAPQIGTVNSQGALPGMVWQNRDVYLQGPIWAKIPHTDGNFHPSPLMGGFGLKHPPPQILIKNTPVPADPPTTFNQSKLNSFITQYSTGQVSVEIEWELQKENSKRWNPEIQYTSNYYKSTSVDFAVNTEGVYSEPRPIGTRYLTRNL

SEQ ID NO: 3072 - protein, 738 aa, Artificial Sequence
  Description of Artificial Sequence: Synthetic polypeptide
MAADGYLPDWLEDNLSEGIREWWALKPGAPKPKANQQKQDDGRGLVLPGYKYLGPFNGLDKGEPVNAADAAALEHDKAYDQQLQAGDNPYLRYNHADAEFQERLQEDTSFGGNLGRAVFQAKKRVLEPLGLVEEGAKTAPGKKRPVEPSPQRSPDSSTGIGKKGQQPARKRLNFGQTGDSESVPDPQPLGEPPAAPSGVGPNTMAAGGGAPMADNNEGADGVGSSSGNWHCDSTWLGDRVITTSTRTWALPTYNNHLYKQISNGTSGGATNDNTYFGYSTPWGYFDFNRFHCHFSPRDWQRLINNNWGFRPKRLSFKLFNIQVKEVTQNEGTKTIANNLTSTIQVFTDSEYQLPYVLGSAHQGCLPPFPADVFTIPQYGYLTLNNGSQAVGRSSFYCLEYFPSQMLRTGNNFQFTYTFEDVPFHSSYAHSQSLDRLMNPLIDQYLYYLSRIQTTGGTANTQTLGFSQGGPNTMANQAKNWLPGPRYRQQRVSTTTGQNNNSNFAWTAGTKYHLNGRNSLANPGIAMATHKDDEERFFPSNGILIFGKQNAARDNADYSDVMPTSEEEIKTTNPVATEEYGIVADNLQQQNTAPQIGTVNSQGALPGMVWQNRDVYLQGPIWAKIPHTDGNFHPSPLMGGFGLKHPPPQILIKNTPVPADPPTTFNQSKLNSFITQYSTGQVSVEIEWELQKENSKRWNPEIQYTSNYYKSTSVDFAVNTEGVYSEPRPIGTRYLTRNL

SEQ ID NO: 3073 - protein, 738 aa, Artificial Sequence
  Description of Artificial Sequence: Synthetic polypeptide
MAADGYLPDWLEDNLSEGIREWWALKPGAPKPKANQQKQDDGRGLVLPGYKYLGPFNGLDKGEPVNAADAAALEHDKAYDQQLQAGDNPYLRYNHADAEFQERLQEDTSFGGNLGRAVFQAKKRVLEPLGLVEEGAKTAPGKKRPVEPSPQRSPDSSTGIGKKGQQPARKRLNFGQTGDSESVPDPQPLGEPPAAPSGVGPNTMAAGGGAPMADNNEGADGVGSSSGNWHCDSTWLGDRVITTSTRTWALPTYNNHLYKQISNGTSGGATNDNTYFGYSTPWGYFDFNRFHCHFSPRDWQRLINNNWGFRPKRLSFKLFNIQVKEVTQNEGTKTIANNLTSTIQVFTDSEYQLPYVLGSAHQGCLPPFPADVFTIPQYGYLTLNNGSQAVGRSSFYCLEYFPSQMLRTGNNFQFTYTFEDVPFHSSYAHSQSLDRLMNPLIDQYLYYLSRIQTTGGTANTQTLGFSQGGPNTMANQAKNWLPGPCYRQQRVSTTTGQNNNSNFAWTAGTKYHLNGRNSLANPGIAMATHKDDEERFFPSNGILIFGKQNAARDNADYSDVMPTSEEEIKTTNPVATEEYGIVADNLQQQNTAPQIGTVNSQGALPGMVWQNRDVYLQGPIWAKIPHTDGNFHPSPLMGGFGLKHPPPQILIKNAPVPADPPTTFNQSKLNSFITQYSTGQVSVEIEWELQKENSKRWNPEIQYTSNYYKSTSVDFAVNTEGVYSEPRPIGTRYLTRNL

SEQ ID NO: 3074 - protein, 738 aa, Artificial Sequence
  Description of Artificial Sequence: Synthetic polypeptide
MAADGYLPDWLEDNLSEGIREWWALKPGAPKPKANQQKQDDGRGLVLPGYKYLGPFNGLDKGEPVNAADAAALEHDKAYDQQLQAGDNPYLRYNHADAEFQERLQEDTSFGGNLGRAVFQAKKRVLEPLGLVEEGAKTAPGKKRPVEPSPQRSPDSSTGIGKKGQQPARKRLNFGQTGDSESVPDPQPLGEPPAAPSGVGPNTMAAGGGAPMADNNEGADGVGSSSGNWHCDSTWLGDRVITTSTRTWALPTYNNHLYKQISNGTSGGATNDNTYFGYSTPWGYFDFNRFHCHFSPRDRQRLINNNWGFRPKRLSFKLFNIQVKEVTQNEGTKTIANNLTSTIQVFTDSEYQLPYVLGSAHQGCLPPFPADVFTIPQYGYLTLNNGSQAVGRSSFYCLEYFPSQMLRTGNNFQFTYTFEDVPFHSSYAHSQSLDRLMNPLIDQYLYYLSRIQTTGGTANTQTLGFSQGGPNTMANQAKNWLPGPCYRQQRVSTTTGQNNNSNFAWTAGTKYHLNGRNSLANPGIAMATHKDDEERFFPSNGILIFGKQNAARDNADYSDVMPTSEEEIKTTNPVATEEYGIVADNLQQQNTAPQIGTVNSQGALPGMVWQNRDVYLQGPIWAKIPHTDGNFHPSPLMGGFGLKHPPPQILIKNTPVPADPPTTFNQSKLNSFITQYSTGQVSVEIEWELQKENSKRWNPEIQYTSNYYKSTSVDFAVNTEGVYSEPRPIGTRYLTRNL

SEQ ID NO: 3075 - protein, 738 aa, Artificial Sequence
  Description of Artificial Sequence: Synthetic polypeptide
MAADGYLPDWLEDNLSEGIREWWALKPGAPKPKANQQKQDDGRGLVLPGYKYLGPFNGLDKGEPVNAADAAALEHDKAYDQQLQAGDNPYLRYNHADAEFQERLQEDTSFGGNLGRAVFQAKKRVLEPLGLVEEGAKTAPGKKRPVEPSPQRSPDSSTGIGKKGQQPARKRLNFGQTGDSESVPDPQPLGEPPAAPSGVGPNTMAAGGGAPMADNNEGADGVGSSSGNWHCDSTWLGDRVITTSTRTWALPTYNNHLYKQISNGTSGGATNDNTYFGYSTPWGYFDFNRFHCHFSPRDWQRLINNNWGFRPKRLSFKLFNIQVKEVTQNEGTKTIANNLTSTIQVFTDSEYQLPYVLGSAHQGCLPPFPADVFTIPQYGYLTLNNGSQAVGRSSFYCLEYFPSQMLRTGNNFQFTYTFEDVPFHSSYAHSQSLDRLMNPLIDQYLYYLSRIQTTGGTANTQTLGFSQGGPNTMANQAKNWLPGPCYRQQRVSTTTGQNNNSNFAWTAGTKYHLNGRNSLANPGIAMATHKDDEERFFPSNGILIFGKQNAARDNADYSDVMPTSEEEIKTTNPVATEEYGIVADNLQQQNTAPQIGTVNSQGALPGMVWQNRDVYLQGPIWAKIPHTDGSFHPSPLMGGFGLKHPPPQILIKNTPVPADPPTTFNQSKLNSFITQYSTGQVSVEIEWELQKENSKRWNPEIQYTSNYYKSTSVDFAVNTEGVYSEPRPIGTRYLTRNL

SEQ ID NO: 3076 - protein, 738 aa, Artificial Sequence
  Description of Artificial Sequence: Synthetic polypeptide
MAADGYLPDWLEDNLSEGIREWWALKPGAPKPKANQQKQDDGRGLVLPGYKYLGPFNGLDKGEPVNAADAAALEHDKAYDQQLQAGDNPYLRYNHADAEFQERLQEDTSFGGNLGRAVFQAKKRVLEPLGLVEEGAKTAPGKKRPVEPSPQRSPDSSTGIGKKGQQPARKRLNFGQTGDSESVPDPQPLGEPPTAPSGVGPNTMAAGGGAPMADNNEGADGVGSSSGNWHCDSTWLGDRVITTSTRTWALPTYNNHLYKQISNGTSGGATNDNTYFGYSTPWGYFDFNRFHCHFSPRDWQRLINNNWGFRPKRLSFKLFNIQVKEVTQNEGTKTIANNLTSTIQVFTDSEYQLPYVLGSAHQGCLPPFPADVFTIPQYGYLTLNNGSQAVGRSSFYCLEYFPSQMLRTGNNFQFTYTFEDVPFHSSYAHSQSLDRLMNPLIDQYLYYLSRIQTTGGTANTQTLGFSQGGPNTMANQAKNWLPGPCYRQQRVSTTTGQNNNSNFAWTAGTKYHLNGRNSLANPGIAMATHKDDEERFFPSNGILIFGKQNAARDNADYSDVMPTSEEEIKTTNPVATEEYGIVADNLQQQNTAPQIGTVNSQGALPGMVWQNRDVYLQGPIWAKIPHTDGNFHPSPLMGGFGLKHPPPQILIKNTPVPADPPTTFNQSKLNSFITQYSTGQVSVEIEWELQKENSKRWNPEIQYTSNYYKSTSVDFAVNTEGVYSEPRPIGTRYLTRNL

SEQ ID NO: 3077 - protein, 738 aa, Artificial Sequence
  Description of Artificial Sequence: Synthetic polypeptide
MAADGYLPDWLEDNLSEGIREWWALKPGAPKPKANQQKQDDGRGLVLPGYKYLGPFNGLDKGEPVNAADAAALEHDKAYDQQLQAGDNPYLRYNHADAEFQERLQEDTSFGGNLGRAVFQAKKRVLEPLGLVEEGAKTAPGKKRPVEPSPQRSPDSSTGIGKKGQQPARKRLNFGQTGDSESVPDPQPLGEPPAAPSGVGPNTMAAGGGAPMADNNEGADGVGSSSGNWHCDSTWLGDRVITTSTRTWALPTYNNHLYKQISNGTSGGATNDNTYFGYSTPWGYFDFNRFHCHFSPRDWQRLINNNWGFRPKRLSFKLFNIQVKEVTQNEGTKTIANNLTSTIQVFTDSEYQLPYVLGSAHQGCLPPFPADVFTIPQYGYLTLNNGSQAVGRSSFYCLEYFPSQMLRTGNNFQFTYTFEDVPFHSSYAHSQSLDRLMNPLIDQYLYYLSRIQTTGGTANTQTLGFSQGGPNTMANQAKNWLPGPCYRQQRVSTTTGQNNNSNFAWTAGTKYHLNGRNSLANPGIAMATHKDDEERFFPSNGILIFGKQNAARDNADYSDVMPTSEEEIKTTNPVATEEYGIVADNLQQQNTAPQIGTVNSQGALPGMVWQNRDVYLQGPIWAKIPHTDGNFHPSPLMGGFGLKHPPPQILIKNTPVPADPPTTFNQSKLNSFITQYSTGQVSVEIEWELQKENSKRWNPEIQYTSNYYKSTSVDFAVNAEGVYSEPRPIGTRYLTRNL

SEQ ID NO: 3078 - protein, 738 aa, Artificial Sequence
  Description of Artificial Sequence: Synthetic polypeptide
MAADGYLPDWLEDNLSEGIREWWALKPGAPKPKANQQKQDDGRGLVLPGYKYLGPFNGLDKGEPVNAADAAALEHDKAYDQQLQAGDNPYLRYNHADAEFQERLQEDTSFGGNLGRAVFQAKKRVLEPLGLVEEGAKTAPGKKRPVEPSPQRSPDSSTGIGKKGQQPARKRLNFGQTGDSESVPDPQPLGEPPAAPSGVGPNTMAAGGGAPMADNNEGADGAGSSSGNWHCDSTWLGDRVITTSTRTWALPTYNNHLYKQISNGTSGGATNDNTYFGYSTPWGYFDFNRFHCHFSPRDWQRLINNNWGFRPKRLSFKLFNIQVKEVTQNEGTKTIANNLTSTIQVFTDSEYQLPYVLGSAHQGCLPPFPADVFTIPQYGYLTLNNGSQAVGRSSFYCLEYFPSQMLRTGNNFQFTYTFEDVPFHSSYAHSQSLDRLMNPLIDQYLYYLSRIQTTGGTANTQTLGFSQGGPNTMANQAKNWLPGPCYRQQRVSTTTGQNNNSNFAWTAGTKYHLNGRNSLANPGIAMATHKDDEERFFPSNGILIFGKQNAARDNADYSDVMPTSEEEIKTTNPVATEEYGIVADNLQQQNTAPQIGTVNSQGALPGMVWQNRDVYLQGPIWAKIPHTDGNFHPSPLMGGFGLKHPPPQILIKNTPVPADPPTTFNQSKLNSFITQYSTGQVSVEIEWELQKENSKRWNPEIQYTSNYYKSTSVDFAVNTEGVYSEPRPIGTRYLTRNL

SEQ ID NO: 3079 - protein, 738 aa, Artificial Sequence
  Description of Artificial Sequence: Synthetic polypeptide
MAADGYLPDWLEDNLSEGIREWWALKPGAPKPKANQQKQDDGRGLVLPGYKYLGPFNGLDKGEPVNAADAAALEHDKAYDQQLQAGDNPYLRYNHADAEFQERLQEDTSFGGNLGRAVFQAKKRVLEPLGLVEEGAKTAPGKKRPVEPSPQRSPDSSTGIGKKGQQPARKRLNFGQTGDSESVPDPQPLGEPPAAPSGVGPNTMAAGGGAPMADNNEGADGVGSSSGNWHCDSTWLGDRAITTSTRTWALPTYNNHLYKQISNGTSGGATNDNTYFGYSTPWGYFDFNRFHCHFSPRDWQRLINNNWGFRPKRLSFKLFNIQVKEVTQNEGTKTIANNLTSTIQVFTDSEYQLPYVLGSAHQGCLPPFPADVFTIPQYGYLTLNNGSQAVGRSSFYCLEYFPSQMLRTGNNFQFTYTFEDVPFHSSYAHSQSLDRLMNPLIDQYLYYLSRIQTTGGTANTQTLGFSQGGPNTMANQAKNWLPGPCYRQQRVSTTTGQNNNSNFAWTAGTKYHLNGRNSLANPGIAMATHKDDEERFFPSNGILIFGKQNAARDNADYSDVMPTSEEEIKTTNPVATEEYGIVADNLQQQNTAPQIGTVNSQGALPGMVWQNRDVYLQGPIWAKIPHTDGNFHPSPLMGGFGLKHPPPQILIKNTPVPADPPTTFNQSKLNSFITQYSTGQVSVEIEWELQKENSKRWNPEIQYTSNYYKSTSVDFAVNTEGVYSEPRPIGTRYLTRNL

SEQ ID NO: 3080 - protein, 738 aa, Artificial Sequence
  Description of Artificial Sequence: Synthetic polypeptide
MAADGYLPDWLEDNLSEGIREWWALKPGAPKPKANQQKQDDGRGLVLPGYKYLGPFNGLDKGEPVNAADAAALEHDKAYDQQLQAGDNPYLRYNHADAEFQERLQEDTSFGGNLGRAVFQAKKRVLEPLGLVEEGAKTAPGKKRPVEPSPQRSPDSSTGIGKKGQQPARKRLNFGQTGDSESVPDPQPLGEPPAAPSGVGPNTMAAGGGAPMADNNEGADGVGSSSGNWHCDSTWLGDRVITTSTRTWALPTYNNHLYKQISNGTSGGATNDNTYFGYSTPWGYFDFNRFHCHFSPRDWQRLINNNWGFRPKRLSFKLFNIQVKEVTQNEGTKTIANNLTSTIQVFTDSEYQLPYVLGSAHQGCLPPFPADVFTIPQYGYLTLNNGSQAVGRSSFYCLEYFPSQMLRTGNNFQFTYTFEDVPFHSSYAHSQSLDRLMNPLIDQYLYYLSRIQTTGGTANTQTLGFSQGGPNTMANQAKNWLPGPCYRQQRVSTTTGQNNNSNFAWTAGTKYHLNGRNSLANPGVAMATHKDDEERFFPSNGILIFGKQNAARDNADYSDVMPTSEEEIKTTNPVATEEYGIVADNLQQQNTAPQIGTVNSQGALPGMVWQNRDVYLQGPIWAKIPHTDGNFHPSPLMGGFGLKHPPPQILIKNTPVPADPPTTFNQSKLNSFITQYSTGQVSVEIEWELQKENSKRWNPEIQYTSNYYKSTSVDFAVNTEGVYSEPRPIGTRYLTRNL

SEQ ID NO: 3081 - protein, 738 aa, Artificial Sequence
  Description of Artificial Sequence: Synthetic polypeptide
MAADGYLPDWLEDNLSEGIREWWALKPGAPKPKANQQKQDDGRGLVLPGYKYLGPFNGLDKGEPVNAADAAALEHDKAYDQQLQAGDNPYLRYNHADAEFQERLQEDTSFGGNLGRAVFQAKKRVLEPLGLVEEGAKTAPGKKRPVEPSPQRSPDSSTGIGKKGQQPARKRLNFGQTGDSESVPDPQPLGEPPAAPSGVGPNTMAAGGGAPMADNNEGADGVGSSSGNWHCDSTWLGDRVITTSTRTWALPTYNNHLYKQISNGTSGGATNDNTYFGYSTPWGYFDFNRFHCHFSPRDWQRLINNNWGFRPKRLSFKLFNIQVKEVTQNEGTKTIANNLTGTIQVFTDSEYQLPYVLGSAHQGCLPPFPADVFTIPQYGYLTLNNGSQAVGRSSFYCLEYFPSQMLRTGNNFQFTYTFEDVPFHSSYAHSQSLDRLMNPLIDQYLYYLSRIQTTGGTANTQTLGFSQGGPNTMANQAKNWLPGPCYRQQRVSTTTGQNNNSNFAWTAGTKYHLNGRNSLANPGIAMATHKDDEERFFPSNGILIFGKQNAARDNADYSDVMPTSEEEIKTTNPVATEEYGIVADNLQQQNTAPQIGTVNSQGALPGMVWQNRDVYLQGPIWAKIPHTDGNFHPSPLMGGFGLKHPPPQILIKNTPVPADPPTTFNQSKLNSFITQYSTGQVSVEIEWELQKENSKRWNPEIQYTSNYYKSTSVDFAVNTEGVYSEPRPIGTRYLTRNL

SEQ ID NO: 3082 - protein, 738 aa, Artificial Sequence
  Description of Artificial Sequence: Synthetic polypeptide
MAADGYLPDWLEDNLSEGIREWWALKPGAPKPKANQQKQDDGRGLVLPGYKYLGPFNGLDKGEPVNAADAAALEHDKAYDQQLQAGDNPYLRYNHADAEFQERLQEDTSFGGNLGRAVFQAKKRVLEPLGLVEEGAKTAPGKKRPVEPSPQRSPDSSTGIGKKGQQPARKRLNFGQTGDSESVPDPQPLGEPPAAPSGVGPNTMAAGGGAPMADNNEGADGVGSSSGNWHCDSTWLGDRVITTSTRTWALPTYNNHLYKQISNGTSGGATNDNTYFGYSTPWGYFDFNRFHCHFSPRDWQRLINNNWGFRPKRLSFKLFNIQVKEVTQNEGTKTIANNLTSTIQVFTDSEYQLPYVLGSAHQGCLPPFPADVFTIPQYGYLTLNNGSQAVGRSSFYCLEYFPSQMLRTGNNFQFTYTFEDVPFHSSYAHSQSLDRLMNPLIDQYLYYLSRIQTTGGTANTQTLGFSQGGPNTMANQAKNWLPGPCYRQQRVSTTTGQNNNSNFAWTAGTKYHLNGRNSLANPGIAMATHKDDEERFFPSNGILIFGKQNAVRDNADYSDVMPTSEEEIKTTNPVATEEYGIVADNLQQQNTAPQIGTVNSQGALPGMVWQNRDVYLQGPIWAKIPHTDGNFHPSPLMGGFGLKHPPPQILIKNTPVPADPPTTFNQSKLNSFITQYSTGQVSVEIEWELQKENSKRWNPEIQYTSNYYKSTSVDFAVNTEGVYSEPRPIGTRYLTRNL

SEQ ID NO: 3083 - protein, 738 aa, Artificial Sequence
  Description of Artificial Sequence: Synthetic polypeptide
MAADGYLPDWLEDNLSEGIREWWALKPGAPKPKANQQKQDDGRGLVLPGYKYLGPFNGLDKGEPVNAADAAALEHDKAYDQQLQAGDNPYLRYNHADAEFQERLQEDTSFGGNLGRAVFQAKKRVLEPLGLVEEGAKTAPGKKRPVEPSPQRSPDSSTGIGKKGQQPARKRLNFGQTGDSESVPDPQPLGEPPAAPSGVGPNTMAAGGGAPMADNNEGADGVGSSSGNWHCDSTWLGDRVITTSTRTWALPTYNNHLYKQISNGTSGGATNDNTYFGYSTPWGYFDFNRFHCHFSPRDWQRLINNNWGFRPKRLSFKLFNIQVKEVTQNEGTKTIANNLTSTIQVFTDSEYQLPYVLGSAHQGCLPPFPADVFTIPQYGYLTLNNGSQAVGRSSFYCLEYFPSQMLRTGNNFQFTYTFEDVPFHSSYAHSQSLDRLMNPLIDQYLYYLSRIQTTGGTANTQTLGFSQGGPNTMANQAKNWLPGPCYRQQRVSTTTGQNNNSNFAWTAGTKYHLNGRNSLANPGIAMATHKDDEERFFPSNGILIFGKQNAARDNADYSDVMPTSEEEIKTTNPVATEEYGIVADNLQQQNTAPQIGTVNSQGALPGMVWQNRDVYLQGPIWAKIPHTDGNFHPSPLMGGFGLKHPPPQILIKNTPVPADPPTTFNQSKLNSFIAQYSTGQVSVEIEWELQKENSKRWNPEIQYTSNYYKSTSVDFAVNTEGVYSEPRPIGTRYLTRNL

SEQ ID NO: 3084 - protein, 738 aa, Artificial Sequence
  Description of Artificial Sequence: Synthetic polypeptide
MAADGYLPDWLEDNLSEGIREWWALKPGAPKPKANQQKQDDGRGLVLPGYKYLGPFNGLDKGEPVNAADAAALEHDKAYDQQLQAGDNPYLRYNHADAEFQERLQEDTSFGGNLGRAVFQAKKRVLEPLGLVEEGAKTAPGKKRPVEPSPQRSPDSSTGIGKKGQQPARKRLNFGQTGDSESVPDPQPLGEPPAAPSGVGPNTMAAGGGAPMADNNEGADGVGSSSGNWHCDSTWLGDRVITTSTRTWALPTYNNHLYKQISNGTSGGATNDNTYFGYSTPWGYFDFNRFHCHFSPRDWQRLINNNWGFRPKRLSFKLFNIQVKEVTQNEGTKTIANNLTSTIQVFTDSEYQLPYVLGSAHQGCLPPFPADVFTIPQYGYLTLNNGSQAVGRSSFYCLEYFPSQMLRTGNNFQFTYTFEDVPFHSSYAHSQSLDRLMNPLIDQYLYYLSRIQTTGGTANTQTLGFSQGGPNTMANQAKNWLPGPCYRQQRVSTTTGQNNNSNFAWTAGTKYHLNGRNSLANPGIAMATHKDGEERFFPSNGILIFGKQNAARDNADYSDVMPTSEEEIKTTNPVATEEYGIVADNLQQQNTAPQIGTVNSQGALPGMVWQNRDVYLQGPIWAKIPHTDGNFHPSPLMGGFGLKHPPPQILIKNTPVPADPPTTFNQSKLNSFITQYSTGQVSVEIEWELQKENSKRWNPEIQYTSNYYKSTSVDFAVNTEGVYSEPRPIGTRYLTRNL

SEQ ID NO: 3085 - protein, 738 aa, Artificial Sequence
  Description of Artificial Sequence: Synthetic polypeptide
MAADGYLPDWLEDNLSEGIREWWALKPGAPKPKANQQKQDDGRGLVLPGYKYLGPFNGLDKGEPVNAADAAALEHDKAYDQQLQAGDNPYLRYNHADAEFQERLQEDTSFGGNLGRAVFQAKKRVLEPLGLVEEGAKTAPGKKRPVEPSPQRSPDSSTGIGKKGQQPARKRLNFGQTGDSESVPDPQPLGEPPAAPSGVGPNTMAAGGGAPMADNNEGADGVGSSSGNWHCDSTWLGDRVITTSTRTWALPTYNNHLYKQISNGTSGGATNDNTYFGYSTPWGYFDFNRFHCHFSPRDWQRLINNNWGFRPKRLSFKLFNIQVKEVTQNEGTKTIANNLTSTIQVFTDSEYQLPYVLGSAHQGCLPPFPADVFTIPQYGYLTLNNGSQAVGRSSFYCLEYFPSQMLRTGNNFQFTYTFEDVPFHSSYAHSQSLDRLMNPLIDQYLYYLSRIQTTGGTANTQTLGFSQGGPNTMANQAKNWLPGPCYRQQRVSTTTGQNNNSNFAWTAGTKYHLNGRNSLANPGIAMATHKGDEERFFPSNGILIFGKQNAARDNADYSDVMPTSEEEIKTTNPVATEEYGIVADNLQQQNTAPQIGTVNSQGALPGMVWQNRDVYLQGPIWAKIPHTDGNFHPSPLMGGFGLKHPPPQILIKNTPVPADPPTTFNQSKLNSFITQYSTGQVSVEIEWELQKENSKRWNPEIQYTSNYYKSTSVDFAVNTEGVYSEPRPIGTRYLTRNL

SEQ ID NO: 3086 - protein, 738 aa, Artificial Sequence
  Description of Artificial Sequence: Synthetic polypeptide
MAADGYLPDWLEDNLSEGIREWWALKPGAPKPKANQQKQDDGRGLVLPGYKYLGPFNGLDKGEPVNAADAAALEHDKAYNQQLQAGDNPYLRYNHADAEFQERLQEDTSFGGNLGRAVFQAKKRVLEPLGLVEEGAKTAPGKKRPVEPSPQRSPDSSTGIGKKGQQPARKRLNFGQTGDSESVPDPQPLGEPPAAPSGVGPNTMAAGGGAPMADNNEGADGVGSSSGNWHCDSTWLGDRVITTSTRTWALPTYNNHLYKQISNGTSGGATNDNTYFGYSTPWGYFDFNRFHCHFSPRDWQRLINNNWGFRPKRLSFKLFNIQVKEVTQNEGTKTIANNLTSTIQVFTDSEYQLPYVLGSAHQGCLPPFPADVFTIPQYGYLTLNNGSQAVGRSSFYCLEYFPSQMLRTGNNFQFTYTFEDVPFHSSYAHSQSLDRLMNPLIDQYLYYLSRIQTTGGTANTQTLGFSQGGPNTMANQAKNWLPGPCYRQQRVSTTTGQNNNSNFAWTAGTKYHLNGRNSLANPGIAMATHKDDEERFFPSNGILIFGKQNAARDNADYSDVMPTSEEEIKTTNPVATEEYGIVADNLQQQNTAPQIGTVNSQGALPGMVWQNRDVYLQGPIWAKIPHTDGNFHPSPLMGGFGLKHPPPQILIKNTPVPADPPTTFNQSKLNSFITQYSTGQVSVEIEWELQKENSKRWNPEIQYTSNYYKSTSVDFAVNTEGVYSEPRPIGTRYLTRNL

SEQ ID NO: 3087 - protein, 738 aa, Artificial Sequence
  Description of Artificial Sequence: Synthetic polypeptide
MAADGYLPDWLEDNLSEGIREWWALKPGAPKPKANQQKQDDGRGLVLPGYKYLGPFNGLDKGEPVNAADAAALEHDKAYDQQLQAGDNPYLRYNHADAEFQERLQEDTSFGGNLGRAVFQAKKRVLEPLGLVEEGAKTAPGKKRPVEPSPQRSPDSSTGIGKKGQQPARKRLNFGQTGDSESVPDPQPLGEPPAAPSGVGPNTMAAGGGAPMADNNEGADGVGSSSGNWHCDSTWLGDRVITTSTRTWALPTYNNHLYKQISNGTSGGATNDNTYFGYSTPWGYFDFNRFHCHFSPRDWQRLINNNWGFRPKRLSFKLFNIQVKEVTQNEGTKTIANNLTSTIQVFTDSEYQLPYVLGSAHQGCLPPFPADVFTIPQYGYLTLNNGSQAVGRSSFYCLEYFPSQMLRTGNNFQFTYTFEDVPFHSSYAHSQSLDRLMNPLIDQYLYYLSRIQTTGGTANTQTLGFSQGGPNTMANQAKNWLPGPCYRQQRVSTTTGQNNNSNFAWTAGTKYHLNGRNSLANPGIAMATHKDDEERFFPSNGILIFGKQNAARDNADYSDVMPTSEEEIKTTNPVATEEYGIVADNLQQQNTAPQIGTVNSQGALPGMVWQNRDVYLQGPTWAKIPHTDGNFHPSPLMGGFGLKHPPPQILIKNTPVPADPPTTFNQSKLNSFITQYSTGQVSVEIEWELQKENSKRWNPEIQYTSNYYKSTSVDFAVNTEGVYSEPRPIGTRYLTRNL

SEQ ID NO: 3088 - protein, 738 aa, Artificial Sequence
  Description of Artificial Sequence: Synthetic polypeptide
MAADGYLPDWLEDNLSEGIREWWALKPGAPKPKANQQKQDDGRGLVLPGYKYLGPFNGLDKGEPVNAADAAALEHDKAYDQQLQAGDNPYLRYNHADAEFQERLQEDTSFGGNLGRAVFQAKKRVLEPLGLVEEGAKTAPGKKRPVEPSPQRSPDSSTGIGKKGQQPARKRLNFGQTGDSESVPDPQPLGEPPAAPSGVGPNTMAAGGGAPMADNNEGADGVGSSSGNWHCDSTWLGDRVITTSTRTWALPTYNNHLYKQISNGTSGGATNDNTYFGYSTPWGYFDFNRFHCHFSPRDWQRLINNNWGFRPKRLSFKLFNIQVKEVTQNEGTKTIANNLTSTIQVFTDSEYQLPYVLGSAHQGCLPPFPADVFTIPQYGYLTLNNGSQAVGRSSFYCLEYFPSQMLRTGNNFQFTYTFEDVPFHSSYAHSQSLDRLMNPLIDQYLYYLSRIQTTGGTANTQTLGFSQGGPNTMANQAKNWLPGPCYRQQRVSTTTGQNNNSNFAWTAGTKYHLNGRNSLANPGIAMATHKDDEERFFPSNGILIFGKQNAARDNADYSDVMPTSEEEIKTTNPVATEEYGIVADNLRQQNTAPQIGTVNSQGALPGMVWQNRDVYLQGPIWAKIPHTDGNFHPSPLMGGFGLKHPPPQILIKNTPVPADPPTTFNQSKLNSFITQYSTGQVSVEIEWELQKENSKRWNPEIQYTSNYYKSTSVDFAVNTEGVYSEPRPIGTRYLTRNL

SEQ ID NO: 3089 - protein, 738 aa, Artificial Sequence
  Description of Artificial Sequence: Synthetic polypeptide
MAADGYLPDWLEDNLSEGIREWWALKPGAPKPKANQQKQDDGRGLVLPGYKYLGPFNGLDKGEPVNAADAAALEHDKAYDQQLQAGDNPYLRYNHADAEFQERLQEDTSFGGNLGRAVFQAKKRVLEPLGLVEEGAKTAPGKKRPVEPSPQRSPDSSTGIGKKGQQPARKRLNFGQTGDSESVPDPQPLGEPPAAPSGVGPNTMAAGGGAPMADNNEGADGVGSSSGNWHCDSTWLGDRVITTSTRTWALPTYNNHLYKQISNGTSGGATNDNTYFGYSTPWGYFDFNRFHCHFSPRDWQRLINNNWGFRPKRLSFKLFNIQVKEVTQNEGTKTIANNLTSTIQVFTDSEYQLPYVLGSAHQGCLPPFPADVFTIPQYGYLTLNNGSQAVGRSSFYCLEYFPSQMLRTGNNFQFTYTFEDVPFHSSYAHSQSLDRLMNPLIDQYLYYLSRIQTTGGTANTQTLGFSQGGPNTMANQAKNWLPGPCYRQQRVSTTTGQNNNSNFAWTAGTKYHLNGRNSLANPGIAMATHKDDEERFFPSNGILIFGKQNAARDNADYSDAMPTSEEEIKTTNPVATEEYGIVADNLQQQNTAPQIGTVNSQGALPGMVWQNRDVYLQGPIWAKIPHTDGNFHPSPLMGGFGLKHPPPQILIKNTPVPADPPTTFNQSKLNSFITQYSTGQVSVEIEWELQKENSKRWNPEIQYTSNYYKSTSVDFAVNTEGVYSEPRPIGTRYLTRNL

SEQ ID NO: 3090 - protein, 738 aa, Artificial Sequence
  Description of Artificial Sequence: Synthetic polypeptide
MAADGYLPDWLEDNLSEGIREWWALKPGAPKPKANQQKQDDGRGLVLPGYKYLGPFNGLDKGEPVNAADAAALEHDKAYDQQLQAGDNPYLRYNHADAEFQERLQEDTSFGGNLGRAVFQAKKRVLEPLGLVEEGAKTAPGKKRPVEPSPQRSPDSSTGIGKKGQQPARKRLNFGQTGDSESVPDPQPLGEPPAAPSGVGPNTMAAGGGAPMADNNEGADGVGSSSGNWHCDSTWLGDRVITTSTRTWALPTYNNHLYKQISNGTSGGATNGNTYFGYSTPWGYFDFNRFHCHFSPRDWQRLINNNWGFRPKRLSFKLFNIQVKEVTQNEGTKTIANNLTSTIQVFTDSEYQLPYVLGSAHQGCLPPFPADVFTIPQYGYLTLNNGSQAVGRSSFYCLEYFPSQMLRTGNNFQFTYTFEDVPFHSSYAHSQSLDRLMNPLIDQYLYYLSRIQTTGGTANTQTLGFSQGGPNTMANQAKNWLPGPCYRQQRVSTTTGQNNNSNFAWTAGTKYHLNGRNSLANPGIAMATHKDDEERFFPSNGILIFGKQNAARDNADYSDVMPTSEEEIKTTNPVATEEYGIVADNLQQQNTAPQIGTVNSQGALPGMVWQNRDVYLQGPIWAKIPHTDGNFHPSPLMGGFGLKHPPPQILIKNTPVPADPPTTFNQSKLNSFITQYSTGQVSVEIEWELQKENSKRWNPEIQYTSNYYKSTSVDFAVNTEGVYSEPRPIGTRYLTRNL

SEQ ID NO: 3091 - protein, 738 aa, Artificial Sequence
  Description of Artificial Sequence: Synthetic polypeptide
MAADGYLPDWLEDNLSEGIREWWALKPGAPKPKANQQKQDDGRGLVLPGYKYLGPFNGLDKGEPVNAADAAALEHDKAYDQQLQAGDNPYLRYNHADAEFQERLQEDTSFGGNLGRAVFQAKKRVLEPLGLVEEGAKTAPGKKRPVEPSPQRSPDSSTGIGKKGQQPARKRLNFGQTGDSESVPDPQPLGEPPAAPSGVGPNTMAAGGGAPMADNNEGADGVGSSSGNWHCDSTWLGDRVITTSTRTWALPTYNNHLYKQISNGTSGGATNDNTYFGYSTPWGYFDFNRFHCHFSPRDWQRLINNNWGFRPKRLSFKLFNIQVKEVAQNEGTKTIANNLTSTIQVFTDSEYQLPYVLGSAHQGCLPPFPADVFTIPQYGYLTLNNGSQAVGRSSFYCLEYFPSQMLRTGNNFQFTYTFEDVPFHSSYAHSQSLDRLMNPLIDQYLYYLSRIQTTGGTANTQTLGFSQGGPNTMANQAKNWLPGPCYRQQRVSTTTGQNNNSNFAWTAGTKYHLNGRNSLANPGIAMATHKDDEERFFPSNGILIFGKQNAARDNADYSDVMPTSEEEIKTTNPVATEEYGIVADNLQQQNTAPQIGTVNSQGALPGMVWQNRDVYLQGPIWAKIPHTDGNFHPSPLMGGFGLKHPPPQILIKNTPVPADPPTTFNQSKLNSFITQYSTGQVSVEIEWELQKENSKRWNPEIQYTSNYYKSTSVDFAVNTEGVYSEPRPIGTRYLTRNL

SEQ ID NO: 3092 - protein, 738 aa, Artificial Sequence
  Description of Artificial Sequence: Synthetic polypeptide
MAADGYLPDWLEDNLSEGIREWWALKPGAPKPKANQQKQDDGRGLVLPGYKYLGPFNGLDKGEPVNAADAAALEHDKAYDQQLQAGDNPYLRYNHADAEFQERLQEDTSFGGNLGRAVFQAKKRVLEPLGLVEEGAKTAPGKKRPVEPSPQRSPDSSTGIGKKGQQPARKRLNFGQTGDSESVPDPQPLGEPPAAPSGVGPNTMAAGGGAPMADNNEGADGVGSSSGNWHCDSTWLGDRVITTSTRTWALPTYNNHLYKQISNGTSGGATNDNTYFGYSTPWGYFDFNRFHCHFSPRDWQRLINNNWGFRPKRLSFKLFNIQVKEVTQNEGTKTIANNLTSTIQVFTDSEYQLPYVLGSAHQGCLPPFPADVFTIPQYGYLTLNNGSQAVGRSSFYCLEYFPSQMLRTGNNFQFTYTFEDVPFHSSYAHSQSLDRLMNPLIDQYLYYLSRIQTTGGTANTQTLGFSQGGPNTMANQAKNWLPGPCYRQQRVSTTTGQNNNSNFAWTAGTKYHLNGRNSLANPGIAMATHKDDEERFFPSNGILIFGKQNAARDNADYSDVMPTSEEEIKTTNPVATEEYGIVADNLQQQNTAPQIGTVNSQGALPGMVWQNRDVYLQGPIWAKIPHTDGNFHPSPLMGGFGLKHPPPQILIKNTPVPADPPTTFNQSKLNSFITQYSTGQVSAEIEWELQKENSKRWNPEIQYTSNYYKSTSVDFAVNTEGVYSEPRPIGTRYLTRNL

SEQ ID NO: 3093 - protein, 738 aa, Artificial Sequence
  Description of Artificial Sequence: Synthetic polypeptide
MAADGYLPDWLEDNLSEGIREWWALKPGAPKPKANQQKQDDGRGLVLPGYKYLGPFNGLDKGEPVNAADAAALEHDKAYDQQLQAGDNPYLRYNHADAEFQERLQEDTSFGGNLGRAVFQAKKRVLEPLGLVEEGAKTAPGKKRPVEPSPQRSPDSSTGIGKKGQQPARKRLNFGQTGDSESVPDPQPLGEPPAAPSGVGPNTMAAGGGAPMADNNEGADGVGSSSGNWHCDSTWLGDRVITTSTRTWALPTYNNHLYKQISNGTSGGATNDNTYFGYSTPWGYFDFNRFHCHFSPRDWQRLINNNWGFRPKRLSFKLFNIQVKEVTQNEGTKTIANNLTSTIQVFTDSEYQLPYVLGSAHQGCLPPFPADVFTIPQYGYLTLNNGSQAVGRSSFYCLEYFPSQMLRTGNNFQFTYTFEDVPFHSSYAHSQGLDRLMNPLIDQYLYYLSRIQTTGGTANTQTLGFSQGGPNTMANQAKNWLPGPCYRQQRVSTTTGQNNNSNFAWTAGTKYHLNGRNSLANPGIAMATHKDDEERFFPSNGILIFGKQNAARDNADYSDVMPTSEEEIKTTNPVATEEYGIVADNLQQQNTAPQIGTVNSQGALPGMVWQNRDVYLQGPIWAKIPHTDGNFHPSPLMGGFGLKHPPPQILIKNTPVPADPPTTFNQSKLNSFITQYSTGQVSVEIEWELQKENSKRWNPEIQYTSNYYKSTSVDFAVNTEGVYSEPRPIGTRYLTRNL

SEQ ID NO: 3094 - protein, 738 aa, Artificial Sequence
  Description of Artificial Sequence: Synthetic polypeptide
MAADGYLPDWLEDNLSEGIREWWALKPGAPKPKANQQKQDDGRGLVLPGYKYLGPFNGLDKGEPVNAADAAALEHDKAYDQQLQAGDNPYLRYNHADAEFQERLQEDTSFGGNLGRAVFQAKKRVLEPLGLVEEGAKTAPGKKRPVEPSPQRSPDSSTGIGKKGQQPARKRLNFGQTGDSESVPDPQPLGEPPAAPSGVGPNTMAAGGGAPMADNNEGADGVGSSSGNWHCDSTWLGDRVITTSTRTWALPTYNNHLYKQISNGTSGGATNDNTYFGYSTPWGYFDFNRFHCHFSPRDWQRLINNNWGFRPKRLSFKLFNIQVKEVTQNEGTKTIANNLTSTIQVFTDSEYQLPYVLGSAHQGCLPPFPADVFTIPQYGYLTLNNGSQAVGRSSFYCLEYFPSQMLRTGSNFQFTYTFEDVPFHSSYAHSQSLDRLMNPLIDQYLYYLSRIQTTGGTANTQTLGFSQGGPNTMANQAKNWLPGPCYRQQRVSTTTGQNNNSNFAWTAGTKYHLNGRNSLANPGIAMATHKDDEERFFPSNGILIFGKQNAARDNADYSDVMPTSEEEIKTTNPVATEEYGIVADNLQQQNTAPQIGTVNSQGALPGMVWQNRDVYLQGPIWAKIPHTDGNFHPSPLMGGFGLKHPPPQILIKNTPVPADPPTTFNQSKLNSFITQYSTGQVSVEIEWELQKENSKRWNPEIQYTSNYYKSTSVDFAVNTEGVYSEPRPIGTRYLTRNL

SEQ ID NO: 3095 - protein, 738 aa, Artificial Sequence
  Description of Artificial Sequence: Synthetic polypeptide
MAADGYLPDWLEDNLSEGIREWWALKPGAPKPKANQQKQDDGRGLVLPGYKYLGPFNGLDKGEPVNAADAAALEHDKAYDQQLQAGDNPYLRYNHADAEFQERLQEDTSFGGNLGRAVFQAKKRVLEPLGLVEEGAKTAPGKKRPVEPSPQRSPDSSTGIGKKGQQPARKRLNFGQTGDSESVPDPQPLGEPPAAPSGVGPNTMAAGGGAPMADNNEGADGVGSSSGNWHCDSTWLGDRVITTSTRTWALPTYNNHLYKQISNGTSGGATNDNTYFGYSTPWGYFDFNRFHCHFSPRDWQRLINNNWGFRPKRLSFKLFNIQVKEVTQNEGTKTIANNLTSTIQVFTDSEYQLPYVLGSAHQGCLPPFPADVFTIPQYGYLTLNNGSQAVGRSSFYCLEYFPSQMLRTGNNFQFTYTFEDVPFHSSYAHSQSLDRLMNPLIDQYLYYLSRIQTTGGTANTQTLGFSQGGPNTMANQAKNWLPGPCYRQQRVSTTTGQNNNSNFAWTAGTKYHLNGRNSLANPGIAMATHKDDEERFFPSNGILIFGKQNAARDNADYSDVMPTSEEEIKTTNPVATEEYGIVADNLQQQNTAPQIGTVNSQGALPGMVWQNRDVYLQGPIWAKIPHTDGNFHPSPLMGGFGLKHPPPQILIKNTPVPADPPTTFNQSKLNSFITQYSTGQVSVEIEWELRKENSKRWNPEIQYTSNYYKSTSVDFAVNTEGVYSEPRPIGTRYLTRNL

SEQ ID NO: 3096 - protein, 738 aa, Artificial Sequence
  Description of Artificial Sequence: Synthetic polypeptide
MAADGYLPDWLEDNLSEGIREWWALKPGAPKPKANQQKQDDGRGLVLPGYKYLGPFNGLDKGEPVNAADAAALEHDKAYDQQLQAGDNPYLRYNHADAEFQERLQEDTSFGGNLGRAVFQAKKRVLEPLGLVEEGAKTAPGKKRPVEPSPQRSPDSSTGIGKKGQQPARKRLNFGQTGDSESVPDPQPLGEPPAAPSGVGPNTMAAGGGAPMADNNEGADGVGSSSGNWHCDSTWLGDRVITTSTRTWALPTYNNHLYKQISNGTSGGATNDNTYFGYSTPWGYFDFNRFHCHFSPRDWQRLINNNWGFRPKRLSFKLFNIQVKEVTQNEGTKTIANNLTSTIQVFTDSEYQLPYVLGSAHQGCLPPFPADVFTIPQYGYLTLNNGSQAVGRSSFYCLEYFPSQMLRTGNNFQFTYTFEDAPFHSSYAHSQSLDRLMNPLIDQYLYYLSRIQTTGGTANTQTLGFSQGGPNTMANQAKNWLPGPCYRQQRVSTTTGQNNNSNFAWTAGTKYHLNGRNSLANPGIAMATHKDDEERFFPSNGILIFGKQNAARDNADYSDVMPTSEEEIKTTNPVATEEYGIVADNLQQQNTAPQIGTVNSQGALPGMVWQNRDVYLQGPIWAKIPHTDGNFHPSPLMGGFGLKHPPPQILIKNTPVPADPPTTFNQSKLNSFITQYSTGQVSVEIEWELQKENSKRWNPEIQYTSNYYKSTSVDFAVNTEGVYSEPRPIGTRYLTRNL

SEQ ID NO: 3097 - protein, 738 aa, Artificial Sequence
  Description of Artificial Sequence: Synthetic polypeptide
MAADGYLPDWLEDNLSEGIREWWALKPGAPKPKANQQKQDDGRGLVLPGYKYLGPFNGLDKGEPVNAADAAALEHDKAYDQQLQAGDNPYLRYNHADAEFQERLQEDTSFGGNLGRAVFQAKKRVLEPLGLVEEGAKTAPGKKRPVEPSPQRSPDSSTGIGKKGQQPARKRLNFGQTGDSESVPDPQPLGEPPAAPSGVGPNTMAAGGGAPMADNNEGADGVGSSSGNWHCDSTWLGDRVITASTRTWALPTYNNHLYKQISNGTSGGATNDNTYFGYSTPWGYFDFNRFHCHFSPRDWQRLINNNWGFRPKRLSFKLFNIQVKEVTQNEGTKTIANNLTSTIQVFTDSEYQLPYVLGSAHQGCLPPFPADVFTIPQYGYLTLNNGSQAVGRSSFYCLEYFPSQMLRTGNNFQFTYTFEDVPFHSSYAHSQSLDRLMNPLIDQYLYYLSRIQTTGGTANTQTLGFSQGGPNTMANQAKNWLPGPCYRQQRVSTTTGQNNNSNFAWTAGTKYHLNGRNSLANPGIAMATHKDDEERFFPSNGILIFGKQNAARDNADYSDVMPTSEEEIKTTNPVATEEYGIVADNLQQQNTAPQIGTVNSQGALPGMVWQNRDVYLQGPIWAKIPHTDGNFHPSPLMGGFGLKHPPPQILIKNTPVPADPPTTFNQSKLNSFITQYSTGQVSVEIEWELQKENSKRWNPEIQYTSNYYKSTSVDFAVNTEGVYSEPRPIGTRYLTRNL

SEQ ID NO: 3098 - protein, 738 aa, Artificial Sequence
  Description of Artificial Sequence: Synthetic polypeptide
MAADGYLPDWLEDNLSEGIREWWALKPGAPKPKANQQKQDDGRGLVLPGYKYLGPFNGLDKGEPVNAADAAALEHDKAYDQQLQAGDNPYLRYNHADAEFQERLQEDTSFGGNLGRAVFQAKKRVLEPLGLVEEGAKTAPGKKRPVEPSPQRSPDSSTGIGKKGQQPARKRLNFGQTGDSESVPDPQPLGEPPAAPSGVGPNTMAAGGGAPMADNNEGADGVGSSSGNWHCDSTWLGDRVITTSTRTWALPTYNNHLYKQISNGTSGGATNDNTYFGYSTPWGYFDFNRFHCHFSPRDWQRLINNNWGFRPKRLSFKLFNIQVKEVTQNEGTKTIANNLTSTIQVFTDSEYQLPYVLGSAHQGCLPPFPADVFTIPQYGYLTLNNGSQAVGRSSFYCLEYFPSQMLRTGNNFQFTYTFEDVPFHSSYAHSQSLDRLMNPLIDQYLYYLSRIQTTGGTANTQTLGFSQGGPNTMANQAKNWLPGPCYRQQRVSTTTGQNNNSNFAWTAGTKYHLNGRNSLANPGIAMATHKDDEERFFPSNGILIFGKQNAARDNADYSDVMPTSEEEIKTTNPVATEEYGIVADNLQQQNTAPQIGTVNSQGALPGMVWQNRDVYLQGPIWAKIPHTDGNFHPSPLMGGFGLKHPPPQILIKNTPVPADPPTTFNQSKLNSFITQYSTGQVSVEIEWELQKENSKRRNPEIQYTSNYYKSTSVDFAVNTEGVYSEPRPIGTRYLTRNL

SEQ ID NO: 3099 - protein, 738 aa, Artificial Sequence
  Description of Artificial Sequence: Synthetic polypeptide
MAADGYLPDWLEDNLSEGIREWWALKPGAPKPKANQQKQDDGRGLVLPGYKYLGPFNGLDKGEPVNAADAAALEHDKAYDQQLQAGDNPYLRYNHADAEFQERLQEDTSFGGNLGRAVFQAKKRVLEPLGLVEEGAKTAPGKKRPVEPSPQRSPDSSTGIGKKGQQPARKRLNFGQTGDSEPVPDPQPLGEPPAAPSGVGPNTMAAGGGAPMADNNEGADGVGSSSGNWHCDSTWLGDRVITTSTRTWALPTYNNHLYKQISNGTSGGATNDNTYFGYSTPWGYFDFNRFHCHFSPRDWQRLINNNWGFRPKRLSFKLFNIQVKEVTQNEGTKTIANNLTSTIQVFTDSEYQLPYVLGSAHQGCLPPFPADVFTIPQYGYLTLNNGSQAVGRSSFYCLEYFPSQMLRTGNNFQFTYTFEDVPFHSSYAHSQSLDRLMNPLIDQYLYYLSRIQTTGGTANTQTLGFSQGGPNTMANQAKNWLPGPCYRQQRVSTTTGQNNNSNFAWTAGTKYHLNGRNSLANPGIAMATHKDDEERFFPSNGILIFGKQNAARDNADYSDVMPTSEEEIKTTNPVATEEYGIVADNLQQQNTAPQIGTVNSQGALPGMVWQNRDVYLQGPIWAKIPHTDGNFHPSPLMGGFGLKHPPPQILIKNTPVPADPPTTFNQSKLNSFITQYSTGQVSVEIEWELQKENSKRWNPEIQYTSNYYKSTSVDFAVNTEGVYSEPRPIGTRYLTRNL

SEQ ID NO: 3100 - protein, 738 aa, Artificial Sequence
  Description of Artificial Sequence: Synthetic polypeptide
MAADGYLPDWLEDNLSEGIREWWALKPGAPKPKANQQKQDDGRGLVLPGYKYLGPFNGLDKGEPVNAADAAALEHDKAYDQQLQAGDNPYLRYNHADAEFQERLQEDTSFGGNLGRAVFQAKKRVLEPLGLVEEGAKTAPGKKRPVEPSPQRSPDSSTGIGKKGQQPARKRLNFGQTGDSESVPDPQPLGEPPAAPSGVGPNTMAAGGGAPMADNNEGADGVGSSSGNWHCDSTWLGDRVITTSTRTWALPTYNNHLYKQISNGTSGGATNDNTYFGYSTPWGYFDFNRFHCHFSPRDWQRLINNNWGFRPKRLSFKLFNIQVKEVTQNEGTKTIANNLTSTIQVFTDSEYQLPYVLGSAHQGCLPPFPADVFTIPQYGYLTLNNGSQAVGRSSFYCLEYFPSQMLRTGNNFQFTYTFEDVPFHSSYAHSQSLDRLMNPLIDQYLYYLSRIQTTGGTANTQTLGFSQGGPNTMANQAKNWLPGPCYRQQRVSTTTGQNNNSNFAWTAGTKYHLNGRNSLANPGIAMATHKDDEERFFPSNGIPIFGKQNAARDNADYSDVMPTSEEEIKTTNPVATEEYGIVADNLQQQNTAPQIGTVNSQGALPGMVWQNRDVYLQGPIWAKIPHTDGNFHPSPLMGGFGLKHPPPQILIKNTPVPADPPTTFNQSKLNSFITQYSTGQVSVEIEWELQKENSKRWNPEIQYTSNYYKSTSVDFAVNTEGVYSEPRPIGTRYLTRNL

SEQ ID NO: 3101 - protein, 738 aa, Artificial Sequence
  Description of Artificial Sequence: Synthetic polypeptide
MAADGYLPDWLEDNLSEGIREWWALKPGAPKPKANQQKQDDGRGLVLPGYKYLGPFNGLDKGEPVNAADAAALEHDKAYDQQLQAGDNPYLRYNHADAEFQERLQEDTSFGGNLGRAVFQAKKRVLEPLGLVEEGAKTAPGKKRPVEPSPQRSPDSSTGIGKKGQQPARKRLNFGQTGDSESVPDPQPLGEPPAAPSGVGPNTMAAGGGAPMADNNEGADGVGSSSGNWHCDSTWLGDRVITTSTRTWALPTYNNHLYKQISNGTSGGATNDNTYFGYSTPWGYFDFNRFHCHFSPRDWQRLINNNWGFRPKRLSFKLFNIQVKEVTQNEGTKTIANNLTSTIQVFTDSEYQLPYVLGSAHQGCLPPFPADVFTIPQYGYLTLNNGSQAVGRSSFYCLEYFPSQMLRTGNNFQFTYTFEDVPFHSSYAHSQSLDRLMNPLIDQYLYYLSRIQTTGGTANTQTLGFSQGGPNTMANQAKNWLPGPCYRQQRVSTTTGQNNNSNFAWTAGTKYHLNGRNSLANPGIAMATHKDDEERFFPSNGILIFGKQNAARDNADYSDVMPTSEEEIKTTNPVATEEYGIVADNLQQQNTAPQIGTVNSQGALPGMVWQNRDVYLQGPIWAKIPHTDGNFHPSPLMGGFGLKHPPPQILIKNTPVPADPPTTFNQSKLNSFITQYSTGQVSVEIEWELQKENSKRWNPEIQHTSNYYKSTSVDFAVNTEGVYSEPRPIGTRYLTRNL

SEQ ID NO: 3102 - protein, 738 aa, Artificial Sequence
  Description of Artificial Sequence: Synthetic polypeptide
MAADGYLPDWLEDNLSEGIREWWALKPGAPKPKANQQKQDDGRGLVLPGYKYLGPFNGLDKGEPVNAADAAALEHDKAYDQQLQAGDNPYLRYNHADAEFQERLQEDTSFGGNLGRAVFQAKKRVLEPLGLVEEGAKTAPGKKRPVEPSPQRSPDSSTGIGKKGQQPARKRLNFGQTGDSESVPDPQPLGEPPAAPSGVGPNTMAAGGGAPMADNNEGADGVGSSSGNWHCDSTWLGDRVITTSTRTWALPTYNNHLYKQISNGTSGGATNDNTYFGYSTPWGYFDFNRFHCHFSPRDWQRLINNNWGFRPKRLSFKLFNIQVKEVTQNEGTKTIANNLTSTIQVFTDSEYQLPYVLGSAHQGCLPPFPADVFTIPQYGYLTLNNGSQAVGRSSFYCLEYFPSQMLRTGNNFQFTYTFEDVPFHSSYAHSQSLDRLMNPLIDQYLYYLSRIQTTGGTANTQTLGFSQGGPNTMANQAKNWLPGPCYRQQRVSTTTGQNNNSNFAWTAGTKYHLNGRNSLANPGIAMATHKDDEERFFPSNGILIFGKQNAARDNADYSDVMPTSEEEIKTTNPVATEEYGIVADNLQQQNTAPQIGTVNSQGALPGMVWQNRDVYLQGPIWAKIPHTDGNFHPSPLMGGFGLKHPPPQILIKNTPVPADPPTTFNQSKLNPFITQYSTGQVSVEIEWELQKENSKRWNPEIQYTSNYYKSTSVDFAVNTEGVYSEPRPIGTRYLTRNL

SEQ ID NO: 3103 - protein, 738 aa, Artificial Sequence
  Description of Artificial Sequence: Synthetic polypeptide
MAADGYLPDWLEDNLSEGIREWWALKPGAPKPKANQQKQDDGRGLVLPGYKYLGPFNGLDKGEPVNAADAAALEHDKAYDQQLQAGDNPYLRYNHADAEFQERLQEDTSFGGNLGRAVFQAKKRVLEPLGLVEEGAKTAPGKKRPVEPSPQRSPDSSTGIGKKGQQPARKRLNFGQTGDSESVPDPQPLGEPPAAPSGVGPNTMAAGGGAPMADNNEGADGVGSSSGNWHCDSTWLGDRVITTSTRTWALPTYNNHLYKQISNGTSGGATNDNTYFGYSTPWGYFDFNRFHCHFSPRDWQRLINNNWGFRPKRLSFKLFNIQVKEVTQNEGTKTIANNLTSTIQVFTDSEYQLPYVLGSAHQGCLPPFPADVFTIPQYGYLTLNNGSQAVGRSSFYCLEYFPSQMLRTGNNFQFTYTFEDVPFHSSYAHSQSLDRLMNPLIDQYLYYLSRIQTTGGTANTQTLGFSQGGPNTMANQAKNWLPGPCYRQQRVSTTTGQNNNSNFAWTAGTKYHLNGRNSLANPGIAMATHKDDEERFFPSNGILIFGKQNAARDNADYSDVMPTSEEEIKTTNPVATEEYGIVADNLQQQNTAPQIGTVNSQGALPGMVWQNRDVYLQGPIWAKIPHTDGNFRPSPLMGGFGLKHPPPQILIKNTPVPADPPTTFNQSKLNSFITQYSTGQVSVEIEWELQKENSKRWNPEIQYTSNYYKSTSVDFAVNTEGVYSEPRPIGTRYLTRNL

SEQ ID NO: 3104 - protein, 738 aa, Artificial Sequence
  Description of Artificial Sequence: Synthetic polypeptide
MAADGYLPDWLEDNLSEGIREWWALKPGAPKPKANQQKQDDGRGLVLPGYKYLGPFNGLDKGEPVNAADAAALEHDKAYDQQLQAGDNPYLRYNHADAEFQERLQEDTSFGGNLGRAVFQAKKRVLEPLGLVEEGAKTAPGKKRPVEPSPQRSPDSSTGIGKKGQQPARKRLNFGQTGDSESVPDPQPLGEPPAAPSGVGPNTMAAGGGAPMADNNEGADGVGSSSGNWHCDSTWLGDRVITTSTRTWALPTYNNHLYKQISNGTSGGATNDNTYFGYSTPWGYFDFNRFHCHFSPRDWQRLINNNWGFRPKRLSFKLFNIQVKEVTQNEGTKTIANNLTSTIQVFTDSEYQLPYVLGSAHQGCLPPFPADVFTIPQYGYLTLNNGSQAVGRSSFYCLEYFPSQMLRTGNNFQFTYTFEDVPFHSSYAHSQSLDRLMNPLIDQYLYYLSRIQTTGGTANTQTLGFSQGGPNTMANQAKNWLPGPCYRQQRVSTTTGQNNNSNFAWTAGTKYHLNGRNSLANPGIAMATHKDDEERFFPSNGILIFGKQNAARDNADYSDVMPTSEEEIKTTNPVATEEYGIVADNLQQQNTAPQIGTVNSQGALPGMVWQNRDVYLQGPIWAKIPHTDGNFHPSPLMGGFGLKHPPPQILIKNTPVPADPPTTFNQSKLNSFITQYSTGQVSVEIEWELQKENSKRWNPEIQYTSNYYKSTSVDFAVNTEGVYSEPRPIGARYLTRNL

SEQ ID NO: 3105 - protein, 738 aa, Artificial Sequence
  Description of Artificial Sequence: Synthetic polypeptide
MAADGYLPDWLEDNLSEGIREWWALKPGAPKPKANQQKQDDGRGLVLPGYKYLGPFNGLDKGESVNAADAAALEHDKAYDQQLQAGDNPYLRYNHADAEFQERLQEDTSFGGNLGRAVFQAKKRVLEPLGLVEEGAKTAPGKKRPVEPSPQRSPDSSTGIGKKGQQPARKRLNFGQTGDSESVPDPQPLGEPPAAPSGVGPNTMAAGGGAPMADNNEGADGVGSSSGNWHCDSTWLGDRVITTSTRTWALPTYNNHLYKQISNGTSGGATNDNTYFGYSTPWGYFDFNRFHCHFSPRDWQRLINNNWGFRPKRLSFKLFNIQVKEVTQNEGTKTIANNLTSTIQVFTDSEYQLPYVLGSAHQGCLPPFPADVFTIPQYGYLTLNNGSQAVGRSSFYCLEYFPSQMLRTGNNFQFTYTFEDVPFHSSYAHSQSLDRLMNPLIDQYLYYLSRIQTTGGTANTQTLGFSQGGPNTMANQAKNWLPGPCYRQQRVSTTTGQNNNSNFAWTAGTKYHLNGRNSLANPGIAMATHKDDEERFFPSNGILIFGKQNAARDNADYSDVMPTSEEEIKTTNPVATEEYGIVADNLQQQNTAPQIGTVNSQGALPGMVWQNRDVYLQGPIWAKIPHTDGNFHPSPLMGGFGLKHPPPQILIKNTPVPADPPTTFNQSKLNSFITQYSTGQVSVEIEWELQKENSKRWNPEIQYTSNYYKSTSVDFAVNTEGVYSEPRPIGTRYLTRNL

SEQ ID NO: 3106 - protein, 738 aa, Artificial Sequence
  Description of Artificial Sequence: Synthetic polypeptide
MAADGYLPDWLEDNLSEGIREWWALKPGAPKPKANQQKQDDGRGLVLPGYKYLGPFNGLDKGEPVNAADAAALEHDKAYDQQLQAGDNPYLRYNHADAEFQERLQEDTSFGGNLGRAVFQAKKRVLEPLGLVEEGAKTAPGKKRPVEPSPQRSPDSSTGIGKKGQQPARKRLNFGQTGDSESVPDPQPLGEPPAAPSGVGPNTMAAGGGAPMADNSEGADGVGSSSGNWHCDSTWLGDRVITTSTRTWALPTYNNHLYKQISNGTSGGATNDNTYFGYSTPWGYFDFNRFHCHFSPRDWQRLINNNWGFRPKRLSFKLFNIQVKEVTQNEGTKTIANNLTSTIQVFTDSEYQLPYVLGSAHQGCLPPFPADVFTIPQYGYLTLNNGSQAVGRSSFYCLEYFPSQMLRTGNNFQFTYTFEDVPFHSSYAHSQSLDRLMNPLIDQYLYYLSRIQTTGGTANTQTLGFSQGGPNTMANQAKNWLPGPCYRQQRVSTTTGQNNNSNFAWTAGTKYHLNGRNSLANPGIAMATHKDDEERFFPSNGILIFGKQNAARDNADYSDVMPTSEEEIKTTNPVATEEYGIVADNLQQQNTAPQIGTVNSQGALPGMVWQNRDVYLQGPIWAKIPHTDGNFHPSPLMGGFGLKHPPPQILIKNTPVPADPPTTFNQSKLNSFITQYSTGQVSVEIEWELQKENSKRWNPEIQYTSNYYKSTSVDFAVNTEGVYSEPRPIGTRYLTRNL

SEQ ID NO: 3107 - protein, 738 aa, Artificial Sequence
  Description of Artificial Sequence: Synthetic polypeptide
MAADGYLPDWLEDNLSEGIREWWALKPGAPKPKANQQKQDDGRGLVLPGYKYLGPFNGLDKGEPVNAADAAALEHDKAYDQQLQAGDNPYLRYNHADAEFQERLQEDTSFGGNLGRAVFQAKKRVLEPLGLVEEGAKTAPGKKRPVEPSPQRSPDSSTGIGKKGQQPARKRLNFGQTGDSESVPDPQPLGEPPAAPSGVGPNTMAAGGGAPMADNNEGADGVGSSSGNWHCDSTWLGDRVITTSTRTWALPTYNNHLYKQISNGTSGGATNDNTYFGYSTPWGYFDFNRFHCHFSPRDWQRLINNNWGFRPKRLSFKLFNIQVKEVTQNEGTKTIANNLTSTIQVFTDSEYQLPYVLGSAHQGCLPPFPADVFTIPQYGYLTLNNGSQAVGRSSFYCLEYFPSQMLRTGNNFQFTYTFEDVPFHSSYAHSQSLDRLMNPLIDQYLYYLSRIQTTGGTANTQTLGFSQGGPNTMANQAKNWLPGPCYRQQRVSTTTGQNNNSNFAWTAGTKYHLNGRNSLANPGIAMATHKDDEERFFPSNGILIFGKQNAARDNADYGDVMPTSEEEIKTTNPVATEEYGIVADNLQQQNTAPQIGTVNSQGALPGMVWQNRDVYLQGPIWAKIPHTDGNFHPSPLMGGFGLKHPPPQILIKNTPVPADPPTTFNQSKLNSFITQYSTGQVSVEIEWELQKENSKRWNPEIQYTSNYYKSTSVDFAVNTEGVYSEPRPIGTRYLTRNL

SEQ ID NO: 3108 - protein, 738 aa, Artificial Sequence
  Description of Artificial Sequence: Synthetic polypeptide
MAADGYLPDWLEDNLSEGIREWWALKPGAPKPKANQQKQDDGRGLVLPGYKYLGPFNGLDKGEPVNAADAAALEHDKAYDQQLQAGDNPYLRYNHADAEFQERLQEDTSFGGNLGRAVFQAKKRVLEPLGLVEEGAKTAPGKRRPVEPSPQRSPDSSTGIGKKGQQPARKRLNFGQTGDSESVPDPQPLGEPPAAPSGVGPNTMAAGGGAPMADNNEGADGVGSSSGNWHCDSTWLGDRVITTSTRTWALPTYNNHLYKQISNGTSGGATNDNTYFGYSTPWGYFDFNRFHCHFSPRDWQRLINNNWGFRPKRLSFKLFNIQVKEVTQNEGTKTIANNLTSTIQVFTDSEYQLPYVLGSAHQGCLPPFPADVFTIPQYGYLTLNNGSQAVGRSSFYCLEYFPSQMLRTGNNFQFTYTFEDVPFHSSYAHSQSLDRLMNPLIDQYLYYLSRIQTTGGTANTQTLGFSQGGPNTMANQAKNWLPGPCYRQQRVSTTTGQNNNSNFAWTAGTKYHLNGRNSLANPGIAMATHKDDEERFFPSNGILIFGKQNAARDNADYSDVMPTSEEEIKTTNPVATEEYGIVADNLQQQNTAPQIGTVNSQGALPGMVWQNRDVYLQGPIWAKIPHTDGNFHPSPLMGGFGLKHPPPQILIKNTPVPADPPTTFNQSKLNSFITQYSTGQVSVEIEWELQKENSKRWNPEIQYTSNYYKSTSVDFAVNTEGVYSEPRPIGTRYLTRNL

SEQ ID NO: 3109 - protein, 738 aa, Artificial Sequence
  Description of Artificial Sequence: Synthetic polypeptide
MAADGYLPDWLEDNLSEGIREWWALKPGAPKPKANQQKQDDGRGLVLPGYKYLGPFNGLDKGEPVNAADAAALEHDKAYDQQLQAGDNPYLRYNHADAEFQERLQEDTSFGGNLGRAVFQAKKRVLEPLGLVEEGAKTAPGKKRPVEPSPQRSPDSSTGIGKKGQQPARKRLNFGQTGDSESVPDPQPLGEPPAAPSGVGPNTMAAGGGAPMADNNEGADGVGSSSGNWHCDSTWLGDRVITTSTRTWALPTYNNHLYKQISNGTSGGATNDNTYFGYSTPWGYFDFNRFHCHFSPRDWQRLINNNWGFRPKRLSFKLFNIQVKEVTQNEGTKTIANNLTSTIQVFTDSEYQLPYVLGSAHQGCLPPFPADVFTIPQYGYLTLNNGSQAVGRSSFYCLEYFPSQMLRTGNNFQFTYTFEDVPFHSSYAHSQSLDRLMNPLIDQYLYYLSRIQTTGGTANTQTLGFSQGGPNTMANQAKNWLPGPCYRQQRVPTTTGQNNNSNFAWTAGTKYHLNGRNSLANPGIAMATHKDDEERFFPSNGILIFGKQNAARDNADYSDVMPTSEEEIKTTNPVATEEYGIVADNLQQQNTAPQIGTVNSQGALPGMVWQNRDVYLQGPIWAKIPHTDGNFHPSPLMGGFGLKHPPPQILIKNTPVPADPPTTFNQSKLNSFITQYSTGQVSVEIEWELQKENSKRWNPEIQYTSNYYKSTSVDFAVNTEGVYSEPRPIGTRYLTRNL

SEQ ID NO: 3110 - protein, 738 aa, Artificial Sequence
  Description of Artificial Sequence: Synthetic polypeptide
MAADGYLPDWLEDNLSEGIREWWALKPGAPKPKANQQKQDDGRGLVLPGYKYLGPFNGLDKGEPVNAADAAALEHDKAYDQQLQAGDNPYLRYNHADAEFQERLQEDTSFGGNLGRAVFQAKKRVLEPLGLVEEGAKTAPGKKRPVEPSPQRSPDSSTGIGKKGQQPARKRLNFGQTGDSESVPDPQPLGEPPAAPSGVGPNTMAAGGGAPMADNNEGADGVGSSSGNWHCDSTWLGDRVITTSTRTWALPTYNNHLYKQISNGTSGGATNDNTYFGYSTPWGYFDFNRFHCHFSPRDWQRLINNNWGFRPKRLSFKLFNIQVKEVTQNEGTKTIANNLTSTIQVFTDSEYQLPYVLGSAHQGCLPPFPADVFTIPQYGYLTLNNGSQAVGRSSFYCLEYFPSQMLRTGNNFQFTYTFEDVPFHSSYAHSQSLDRLMNPLIDQYLYYLSRIQTTGGTANTQTLGFSQGGPNTMANQAKNWLPGPCYRQQRVSTTTGQNNNSNFAWTAGTKYHLNGRNSLANPGIAMATHKDDEERFFPSNGILIFGKQNAARDNADYSDVMPTSEEEIKTTNPVATEEYGIVADNLQQQNTAPQIGTVNSQGALPGMVWQNRDVYLQGPIWAKIPHTDGNFHPSPLMGGFGLKHPPPQILIKNTPVPADPPTTFNQSKLNSFITQYSTGQVSVEIEWELQKENSKRWNPEIQYTSNYYKSTSVDFAVNTEGVYSEPRPIGTRYLTRNL

SEQ ID NO: 3111 - protein, 738 aa, Artificial Sequence
  Description of Artificial Sequence: Synthetic polypeptide
MAADGYLPDWLEDNLSEGIREWWALKPGAPKPKANQQKQDDGRGLVLPGYKYLGPFNGLDKGEPVNAADAAALEHDKAYDQQLQAGDNPYLRYNHADAEFQERLQEDTSFGGNLGRAVFQAKKRVLEPLGLVEEGAKTAPGKKRPVEPSPQRSPDSSTGIGKKGQQPARKRLNFGQTGDSESVPDPQPLGEPPAAPSGVGPNTMAAGGGAPMADNNEGADGVGSSSGNWHCDSTWLGDRVITTSTRTWALPTYNNHLYKQISNGTSGGATNDNTYFGYSTPWGYFDFNRFHRHFSPRDWQRLINNNWGFRPKRLSFKLFNIQVKEVTQNEGTKTIANNLTSTIQVFTDSEYQLPYVLGSAHQGCLPPFPADVFTIPQYGYLTLNNGSQAVGRSSFYCLEYFPSQMLRTGNNFQFTYTFEDVPFHSSYAHSQSLDRLMNPLIDQYLYYLSRIQTTGGTANTQTLGFSQGGPNTMANQAKNWLPGPCYRQQRVSTTTGQNNNSNFAWTAGTKYHLNGRNSLANPGIAMATHKDDEERFFPSNGILIFGKQNAARDNADYSDVMPTSEEEIKTTNPVATEEYGIVADNLQQQNTAPQIGTVNSQGALPGMVWQNRDVYLQGPIWAKIPHTDGNFHPSPLMGGFGLKHPPPQILIKNTPVPADPPTTFNQSKLNSFITQYSTGQVSVEIEWELQKENSKRWNPEIQYTSNYYKSTSVDFAVNTEGVYSEPRPIGTRYLTRNL

SEQ ID NO: 3112 - protein, 738 aa, Artificial Sequence
  Description of Artificial Sequence: Synthetic polypeptide
MAADGYLPDWLEDNLSEGIREWWALKPGAPKPKANQQKQDDGRGLVLPGYKYLGPFNGLDKGEPVNAADAAALEHDKAYDQQLQAGDNPYLRYNHADAEFQERLQEDTSFGGNLGRAVFQAKKRVLEPLGLVEEGAKTAPGKKRPVEPSPQRSPDSSTGIGKKGQQPARKRLNFGQTGDSESVPDPQPLGEPPAAPSGVGPNTMAAGGGAPMADNNEGADGVGSSSGNWHCDSTWLGDRVITTSTRTWALPTYNNHLYKQISNGTSGGATNDNTYFGYSTPWGYFDFNRFHCHFSPRDWQRLINNNWGFRPKRLSFKLFNIQVKEVTQNEGTKTIANNLTSTIQVFTDSECQLPYVLGSAHQGCLPPFPADVFTIPQYGYLTLNNGSQAVGRSSFYCLEYFPSQMLRTGNNFQFTYTFEDVPFHSSYAHSQSLDRLMNPLIDQYLYYLSRIQTTGGTANTQTLGFSQGGPNTMANQAKNWLPGPCYRQQRVSTTTGQNNNSNFAWTAGTKYHLNGRNSLANPGIAMATHKDDEERFFPSNGILIFGKQNAARDNADYSDVMPTSEEEIKTTNPVATEEYGIVADNLQQQNTAPQIGTVNSQGALPGMVWQNRDVYLQGPIWAKIPHTDGNFHPSPLMGGFGLKHPPPQILIKNTPVPADPPTTFNQSKLNSFITQYSTGQVSVEIEWELQKENSKRWNPEIQYTSNYYKSTSVDFAVNTEGVYSEPRPIGTRYLTRNL

SEQ ID NO: 3113 - protein, 738 aa, Artificial Sequence
  Description of Artificial Sequence: Synthetic polypeptide
MAADGYLPDWLEDNLSEGIREWWALKPGAPKPKANQQKQDDGRGLVLPGYKYLGPFNGLDKGEPVNAADAAALEHDKAYDQQLQAGDNPYLRYNHADAEFQERLQEDTSFGGNLGRAVFQAKKRVLEPLGLVEEGAKTAPGKKRPVEPSPQRSPDSSTGIGKKGQQPARKRLNFGQTGDSESVPDPQPLGEPPAAPSGVGPNTMAAGGGAPMADNNEGADGVGSSSGNWHCDSTWLGDRVITTSTRTWALPTYNNHLYKQISNGTSGGATNDNAYFGYSTPWGYFDFNRFHCHFSPRDWQRLINNNWGFRPKRLSFKLFNIQVKEVTQNEGTKTIANNLTSTIQVFTDSEYQLPYVLGSAHQGCLPPFPADVFTIPQYGYLTLNNGSQAVGRSSFYCLEYFPSQMLRTGNNFQFTYTFEDVPFHSSYAHSQSLDRLMNPLIDQYLYYLSRIQTTGGTANTQTLGFSQGGPNTMANQAKNWLPGPCYRQQRVSTTTGQNNNSNFAWTAGTKYHLNGRNSLANPGIAMATHKDDEERFFPSNGILIFGKQNAARDNADYSDVMPTSEEEIKTTNPVATEEYGIVADNLQQQNTAPQIGTVNSQGALPGMVWQNRDVYLQGPIWAKIPHTDGNFHPSPLMGGFGLKHPPPQILIKNTPVPADPPTTFNQSKLNSFITQYSTGQVSVEIEWELQKENSKRWNPEIQYTSNYYKSTSVDFAVNTEGVYSEPRPIGTRYLTRNL

SEQ ID NO: 3114 - protein, 738 aa, Artificial Sequence
  Description of Artificial Sequence: Synthetic polypeptide
MAADGYLPDWLEDNLSEGIREWWALKPGAPKPKANQQKQDDGRGLVLPGYKYLGPFNGLDKGEPVNAADAAALEHDKAYDQQLQAGDNPYLRYNHADAEFQERLQEDTSFGGNLGRAVFQAKKRVLEPLGLVEEGAKTAPGKKRPVEPSPQRSPDSSTGIGKKGQQPARKRLNFGQTGDSESVPDPQPLGEPPAAPSGVGPNTMAAGGGAPMADNNEGADGVGSSSGNWHCDSTWLGDRVITTSTRTWALPTYNNHLYKQISNGTSGGATNDNTYFGYSTPWGYFDFNRFHCHFSPRDWQRLINNNWGFRPKRLSFKLFNIQVKEVTQNEGTKTIANNLTSTIQVFTDSEYQLPYVLGSAHQGCLPPFPADVFTIPQYGYLTLNNGSQAVGRSSFYCLEYFPSQMLRTGNNFQFTYTFEDVPFHSSYAHSQSLDRLMNPLIDQYLYYLSRIQTTGGTANTQTLGFSQGGPNTMANQAKNWLPGPCYRQQRVSTTTGQNNNSNFAWTAGTKYHLNGRNSLANPGIAMATHKDDEERFFPSNGILIFGKQNAARGNADYSDVMPTSEEEIKTTNPVATEEYGIVADNLQQQNTAPQIGTVNSQGALPGMVWQNRDVYLQGPIWAKIPHTDGNFHPSPLMGGFGLKHPPPQILIKNTPVPADPPTTFNQSKLNSFITQYSTGQVSVEIEWELQKENSKRWNPEIQYTSNYYKSTSVDFAVNTEGVYSEPRPIGTRYLTRNL

SEQ ID NO: 3115 - protein, 738 aa, Artificial Sequence
  Description of Artificial Sequence: Synthetic polypeptide
MAADGYLPDWLEDNLSEGIREWWALKPGAPKPKANQQKQDDGRGLVLPGYKYLGPFNGLDKGEPVNAADAAALEHDKAYDQQLQAGDNPYLRYNHADAEFQERLQEDTSFGGNLGRAVFQAKKRVLEPLGLVEEGAKTAPGKKRPVEPSPQRSPDSSTGIGKKGQQPARKRLNFGQTGDSESVPDPQPLGEPPAAPSGVGPNTMAAGGGAPMADNNEGADGVGSSSGNWHCDSTWLGDRVITTSTRTWALPTYNNHLYKQISNGTSGGATNDNTYFGYSTPWGYFDFNRFHCHFSPRDWQRLINNNWGFRPKRLSFKLFNIQVKEVTQNEGTKTIANNLTSTIQVFTDSEYQLPYVLGSAHQGCLPPFPADVFTIPQYGYLTLNNGSQAVGRSSFYCLEYFPSQMLGTGNNFQFTYTFEDVPFHSSYAHSQSLDRLMNPLIDQYLYYLSRIQTTGGTANTQTLGFSQGGPNTMANQAKNWLPGPCYRQQRVSTTTGQNNNSNFAWTAGTKYHLNGRNSLANPGIAMATHKDDEERFFPSNGILIFGKQNAARDNADYSDVMPTSEEEIKTTNPVATEEYGIVADNLQQQNTAPQIGTVNSQGALPGMVWQNRDVYLQGPIWAKIPHTDGNFHPSPLMGGFGLKHPPPQILIKNTPVPADPPTTFNQSKLNSFITQYSTGQVSVEIEWELQKENSKRWNPEIQYTSNYYKSTSVDFAVNTEGVYSEPRPIGTRYLTRNL

SEQ ID NO: 3116 - protein, 738 aa, Artificial Sequence
  Description of Artificial Sequence: Synthetic polypeptide
MAADGYLPDWLEDNLSEGIREWWALKPGAPKPKANQQKQDDGRGLVLPGYKYLGPFNGLDKGEPVNAADAAALEHDKAYDQQLQAGDNPHLRYNHADAEFQERLQEDTSFGGNLGRAVFQAKKRVLEPLGLVEEGAKTAPGKKRPVEPSPQRSPDSSTGIGKKGQQPARKRLNFGQTGDSESVPDPQPLGEPPAAPSGVGPNTMAAGGGAPMADNNEGADGVGSSSGNWHCDSTWLGDRVITTSTRTWALPTYNNHLYKQISNGTSGGATNDNTYFGYSTPWGYFDFNRFHCHFSPRDWQRLINNNWGFRPKRLSFKLFNIQVKEVTQNEGTKTIANNLTSTIQVFTDSEYQLPYVLGSAHQGCLPPFPADVFTIPQYGYLTLNNGSQAVGRSSFYCLEYFPSQMLRTGNNFQFTYTFEDVPFHSSYAHSQSLDRLMNPLIDQYLYYLSRIQTTGGTANTQTLGFSQGGPNTMANQAKNWLPGPCYRQQRVSTTTGQNNNSNFAWTAGTKYHLNGRNSLANPGIAMATHKDDEERFFPSNGILIFGKQNAARDNADYSDVMPTSEEEIKTTNPVATEEYGIVADNLQQQNTAPQIGTVNSQGALPGMVWQNRDVYLQGPIWAKIPHTDGNFHPSPLMGGFGLKHPPPQILIKNTPVPADPPTTFNQSKLNSFITQYSTGQVSVEIEWELQKENSKRWNPEIQYTSNYYKSTSVDFAVNTEGVYSEPRPIGTRYLTRNL

SEQ ID NO: 3117 - protein, 738 aa, Artificial Sequence
  Description of Artificial Sequence: Synthetic polypeptide
MAADGYLPDWLEDNLSEGIREWWALKPGAPKPKANQQKQDDGRGLVLPGYKYLGPFNGLDKGEPVNAADAAALEHDKAYDQQLQAGDNPYLRYNHADAEFQERLQEDTSFGGNLGRAVFQAKKRVLEPLGLVEEGAKTAPGKKRPVEPSPQRSPDSSTGIGKKGQQPARKRLNFGQTGDSESVPDPQPLGEPPAAPSGVGPNTMAAGGGAPMADNNEGADGVGSSSGNWHCDSTWLGDRVITTSTRTWALPTYNNHLYKQISNGTSGGATNDNTYFGYSTPWGYFDFNRFHCHFSPRDWQRLINNNWGFRPKRLSFKLFNIQVKEVTQNEGTKTIANNLTSTIQVFTDSEYQLPYVLGPAHQGCLPPFPADVFTIPQYGYLTLNNGSQAVGRSSFYCLEYFPSQMLRTGNNFQFTYTFEDVPFHSSYAHSQSLDRLMNPLIDQYLYYLSRIQTTGGTANTQTLGFSQGGPNTMANQAKNWLPGPCYRQQRVSTTTGQNNNSNFAWTAGTKYHLNGRNSLANPGIAMATHKDDEERFFPSNGILIFGKQNAARDNADYSDVMPTSEEEIKTTNPVATEEYGIVADNLQQQNTAPQIGTVNSQGALPGMVWQNRDVYLQGPIWAKIPHTDGNFHPSPLMGGFGLKHPPPQILIKNTPVPADPPTTFNQSKLNSFITQYSTGQVSVEIEWELQKENSKRWNPEIQYTSNYYKSTSVDFAVNTEGVYSEPRPIGTRYLTRNL

SEQ ID NO: 3118 - protein, 738 aa, Artificial Sequence
  Description of Artificial Sequence: Synthetic polypeptide
MAADGYLPDWLEDNLSEGIREWWALKPGAPKPKANQQKQDDGRGLVLPGYKYLGPFNGLDKGEPVNAADAAALEHDKAYDQQLQAGDNPYLRYNHADAEFQERLQEDTSFGGNLGRAVFQAKKRVLEPLGLVGEGAKTAPGKKRPVEPSPQRSPDSSTGIGKKGQQPARKRLNFGQTGDSESVPDPQPLGEPPAAPSGVGPNTMAAGGGAPMADNNEGADGVGSSSGNWHCDSTWLGDRVITTSTRTWALPTYNNHLYKQISNGTSGGATNDNTYFGYSTPWGYFDFNRFHCHFSPRDWQRLINNNWGFRPKRLSFKLFNIQVKEVTQNEGTKTIANNLTSTIQVFTDSEYQLPYVLGSAHQGCLPPFPADVFTIPQYGYLTLNNGSQAVGRSSFYCLEYFPSQMLRTGNNFQFTYTFEDVPFHSSYAHSQSLDRLMNPLIDQYLYYLSRIQTTGGTANTQTLGFSQGGPNTMANQAKNWLPGPCYRQQRVSTTTGQNNNSNFAWTAGTKYHLNGRNSLANPGIAMATHKDDEERFFPSNGILIFGKQNAARDNADYSDVMPTSEEEIKTTNPVATEEYGIVADNLQQQNTAPQIGTVNSQGALPGMVWQNRDVYLQGPIWAKIPHTDGNFHPSPLMGGFGLKHPPPQILIKNTPVPADPPTTFNQSKLNSFITQYSTGQVSVEIEWELQKENSKRWNPEIQYTSNYYKSTSVDFAVNTEGVYSEPRPIGTRYLTRNL

SEQ ID NO: 3119 - protein, 738 aa, Artificial Sequence
  Description of Artificial Sequence: Synthetic polypeptide
MAADGYLPDWLEDNLSEGIREWWALKPGAPKPKANQQKQDDGRGLVLPGYKYLGPFNGLDKGEPVNAADAAALEHDKAYDQQLQAGDNPYLRYNHADAEFQERLQEDTSFGGNLGRAVFQAKKRVLEPLGLVEEGAKTAPGKKRPVEPSPQRSPDSSTGIGKKGQQPARKRLNFGQTGDSESVPDPQPLGEPPAAPSGVGPNTMAAGGGAPMADNNEGADGVGSSSGNWHCDSTWLGDRVITTSTRTWALPTYNNHLYKQISNGTSGGATNDNTYFGYSTPWGYFDFNRFHCHFSPRDWQRLINNNWGFRPKRLSFKLFNIQVKEVTQNEGTKTIANNLTSTIQVFTDSEYQLPYVLGSAHQGCLPPFPADVFTIPQYGYLTLNNGSQAVGRSSFYCLEYFPSQMLRTGNNFQFTYTFEDVPFHSSYAHSQSLDRLMNPLIDQYLYYLSRIQTTGGTANTQTLGFSQGGPNTMANQAKNWLPGPCYRQQRVSTTTGQNNNSNFAWTAGTKYHLNGRNSLANPGIAMATHKDDEERFFPSNGILIFGKQNAARDNADYSDVMPTSEEEIKTTNPVATEEYGIVADNLQQQNTAPQIGTVNSQGALPGMVWQNRDVYLQGPIWAKIPHTDGNFHPSPLMGGFGLKHPPPQILIKNTPVPADPPTTFNQSKLNSFITQYSTGQVSVEIEWELQKESSKRWNPEIQYTSNYYKSTSVDFAVNTEGVYSEPRPIGTRYLTRNL

SEQ ID NO: 3120 - protein, 738 aa, Artificial Sequence
  Description of Artificial Sequence: Synthetic polypeptide
MAADGYLPDWLEDNLSEGIREWWALKPGAPKPKANQQKQDDGRGLVLPGYKYLGPFNGLDKGEPVNAADAAALEHDKAYDQQLQAGDNPYLRYNHADAEFQERLQEDTSFGGNLGRAVFQAKKRVLEPLGLVEEGAKTAPGKKRPVEPSPQRSPDSSTGIGKKGQQPARKRLNFGQTGDSESVPDPQPLGEPPAAPSGVGPNTMAAGGGAPMADNNEGADGVGSSSGNWHCDSTWLGDRVITTSTRTWALPTYNNHLYKQISNGTSGGATNDNTYFGYSTPWGYFDFNRFHCHFSPRDWQRLINNNWGFRPKRLSFKLFNIQVKEVTQNEGTKTIANNLTSTIQVFTDSEYQLPYVLGSAHQGCLPPFPADVFTIPQYGYLTLNNGSQAVGRSSFYCLEYFPSQMLRTGNNFQFTYTFEDVPFHSSYAHSQSLDRLMNPLIDQYLYYLSRIQTTGGTANTQTLGFSQGGPNTMANQAKNWLPGPCYRQQRVSTTTGQNNNSNFAWTAGTKYHLNGRNSLANPGIAMATHKDDEERFFPSNGILIFGKQNAARDNADYSDVMPASEEEIKTTNPVATEEYGIVADNLQQQNTAPQIGTVNSQGALPGMVWQNRDVYLQGPIWAKIPHTDGNFHPSPLMGGFGLKHPPPQILIKNTPVPADPPTTFNQSKLNSFITQYSTGQVSVEIEWELQKENSKRWNPEIQYTSNYYKSTSVDFAVNTEGVYSEPRPIGTRYLTRNL

SEQ ID NO: 3121 - protein, 738 aa, Artificial Sequence
  Description of Artificial Sequence: Synthetic polypeptide
MAADGYLPDWLEDNLSEGIREWWALKPGAPKPKANQQKQDDGRGLVLPGYKYLGPFNGLDKGEPVNAADAAALEHDKAYDQQLQAGDNPYLRYNHADAEFQERLQEDTSFGGNLGRAVFQAKKRVLEPLGLVEEGAKTAPGKKRPVEPSPQRSPDSSTGIGKKGQQPARKRLNFGQTGDSESVPDPQPLGEPPAAPSGVGPNTMAAGGGAPMADNNEGADGVGSSSGNWHCDSTWLGDRVITTSTRTWALPTYNNHLYKQISNGTSGGATNDNTYFGYSTPWGYFDFNRFHCHFSPRDWQRLINNNWGFRPKRLSFKLFNIQVKEVTQNEGTKTIANNLTSTIQVFTDSEYQLPYVLGSAHQGCLPPFPADVLTIPQYGYLTLNNGSQAVGRSSFYCLEYFPSQMLRTGNNFQFTYTFEDVPFHSSYAHSQSLDRLMNPLIDQYLYYLSRIQTTGGTANTQTLGFSQGGPNTMANQAKNWLPGPCYRQQRVSTTTGQNNNSNFAWTAGTKYHLNGRNSLANPGIAMATHKDDEERFFPSNGILIFGKQNAARDNADYSDVMPTSEEEIKTTNPVATEEYGIVADNLQQQNTAPQIGTVNSQGALPGMVWQNRDVYLQGPIWAKIPHTDGNFHPSPLMGGFGLKHPPPQILIKNTPVPADPPTTFNQSKLNSFITQYSTGQVSVEIEWELQKENSKRWNPEIQYTSNYYKSTSVDFAVNTEGVYSEPRPIGTRYLTRNL

SEQ ID NO: 3122 - protein, 738 aa, Artificial Sequence
  Description of Artificial Sequence: Synthetic polypeptide
MAADGYLPDWLEDNLSEGIREWWALKPGAPKPKANQQKQDDGRGLVLPGYKYLGPFNGLDKGEPVNAADAAALEHDKAYDQQLQAGDNPYLRYNHADAEFQERLQEDTSFGGNLGRAVFQAKKRVLEPLGLVEEGAKTAPGKKRPVEPSPQRSPDSSTGIGKKGQQPARKRLNFGQTGDSESVPDPQPLGEPPAAPSGVGPNTMAAGGGAPMADNNEGADGVGSSSGNWHCDSTWLGDRVITTSTRTWALPTYNNHLYKQISNGTSGGATNDNTYFGYSTPWGYFDFNRFHCHFSPRDWQRLINNNWGFRPKRLSFKLFNIQVKEVTQNEGTKTIANNLTSTIRVFTDSEYQLPYVLGSAHQGCLPPFPADVFTIPQYGYLTLNNGSQAVGRSSFYCLEYFPSQMLRTGNNFQFTYTFEDVPFHSSYAHSQSLDRLMNPLIDQYLYYLSRIQTTGGTANTQTLGFSQGGPNTMANQAKNWLPGPCYRQQRVSTTTGQNNNSNFAWTAGTKYHLNGRNSLANPGIAMATHKDDEERFFPSNGILIFGKQNAARDNADYSDVMPTSEEEIKTTNPVATEEYGIVADNLQQQNTAPQIGTVNSQGALPGMVWQNRDVYLQGPIWAKIPHTDGNFHPSPLMGGFGLKHPPPQILIKNTPVPADPPTTFNQSKLNSFITQYSTGQVSVEIEWELQKENSKRWNPEIQYTSNYYKSTSVDFAVNTEGVYSEPRPIGTRYLTRNL

SEQ ID NO: 3123 - protein, 738 aa, Artificial Sequence
  Description of Artificial Sequence: Synthetic polypeptide
MAADGYLPDWLEDNLSEGIREWWALKPGAPKPKANQQKQDDGRGLVLPGYKYLGPFNGLDKGEPVNAADAAALEHDKAYDQQLQAGDNPYLRYNHADAEFQERLQEDTSFGGNLGRAVFQAKKRVLEPLGLVEEGAKTAPGKKRPVEPSPQRSPDSSTGIGKKGQQPARKRLNFGQTGDSESVPDPQPLGEPPAAPSGVGPNTMAAGGGAPMADNNEGADGVGSSSGNWHCDSTWLGDRVITTSTRTWALPTYNNHLYKQISNGTSGGATNDNTYFGYSTPWGYFDFNRFHCHFSPRDWRRLINNNWGFRPKRLSFKLFNIQVKEVTQNEGTKTIANNLTSTIQVFTDSEYQLPYVLGSAHQGCLPPFPADVFTIPQYGYLTLNNGSQAVGRSSFYCLEYFPSQMLRTGNNFQFTYTFEDVPFHSSYAHSQSLDRLMNPLIDQYLYYLSRIQTTGGTANTQTLGFSQGGPNTMANQAKNWLPGPCYRQQRVSTTTGQNNNSNFAWTAGTKYHLNGRNSLANPGIAMATHKDDEERFFPSNGILIFGKQNAARDNADYSDVMPTSEEEIKTTNPVATEEYGIVADNLQQQNTAPQIGTVNSQGALPGMVWQNRDVYLQGPIWAKIPHTDGNFHPSPLMGGFGLKHPPPQILIKNTPVPADPPTTFNQSKLNSFITQYSTGQVSVEIEWELQKENSKRWNPEIQYTSNYYKSTSVDFAVNTEGVYSEPRPIGTRYLTRNL

SEQ ID NO: 3124 - protein, 738 aa, Artificial Sequence
  Description of Artificial Sequence: Synthetic polypeptide
MAADGYLPDWLEDNLSEGIREWWALKPGAPKPKANQQKQDDGRGLVLPGYKYLGPFNGLDKGEPVNAADAAALEHDKAYDQQLQAGDNPYLRYNHADAEFQERLQEDTSFGGNLGRAVFQAKKRVLEPLGLVEEGAKTAPGKKRPVEPSPQRSPDSSTGIGKKGQQPARKRLNFGQTGDSESVPDPQPLGEPPAAPSGVGPNTMAAGGGAPMADNNEGADGVGSSSGNWHCDSTWLGDRVITTSTRTWALPTYNNHLYKQISNGTSGGATNDNTYFGYSTPWGYFDFNRFHCHFSPRDWQRLINNNWGFRPKRLSFKLFNIQVKEVTQNEGTKTIANNLTSTIQVFTDSEYQLPYVLGSAHQGCLPPFPADVFMIPQYGYLTLNNGSQAVGRSSFYCLEYFPSQMLRTGNNFQFTYTFEDVPFHSSYAHSQSLDRLMNPLIDQYLYYLSRTQTTGGTASTQTLGFSQGGPNTMANQAKNWLPGPCYRQQRVSTTTGQNNNSNFAWTAGTKYHLNGRNSLANPGIAMATHKDDEERFFPSNGILIFGKQNAARDNADYSDVMLTSEEEIKTTNPVATEEYGIVADNLQQQNTAPQIGTVNSQGALPGMVWQNRDVYLQGPIWAKIPHTDGNFHPSPLMGGFGLKHPPPQILIKNTPVPADPPTTFNQSKLNSFITQYSTGQVSVEIEWELQKENSKRWNPEIQYTSNYYKSTSVDFAVNTEGVYSEPRPIGTRYLTRNL

SEQ ID NO: 3125 - protein, 738 aa, Artificial Sequence; identical to SEQ ID NO: 116
  Description of Artificial Sequence: Synthetic polypeptide

SEQ ID NO: 3126 - protein, 738 aa, Artificial Sequence
  Description of Artificial Sequence: Synthetic polypeptide
MAADGYLPDWLEDNLSEGIREWWALKPGAPKPKANQQKQDDGRGQVLPGYKYLGPFNGLDKGEPVNAADAAALEHDKAYDQQLQAGDNPYLRYNHADAEFQERLQEDTSFGGNLGRAVFQAKKRVLEPLGLVEEGAKTAPGKKRPVEPSPQRSPDSSTGIGKKGQQPARKRLNFGQTGDSESVPDPQPLGEPPAAPSGVGPNTMAAGGGAPMADNNEGADGVGSSSGNWHCDSTWLGDRVITTSTRTWALPTYNNHLYKQISNGTSGGATNDNTYFGYSTPWGYFDFNRFHCHFSPRDWQRLINNNWGFRPKRLSFKLFNIQVKEVTQNEGTKTIANNLTSTIQVFTDSEYQLPYVLGSAHQGCLPPFPADVFMIPQYGYLTLNNGSQAVGRSSFYCLEYFPSQMLRTGNNFQFTYTFEDVPFHSSYAHSQSLDRLMNPLIDQYLYYLSRTQTTGGTANTQTLGFSQGGPNTMANQAKNWLPGPCYRQQRVSTTTGQNNNSNFAWTAGTKYHLNGRNSLANPGIAMATHKDDEERFFPSNGILIFGKQNAARDNADYSDVMLTSEEEIKTTNPVATEEYGIVADNLQQQNTAPQIGTVNSQGALPGMVWQNRDVYLQGPVWAKIPHTDGNFHPSPLMGGFGLKHPPPQILIKNTPVPADPPTTFNQSKLNSFITQYSTGQVSVEIEWELQKENSKRWNPEIQYTSNYYKSTSVDFAVNTEGVYSEPRPIGTRYLTRNL

SEQ ID NO: 3127 - protein, 738 aa, Artificial Sequence
  Description of Artificial Sequence: Synthetic polypeptide
MAADGYLPDWLEDNLSEGIREWWALKPGAPKPKANQQKQDDGRGLVLPGYKYLGPFNGLDKGEPVNAADAAALEHDKAYDQQLQAGDNPYLRYNHADAEFQERLQEDTSFGGNLGRAVFQAKKRVLEPLGLVEEGAKTAPGKKRPVEPSPQRSPDSSTGIGKKGQQPARKRLNFGQTGDSESVPDPQPLGEPPAAPSGVGPNTMAAGGGAPMADNNEGADGVGSSSGNWHCDSTWLGDRVITTSTRTWALPTYNNHLYKQISNGTSGGATNDNTYFGYSTPWGYFDFNRFHCHFSPRDWQRLINSNWGFRPKRLSFKLFNIQVKEVTQNEGTKTIANNLTSTIQVFTDSEYQLPYVLGSAHQGCLPPFPADVFMIPQYGYLTLNNGSQAVGRSSFYCLEYFPSQMLRTGNNFQFTYTFEDVPFHSSYAHSQSLDRLMNPLIDQYLYYLSRTQTTGGTANTQTLGFSQGGPNTMANQAKNWLPGPCYRQQRVSTTTGQNNNSNFAWTAGTKYHLNGRNSLANPGIAMATHKDDEERFFPSNGILIFGKQNAARDNADYSDVMLTSEEEIKTTNPVATEEYGIVADNLQQQNTAPQIGTVNSQGALPGMVWQNRDVYLQGPIWAKIPHTDGNFHPSPLMGGFGLKHPPPQILIKNTPVPADPPTTFNQSKLNSFITQYSTGQVSVEIEWELQKENSKRWNPEIQYTSNYYKSTSVDFAVNTEGVYSEPRPIGTRYLTRNL

SEQ ID NO: 3128 - protein, 738 aa, Artificial Sequence
  Description of Artificial Sequence: Synthetic polypeptide
MAADGYLPDWLEDNLSEGIREWWALKPGAPKPKANQQKQDDGRGLVLPGYKYLGPFNGLDKGEPVNAADAAALEHDKAYDQQLQAGDNPYLRYNHADAEFQERLQEDTSFGGNLGRAVFQAKKRVLEPLGLVEEGAKTAPGKKRPVEPSPQRSPDSSTGIGKKGQQPARKRLNFGQTGDSESVPDPQPLGEPPAAPSGVGPNTMAAGGGAPMADNNEGADGVGSSSGNWHCDSTWLGDRVITTSTRTWALPTYNNHLYKQISNGTSGGATNDNTYFGYSTPWGYFDFNRFHCHFSPRDWQRLINNNWGFRPKRLSFKLFNIQVKEVTQNEGTKTIANNLTSTIQVFTDSEYQLPYVLGSAHQGCLPPFPADVFTIPQYGYLTLNNGSQAVGRSSFYCLEYFPSQMLRTGNNFQFTYTFEDVPFHSSYAHSQSLDRLMNPLIDQYLYYLSRTQTTGGTANTQTLGFSQGGPNTMANQAKNWLPGPCYRQQRVSTTTGQNNNSNFAWTAGTKYHLNGRNSLANPGIAMATHKDDEERFFPSNGILIFGKQNAARDNADYSDVMLTSEEEIKTTNPVATEEYGIVADNLQQQNTAPQIGTVNSQGALPGMVWQNRDVYLQGPIWAKIPHTDGNFHPSPLMGGFGLKHPPPQILIKNTPVPADPPTTFNQSKLNSFITQYSTGQVSVEIEWELQKENSKRWNPEIQYTSNYYKSTSVDFAVNTEGVYSEPRPIGTRYLTRNL

SEQ ID NO: 3129 - protein, 738 aa, Artificial Sequence
  Description of Artificial Sequence: Synthetic polypeptide
MAADGYLPDWLEDNLSEGIREWWALKPGAPKPKANQQKQDDGRGLVLPGYKYLGPFNGLDKGEPVNAADAAALEHDKAYDQQLQAGDNPYLRYNHADAEFQERLQEDTSFGGNLGRAVFQAKKRVLEPLGLVEEGAKTAPGKKRPVEPSPQRSPDSSTGIGKKGQQPARKRLNFGQTGDSESVPDPQPLGEPPAAPSGVGPNTMAAGGGAPMADNNEGADGVGSSSGNWHCDSTWLGDRVITTSTRTWALPTYNNHLYKQISNGTSGGATNDNTYFGYSTPWGYFDFNRFHCHFSPRDWQRLIDNNWGFRPKRLSFKLFNIQVKEVTQNEGTKTIANNLTSTIQVFTDSEYQLPYVLGSAHQGCLPPFPADVFMIPQYGYLTLNNGSQAVGRSSFYCLEYFPSQMLRTGNNFQFTYTFEDVPFHSSYAHSQSLDRLMNPLIDQYLYYLSRTQTTGGTANTQTLGFSQGGPNTMANQAKNWLPGPCYRQQRVSTTTGQNNNSNFAWTAGTKYHLNGRNSLANPGIAMATHKDDEERFFPSNGILIFGKQNAARDNADYSDVMLTSEEEIKTTNPVATEEYGIVADNLQQQNTAPQIGTVNSQGALPGMVWQNRDVYLQGPIWAKIPHTDGNFHPSPLMGGFGLKHPPPQILIKNTPVPADPPTTFNQSKLNSFITQYSTGQVSVEIEWELQKENSKRWNPEIQYTSNYYKSTSVDFAVNTEGVYSEPRPIGTRYLTRNL

SEQ ID NO: 3130 - protein, 738 aa, Artificial Sequence
  Description of Artificial Sequence: Synthetic polypeptide
MAADGYLPDWLEDNLSEGIREWWALKPGAPKPKANQQKQDDGRGLVLPGYKYLGPFNGLDKGEPVNAADAAALEHDKAYDQQLQAGDNPYLRYNHADAEFQERLQEDTSFGGNLGRAVFQAKKRVLEPLGLVEEGAKTAPGKKRPVEPSPQRSPDSSTGIGKKGQQPARKRLNFGQTGDSESVPDPQPLGEPPAAPSGVGPNTMAAGGGAPMADNNEGADGVGSSSGNWHCDSTWLGDRVITTSTRTWALPAYNNHLYKQISNGTSGGATNDNTYFGYSTPWGYFDFNRFHCHFSPRDWQRLINNNWGFRPKRLSFKLFNIQVKEVTQNEGTKTIANNLTSTIQVFTDSEYQLPYVLGSAHQGCLPPFPADVFTIPQYGYLTLNNGSQAVGRSSFYCLEYFPSQMLRTGNNFQFTYTFEDVPFHSSYAHSQSLDRLMNPLIDQYLYYLSRTQTTGGTANTQTLGFSQGGPNTMANQAKNWLPGPCYRQQRVSTTTGQNNNSNFAWTAGTKYHLNGRNSLANPGIAMATHKDDEERFFPSNGILIFGKQNAARDNADYSDVMLTSEEEIKTTNPVATEEYGIVADNLQQQNTAPQIGTVNSQGALPGMVWQNRDVYLQGPIWAKIPHTDGNFHPSPLMGGFGLKHPPPQILIKNTPVPADPPTTFNQSKLNSFITQYSTGQVSVEIEWELQKENSKRWNPEIQYTSNYYKSTNVDFAVNTEGVYSEPRPIGTRYLTRNL

SEQ ID NO: 3131 - protein, 738 aa, Artificial Sequence
  Description of Artificial Sequence: Synthetic polypeptide
MAADGYLPDWLEDNLSEGIREWWALKPGAPKPKANQQKQDDGRGLVLPGYKYLGPFNGLDKGEPVNAADAAALEHDKAYDQQLQAGDNPYLRYNHADAEFQERLQEDTSFGGNLGRAVFQAKKRVLEPLGLVEEGAKTAPGKKRPVEPSPQRSPDSSTGIGKKGQQPARKRLNFGQTGDSESVPDPQPLGEPPAAPSGVGPNTMAAGGGAPMADNNEGADGVGSSSGNWHCDSTWLGDRVITTSTRTWALPTYNNHLYKQISNGTSGGATNDNTYFGYSTPWGYFDFNRFHCHFSPRDWQRLINNNWGFRPKRLSFKLFNIQVKEVTQNEGTKTIANNLTSTIQVFTDSEYQLPYVLGSAHQGCLPPFPADVFMIPQYGYLTLNDGSQAVGRSSFYCLEYFPSQMLRTGNNFQFTYTFEDVPFHSSYAHSQSLDRLMNPLIDQYLYYLSRTQTTGGTANTQTLGFSQGGPNTMANQAKNWLPGPCYRQQRVSTTTGQNNNSNFAWTAGTKYHLNGRNSLANPGIAMATHKDDEERFFPSNGILIFGKQNAARDNADYSDVMLTSEEEIKTTNPVATEEYGIVADNLQQQNTAPQIGTVNSQGALPGMVWQNRDVYLQGPIWAKIPHTDGNFHPSPLMGGFGLKHPPPQILIKNTPVPADPPTTFNQSKLNSFITQYSTGQVSVEIEWELQKENSKRWNPEIQYTSNYYKSTSVDFAVNTEGVYSEPRPIGTRYLTRNL

SEQ ID NO: 3132 - protein, 738 aa, Artificial Sequence
  Description of Artificial Sequence: Synthetic polypeptide
MAADGYLPDWLEDNLSEGIREWWALKPGAPKPKANQQKQDDGRGLVLPGYKYLGPFNGLDKGEPVNAADAAALEHDKAYDQQLQAGDNPYLRYNHADAEFQERLQEDTSFGGNLGRAVFQAKKRVLEPLGLVEEGAKTAPGKKRPVEPSPQRSPDSSTGIGKKGQQPARKRLNFGQTGDSESVPDPQPLGEPPAAPSGVGPNTMAAGGGAPMADNNEGADGVGSSSGNWHCDSTWLGDRVITTSTRTWAQPTYNNHLYKQISNGTSGGATNDNTYFGYSTPWGYFDFNRFHCHFSPRDWQRLINNNWGFRPKRLSFKLFNIQVKEVTQNEGTKTIANNLTSTIQVFTDSEYQLPYVLGSAHQGCLPPFPADVFMIPQYGYLTLNNGSQAVGRSSFYCLEYFPSQMLRTGNNFQFTYTFEDVPFHSSYAHSQSLDRLMNPLIDQYLYYLSRTQTTGGTANTQTLGFSQGGPNTMANQAKNWLPGPCYRQQRVSTTTGQNNNSNFAWTAGTKYHLNGRNSLANPGIAMATHKDDEERFFPSNGILIFGKQNAARDNADYSDVMLTSEEEIKTTNPVATEEYGIVADNLQQQNTAPQIGTVNSQGALPGMVWQNRDVYLQGPIWAKIPHTDGNFHPSPLMGGFGLKHPPPQILIKNTPVPADPPTTFNQSKLNSFITQYSTGQVSVEIEWELQKENSKRWNPEIQYTSNYYKSTSVDFAVNTEGVYSEPRPIGTRYLTRNL

SEQ ID NO: 3133 - protein, 735 aa, Artificial Sequence
  Description of Artificial Sequence: Synthetic polypeptide
MAADGYLPDWLEDTLSEGIRQWWKLKPGPPPPKPAERHKDDSRGLVLPGYKYLGPFNGLDKGEPVNEADAAALEHDKAYDRQLDSGDNPYLKYNHADAEFQERLKEDTSFGGNLGRAVFQAKKRVLEPLGLVEEPVKTAPGKKRPVEHSPAEPDSSSGTGKAGQQPARKRLNFGQTGDADSVPDPQPLGQPPAAPSGLGTNTMATGSGAPMADNNEGADGVGNSSGNWHCDSTWMGDRVITTSTRTWALPTYNNHLYKQISSQSGASNDNHYFGYSTPWGYFDFNRFHCHFSPRDWQRLINNNWGFRPKRLSFKLFNIQVKEVTQNDGTTTIANNLTSTVQVFTDSEYQLPYVLGSAHQGCLPPFPADVFMVPQYGYLTLNNGSQAVGRSSFYCLEYFPSQMLRTGNNFTFSYTFEDVPFHSSYAHSQSLDRLMNPLIDQYLYYLSKTNAPSGTTTMSRLQFSQAGASDIRDQSRNWLPGPCYRQQRVSKTAADNNNSDYSWTGATKYHLNGRDSLVNPGPAMASHKDDEEKYFPQSGVLIFGKQGSNKTNVDIEKVMITDEEEIRTTNPVATEQYGAVSTNLQSGNTQAATSDVNTQGVLPGMVWQDRDVYLQGPIWAKIPHTDGHFHPSPLMGGFGLKHPPPQILIKNTPVPANPSTTFSAAKFASFITQYSTGQVSVEIEWELQKENSKRWNPEIQYTSNYNKSVNVDFTVDTNGVYSEPRPIGTRYLTRNL

SEQ ID NO: 3134 - protein, 735 aa, Artificial Sequence
  Description of Artificial Sequence: Synthetic polypeptide
MAADGYLPDWLEDTLSEGIRQWWKLKPGPPPPKPAERHKDDSRGLVLPGYKYLGPFNGLDKGEPVNEADAAALEHDKAYDRQLDSGDNPYLKYNHADAEFQERLKEDTSFGGNLGRAVFQAKKRVLEPLGLVEEPVKTAPGKKRPVEHSPAEPDSSSGTGKAGQQPARKRLNFGQTGDADSVPDPQPLGQPPAAPSGLGTNTMATGSGAPMADNNEGADGVGNSSGNWHCDSTWMGDRVITTSTRTWALPTYNNHLYKQISSQSGASNDNHYFGYSTPWGYFDFNRFHCHFSPRDWQRLINNNWGFRPKRLSFKLFNIQVKEVTQNDGTTTIANNLTSTVQVFTDSEYQLPYVLGSAHQGCLPPFPADVFMVPQYGYLTLNNGSQAVGRSSFYCLEYFPSQMLRTGNNFTFSYTFEDVPFHSSYAHSQSLDRLMNPLIDQYLYYLSKTNAPSGTTTMSRLQFSQAGASDIRDQSRNWLPGPCYRQQRVSKTAADNNNSDYSWTGATKYHLNGRDSLVNPGPAMASHKDDEEKIFPQSGVLIFGKQGSNKTNVDIEKVMITDEEEIRTTNPVATEQYGAVSTNLQSGNTQAATSDVNTQGVLPGMVWQDRDVYLQGPIWAKIPHTDGHFHPSPLMGGFGLKHPPPQILIKNTPVPANPSTTFSAAKFASFITQYSTGQVSVEIEWELQKENSKRWNPEIQYTSNYNKSVNVDFTVDTNGVYSEPRPIGTRYLTRNL

SEQ ID NO: 3135 - protein, 735 aa, Artificial Sequence
  Description of Artificial Sequence: Synthetic polypeptide
MAADGYLPDWLEDTLSEGIRQWWKLKPGPPPPKPAERHKDDSRGLVLPGYKYLGPFNGLDKGEPVNEADAAALEHDKAYDRQLDSGDNPYLKYNHADAEFQERLKEDTSFGGNLGRAVFQAKKRVLEPLGLVEEPVKTAPGKKRPVEHSPAEPDSSSGTGKAGQQPARKRLNFGQTGDADSVPDPQPLGQPPAAPSGLGTNTMATGSGAPMADNNEGADGVGNSSGNWHCDSTWMGDRVITTSTRTWALPTYNNHLYKQISSQSGASNDNHYFGYSTPWGYFDFNRFHCHFSPRDWQRLINNNWGFRPKRLSFKLFNIQVKEVTQNDGTTTIANNLTSTVQVFTDSEYQLPYALGSAHQGCLPPFPADVFMVPQYGYLTLNNGSQAVGRSSFYCLEYFPSQMLRTGNNFTFSYTFEDVPFHSSYAHSQSLDRLMNPLIDQYLYYLSKTNAPSGTTTMSRLQFSQAGASDIRDQSRNWLPGPCYRQQRVSKTAADNNNSDYSWTGATKYHPNGRDSLVNPGPAMASHKDDEEKYFPQSGVLIFGKQGSNKTNVDIEKVMITDEEEIRTTNPVATEQYGAVSTNLQSGNTQAATSDVNTQGVLPGMVWQDRDVYLQGPIWAKIPHTDGHSHPSPLMGGFGLKHPPPQILIKNTPVPANPSTTFSAAKFASFITQYSTGQVSVEIEWELQKENSKRWNPEIQYTSNYNKSVNVDFTVDTNGVYSEPRPIGTRYLTRNL

SEQ ID NO: 3136 - protein, 734 aa, Artificial Sequence
  Description of Artificial Sequence: Synthetic polypeptide
MAADGYLPDWLEDTLSEGIRQWWKLKPGPPPPKPAERHKDDSRGLVLPGYKYLGPFNGLDKGEPVNEADAAALEHDKAYDRQLDSGDNPYLKYNHADAEFQERLKEDTSFGGNLGRAVFQAKKRVLEPLGLVEEPVKTAPGKKRPVEHSPAEPDSSSGTGKAGQQPARKRLNFGQTGDADSVPDPQPLGQPPAAPSGLGTNTMATGSGAPMADNNEGADGVGNSSGNWHCDSTWMGDRVITTSTRTWALPTYNNHLYKQISSQSGASNDNHYFGYSTPWGYFDFNRFHCHFSPRDWQRLINNNWGFRPKRLSFKLFNIQVKEVTQNDGTTTIANNLTSTVQVFTDSEYQLPYVLGSAHQGCLPPFPADVFMVPQYGYLTLNNGSQAVGRSSFYCLEYFPSQMLRTGNNFTFSYTFEDVPFHSSYAHSQSLDRLMNPLIDQYLYYLSKTNAPSGTTTMSRLQFSQAGASDIRDQSRNWLPGPCYRQQRVSKTAADNNSDYSWTGATKYHLNGRDSLVNPGPAMASHKDDEEKYFPQSGVLIFGKQGSNKTNVDIEKVMITDEEEIRTTNPVATEQYGAVSTNLQSGNTQAATSDVNTQGVLPGMVWQDRDVYLQGPIWAKIPHTDGHFHPSPLMGGFGLKHPPPQILIKNTPVPANPSTTFSAAKFASFITQYSTGQVSVEIEWELQKENSKRWNPEIQYTSNYNKSVNVDFTVDTNGVYSEPRPIGTRYLTRNL

SEQ ID NO: 3137 - protein, 735 aa, Artificial Sequence
  Description of Artificial Sequence: Synthetic polypeptide
MAADGYLPDWLEDTLSEGIRQWWKLKPGPPPPKPAERHKDDSRGLVLPGYKYLGPFNGLDKGEPVNEADAAALEHDKAYDRQLDSGDNPYLKYNHADAEFQERLKEDTSFGGNLARAVFQAKKRVLEPLGLVEEPVKTAPGKKRPVEHSPAEPDSSSGTGKSGQQPARKRLNFGQTGDADSVPDPQPLGQPPAAPSGLGTNTMASGSGAPMADNNEGADGVGNSSGNWHCDSTWMGDRVITTSTRTWALPTYNNHLYKQISSQSGASNDNHYFGYSTPWGYFDFNRFHCHFSPRDWQRLINNNWGFRPKRLNFKLFNIQVKEVTQNDGTTTIANNLTSTVQVFTDSEYQLPYVLGSAHQGCLPPFPADVFMVPQYGYLTLNNGSQAVGRSSFYCLEYFPSQMLRTGNNFTFSYTFEDVPFHSSYAHSQSLDRLMNPLIDQYLYYLSRTNTPSGTTTQSRLQFSQAGASDIRDQSRNWLPGPCYRQQRVSKTAADNNNSDYSWTGATKYHLNGRDSLVNPGTAMASHKDDEEKYFPQSGVLIFRKQDSGKTNVDIEKVMITDEEEIRTTNPVATEQYGSVSTNLQSGNTQAATSDVNTQGVLPGMVWQDRDVYLQGPIWAKIPHTDGHFHPSPLMGGLGQKHPPPQSLIKNTPVPANPSTTFSAAKFASFITQYSTGQVSVEIEWELQKENSKRWNPEIQYTSNYNKSVNVDFTVDTNGVYSEPRPIGTRYLTRNL

SEQ ID NO: 3138 - protein, 735 aa, Artificial Sequence
  Description of Artificial Sequence: Synthetic polypeptide
MAADGYLPDWLEDTLSEGIRQWWKLKPGPPPPKPAERHKDDSRGLVLPGYKYLGPFNGLDKGEPVNEADAAALEHDKAYDRQLDSGDNPYLKYNHADAEFQERLKEDTSFGGNLARAVFQAKKRVLEPLGLVEEPVKTAPGKKRPVEHSPAEPDSSSGTGKSGQQPARKRLNFGQTGDADSVPDPQPLGQPPAAPSGLGTNTMASGSGAPMADNNEGADGVGNSSGNWHCDSTWMGDRVITTSTRTWALPTYNNHLYKQISSQSGASNDNHYFGYSTPWGYFDFNRFHCHFSPRDWQRLINNNWGFRPKRLNFKLFNIQVKEVTQNDGTTTIANNLTSTVQVFTDSEYQLPYVLGSAHQGCLPPFPADVFMVPQYGYLTLNNGSQAVGRSSFYCLEYFPSQMLRTGNNFTFSYTFEDVPFHSSYAHSQSLDRLMNPLIDQYLYYLSRTNTPSGTTTQSRLQFSQAGASDIRDQSRNWLPGPCYRQQRVSKTAADNNNSDYSWTGATKYHLNGRDSLVNPGTAMASHKDDEEKYFPQSGVLIFGKQDSGKTNVDIEKVMITDEEEIRTTNPVATEQYGSVSTNLQSGNTQAATSDVNTQGVLPGMVWQDRDVYLQGPIWAKIPHTDGHFHPSPLMGGLGQKHPPPQILIKNTPVPANPSTTFSAAKFASFITQYSTGQVSVEIEWELQKENSKRWNPEIQYTSNYNKSVNVDFTVDTNGVYSEPRPIGTRYLTRNL

SEQ ID NO: 3139 - protein, 735 aa, Artificial Sequence
  Description of Artificial Sequence: Synthetic polypeptide
MAADGYLPDWLEDTLSEGIRQWWKLKPGPPPPKPAERHKDDSRGLVLPGYKYLGPFNGLDKGEPVNEADAAALEHDKAYDRQLDSGDNPYLKYNHADAEFQERLKEDTSFGGNLARAVFQAKKRVLEPLGLVEEPVKTAPGKKRPVEHSPAEPDSSSGTGKSGQQPARKRLNFGQTGDADSVPDPQPLGQPPAAPSGLGTNTMASGSGAPMADNNEGADGVGNSSGNWHCDSTWMGDRVITTSTRTWALPTYNNHLYKQISSQSGASNDNHYFGYSTPWGYFDFNRFHCHFSPRDWQRLINNNWGFRPKRLNFKLFNIQVKEVTQNDGTTTIANNLTSTVQVFTDSEYQLPYVLGSAHQGCLPPFPADVFMVPRYGYLTLNNGSQAVGRSSFYCLEYFPSQMLRTGNNFTFSYTFEDVPFHSSYAHSQSLDRLMNPLIDQYLYYLSRTNTPSGTTTQSRLQFSQAGASDIRDQSRNWLPGPCYRQQRVSKTAADNNNSDYSWTGATKYHLNGRDSLVNPGTAMASHKDDEEKYFPQSGVLIFRKQDSGKTNVDIEKVMITDEEEIRTTNPVATEQYGSVSTNLQSGNTQAATSDVNTQGVLPGMVWQDRDVYLQGPIWAKIPHTDGHFHPSPLMGGFGLKHPPPQILIKNTPVPANPSTTFSAAKFASFITQYSTGQVSVEIEWELQKENSKRWNPEIQYTSNYNKSVNVDFTVDTNGVYSEPRPIGTRYLTRNL

SEQ ID NO: 3140 - protein, 735 aa, Artificial Sequence
  Description of Artificial Sequence: Synthetic polypeptide
MAADGYLPDWLEDTLSEGIRQWWKLKPGPPPPKPAERHKDDSRGLVLPGYKYLGPFNGLDKGEPVNEADAAALEHDKAYDRQLDSGDNPYLKYNHADAEFQERLKEDTSFGGNLARAVFQAKKRVLEPLGLVEEPVKTAPGKKRPVEHSPAEPDSSSGTGKSGQQPARKRLNFGQTGDADSVPDPQPLGQPPAAPSGLGTNTMASGSGAPMADNNEGADGVGNSSGNWHCDSTWMGDRVITTSTRTWALPTYNNHLYKQISSQSGASNDNHYFGYSTPWGYFDFNRFHCHFSPRDWQRLINNNWGFRPKRLNFKLFNIQVKEVTQNDGTTTIANNLTSTVQVFTDSEYQLPYVLGSAHQGCLPPFPADVFMVPQYGYLTLNNGSQAVGRSSFYCLEYFPSQMLRTGNNFTFSYTFEDVPFHSSYAHSQSLDRLMNPLIDQYLYYLSRTNTPSGTTTQSRLQFSQAGASDIRDQSRNWLPGPCYRQQRVSKTAADNNNSDYSWTGATKYHLNGRDSLVNPGTAMASHKDDEEKYFPQSGVLIFRKQDSGKTNVDIEKVMITDEEEIRTTNPVATEQYGSVSTNLQSGNTQAATSDVNTQGVLPGMVWQDRDVYLQGPIWAKIPHTDGHFHPSPLMGGFGLKHPPPQILIKNTPVPANPSTTFSAAKFASFITQYSTGQVSVEIEWELQKENSKRWNPEIQYTSNYNKSVNVDFTVDTNGVYSEPRPIGTRYLTRNL

SEQ ID NO: 3141 - protein, 735 aa, Artificial Sequence
  Description of Artificial Sequence: Synthetic polypeptide
MAADGYLPDWLEDTLSEGIRQWWKLKPGPPPPKPAERHKDDSRGLVLPGYKYLGPFNGLDKGEPVNEADAAALEHDKAYDRQLDSGDNPYLKYNHADAEFQERLKEDTSFGGNLARAVFQAKKRVLEPLGLVEEPVKTAPGKKRPVEHSPAEPDSSSGTGKSGQQPARKRLNFGQTGDADSVPDPQPLGQPPAAPSGLGTNTMASGSGAPMADNNEGADGVGNSSGNWHCDSTWMGDRVITTSTRTWALPTYNNHLYKQISSQSGASNDNHYFGYSTPWGYFDFNRFHCHFSPRDWQRLINNNWGFRPKRLNFKLFNIQVKEVTQNDGTTTIANNLTSTVQVFTDSEYQLPYVLGSAHQGCLPPFPADVFMVPRYGYLTLNNGSQAVGRSSFYCLEYFPSQMLRTGNNFTFSYTFEDVPFHSSYAHSQSLDRLMNPLIDQYLYYLSRTNTPSGTTTQSRLQFSQAGASDIRDQSRNWLPGPCYRQQRVSKTAADNNNSDYSWTGATKYHLNGRDSLVNPGTAMASHKDDEEKYFPQSGVLIFGKQDSGKTNVDIEKVMITDEEEIRTTNPVATEQYGSVSTNLQSGNTQAATSDVNTQGVLPGMVWQDRDVYLQGPIWAKIPHTDGHFHPSPLMGGFGLKHPPPQILIKNTPVPANPSTTFSAAKFASFITQYSTGQVSVEIEWELQKENSKRWNPEIQYTSNYNKSVNVDFTVDTNGVYSEPRPIGTRYLTRNL

SEQ ID NO: 3142 - protein, 735 aa, Artificial Sequence
  Description of Artificial Sequence: Synthetic polypeptide
MAADGYLPDWLEDTLSEGIRQWWKLKPGPPPPKPAERHKDDSRGLVLPGYKYLGPFNGLDKGEPVNEADAAALEHDKAYDRQLDSGDNPYLKYNHADAEFQERLKEDTSFGGNLARAVFQAKKRVLEPLGLVEEPVKTAPGKKRPVEHSPAEPDSSSGTGKSGQQPARKRLNFGQTGDADSVPDPQPLGQPPAAPSGLGTNTMASGSGAPMADNNEGADGVGNSSGNWHCDSTWMGDRVITTSTRTWALPTYNNHLYKQISSQSGASNDNHYFGYSTPWGYFDFNRFHCHFSPRDWQRLINNNWGFRPKRLNFKLFNIQVKEVTQNDGTTTIANNLTSTVQVFTDSEYQLPYVLGSAHQGCLPPFPADVFMVPQYGYLTLNNGSQAVGRSSFYCLEYFPSQMLRTGNNFTFSYTFEDVPFHSSYAHSQSLDRLMNPLIDQYLYYLSRTNTPSGTTTQSRLQFSQAGASDIRDQSRNWLPGPCYRQQRVSKTAADNNNSDYSWTGATKYHLNGRDSLVNPGTAMASHKDDEEKYFPQSGVLIFGKQDSGKTNVDIEKVMITDEEEIRTTNPVATEQYGSVSTNLQSGNTQAATSDVNTQGVLPGMVWQDRDVYLQGPIWAKIPHTDGHFHPSPLMGGLGQKHPPPQSLIKNTPVPANPSTTFSAAKFASFITQYSTGQVSVEIEWELQKENSKRWNPEIQYTSNYNKSVNVDFTVDTNGVYSEPRPIGTRYLTRNL

SEQ ID NO: 3143 - protein, 735 aa, Artificial Sequence
  Description of Artificial Sequence: Synthetic polypeptide
MAADGYLPDWLEDTLSEGIRQWWKLKPGPPPPKPAERHKDDSRGLVLPGYKYLGPFNGLDKGEPVNEADAAALEHDKAYDRQLDSGDNPYLKYNHADAEFQERLKEDTSFGGNLARAVFQAKKRVLEPLGLVEEPVKTAPGKKRPVEHSPAEPDSSSGTGKSGQQPARKRLNFGQTGDADSVPDPQPLGQPPAAPSGLGTNTMASGSGAPMADNNEGADGVGNSSGNWHCDSTWMGDRVITTSTRTWALPTYNNHLYKQISSQSGASNDNHYFGYSTPWGYFDFNRFHCHFSPRDWQRLINNNWGFRPKRLNFKLFNIQVKEVTQNDGTTTIANNLTSTVQVFTDSEYQLPYVLGSAHQGCLPPFPADVFMVPQYGYLTLNNGSQAVGRSSFYCLEYFPSQMLRTGNNFTFSYTFEDVPFHSSYAHSQSLDRLMNPLIDQYLYYLSRTNTPSGTTTQSRLQFSQAGASDIRDQSRNWLPGPCYRQQRVSKTAADNNNSDYSWTGATKYHLNGRDSLVNPGTAMASHKDDEEKYFPQSGVLIFGKQDSEKTNVDIEKVMITDEEEIRTTNPVATEQYGSVSTNLQSGNTQAATSDVNTQGVLPGMVWQDRDVYLQGPIWAKIPHTDGHFHPSPLMGGFGLKHPPPQILIKNTPVPANPSTTFSAAKFASFITQYSTGQVSVEIEWELQKENSKRWNPEIQYTSNYNKSVNVDFTVDTNGVYSEPRPIGTRYLTRNL

SEQ ID NO: 3144 - protein, 735 aa, Artificial Sequence
  Description of Artificial Sequence: Synthetic polypeptide
MAADGYLPDWLEDTLSEGIRQWWKLKPGPPPPKPAERHKDDSRGLVLPGYKYLGPFNGLDKGEPVNEADAAALEHDKAYDRQLDSGDNPYLKYNHADAEFQERLKEDTSFGGNLARAVFQAKKRVLEPLGLVEEPVKTAPGKKRPVEHSPAEPDSSSGTGKSGQQPARKRLNFGQTGDADSVPDPQPLGQPPAAPSGLGTNTMASGSGAPMADNNEGADGVGNSSGNWHCDSTWMGDRVITTSTRTWALPTYNNHLYKQISSQSGASNDNHYFGYSTPWGYFDFNRFHCHFSPRDWQRLINNNWGFRPKRLNFKLFNIQVKEVTQNDGTTTIANNLTSTVQVFTDSEYQLPYVLGSAHQGCLPPFPADVFMVPQYGYLTLNNGSQAVGRSSFYCLEYFPSQMLRTGNNFTFSYTFEDVPFHSSYAHSQSLDRLMNPLIDQYLYYLSRTNTPSGTTTQSRLQFSQAGASDIRDQSRNWLPGPCYRQQRVSKTAADNNNSDYSWTGATKYHLNGRDSLVNPGTAMASHKDDEEKYFPQSGVLIFGKQDSGKTNVDIEKVMITDEEEIRTTNPVATEQYGSVSTNLQSGNTQAATSDVNTQGVLPGMVWQDRDVYLQGPIWAKIPHTDGHFHPSPLMGGFGLKHPPPQILIKNTPVPANPSTTFSAAKFASFITQYSTGQVSVEIEWELQKENSKRWNPEIQYTSNYNKSVNVDFTVDTNGVYSEPRPIGTRYLTRNL

SEQ ID NO: 3145 - protein, 735 aa, Artificial Sequence
  Description of Artificial Sequence: Synthetic polypeptide
MAADGYLPDWLEDTLSEGIRQWWKLKPGPPPPKPAERHKDDSRGLVLPGYKYLGPFNGLDKGEPVNEADAAALEHDKAYDRQLDSGDNPYLKYNHADAEFQERLKEDTSFGGNLARAVFQAKKRVLEPLGLVEEPVKTAPGKKRPVEHSPAEPDSSSGTGKSGQQPARKRLNFGQTGDADSVPDPQPLGQPPAAPSGLGTNTMASGSGAPMADNNEGADGVGNSSGNWHCDSTWMGDRVITTSTRTWALPTYNNHLYKQISSQSGASNDNHYFGYSTPWGYFDFNRFHCHFSPRDWQRLINNNWGFRPKRLNFKLFNIQVKEVTQNDGTTTIANNLTSTVQVFTDSEYQLPYVLGSAHQGCLPPFPADVFMVPQYGYLTLNNGSQAVGRSSFYCLEYFPSQMLRTGNNFTFSYTFEDVPFHSSYAHSQSLDRLMNPLIDQYLYYLSRTNTPSGTTTQSRLQFSQAGASDIRDQSRNWLPGPCYRQQRVSKTAADNNNSDYSWTGATKYHLNGRDSLVNPGTAMASHKDDEEKYFPQSGVLIFGKQDSGKTNVDIEKVMITDEEEIRTTNPVATEQYGSVSTNLQSGNTQAATSDVNTQGVLPGMVWQDRDVYLQGPIWAKIPHTDGHFHPSPLMGGFGQKHPPPQSLIKNTPVPANPSTTFSAAKFASFITQYSTGQVSVEIEWELQKENSKRWNPEIQYTSNYNKSVNVDFTVDTNGVYSEPRPIGTRYLTRNL

SEQ ID NO: 3146 - protein, 735 aa, Artificial Sequence
  Description of Artificial Sequence: Synthetic polypeptide
MAADGYLPDWLEDTLSEGIRQWWKLKPGPPPPKPAERHKDDSRGLVLPGYKYLGPFNGLDKGEPVNEADAAALEHDKAYDRQLDSGDNPYLKYNHADAEFQERLKEDTSFGGNLARAVFQAKKRVLEPLGLVEEPVKTAPGKKRPVEHSPAEPDSSSGTGKSGQQPARKRLNFGQTGDADSVPDPQPLGQPPAAPSGLGTNTMASGSGAPMADNNEGADGVGNSSGNWHCDSTWMGDRVITTSTRTWALPTYNNHLYKQISSQSGASNDNHYFGYSTPWGYFDFNRFHCHFSPRDWQRLINNNWGFRPKRLNFKLFNIQVKEVTQNDGTTTIANNLTSTVQVFTDSEYQLPYVLGSAHQGCLPPFPADVFMVPQYGYLTLNNGSQAVGRSSFYCLEYFPSQMLRTGNNFTFSHTFEDVPFHSSYAHSQSLDRLMNPLIDQYLYYLSRTNTPSGTTTQSRLQFSQAGASDIRDQSRNWLPGPCYRQQRVSKTAADNNNSDYSWTGATKYHLNGRDSLVNPGTAMASHKDDEEKYFPQSGVLIFGKQDSGKTNVDIEKVMITDEEEIRTTNPVATEQYGSVSTNLQSGNTQAATSDVNTQGVLPGMVWQDRDVYLQGPIWAKIPHTDGHFHPSPLMGGFGLKHPPPQILIKNTPVPANPSTTFSAAKFASFITQYSTGQVSVEIEWELQKENSKRWNPEIQYTSNYNKSVNVDFTVDTNGVYSEPRPIGTRYLTRNL

SEQ ID NO: 3147 - protein, 735 aa, Artificial Sequence
  Description of Artificial Sequence: Synthetic polypeptide
MAADGYLPDWLEDTLSEGIRQWWKLKPGPPPPKPAERHKDDSRGLVLPGYKYLGPFNGLDKGEPVNEADAAALEHDKAYDRQLDSGDNPYLKYNHADAEFQERLKEDTSFGGNLARAVFQAKKRVLEPLGLVEEPVKTAPGKKRPVEHSPAEPDSSSGTGKSGQQPAGKRLNFGRTGDADSVPDPQPLGQPPAAPSGLGTNTMASGSGAPMADNNEGADGVGNSSGNWHCDSTWMGDRVITTSTRTWALPTYNNHLYKQISSQSGASNDNHYFGYSTPWGYFDFNRFHCHFSPRDWQRLINNNWGFRPKRLNFKLFNIQVKEVTQNDGTTTIANNLTSTVQVFTDSEYQLPYVLGSAHQGCLPPFPADVFMVPQYGYLTLNNGSQAVGRSSFYCLEYFPSQMLRTGNNFTFSYTFEDVPFHSSYAHSQSLDRLMNPLIDQYLYYLSRTNTPSGTTTQSRLQFSPAGASDIRDQSRNWLPGPCYRQQRVSKTAADNNNSDYSWTGATKYHLNGRDSLVNPGTAMASHKDDEEKYFPQSGVLIFGKQDSGKTNVDIEKVMITDEEEIRTTNPVATEQYGSVSTNLQSGNTQAATSDVNTQGVLPGMVWQDRDVYLQGPIWAKIPHTDGHFHPSPLMGGFGLKHPPPQILIKNTPVPANPSTTFSAAKFASFITQYSTGQVSVEIEWELQKENSKRWNPEIQYTSNYNKSVNVDFTVDTNGVYSEPRPIGTRYLTRNL

SEQ ID NO: 3148 - protein, 734 aa, Artificial Sequence
  Description of Artificial Sequence: Synthetic polypeptide
MAADGYLPDWLEDTLSEGIRQWWKLKPGPPPPKPAERHKDDSRGLVLPGYKYLGPFNGLDKGEPVNEADAAALEHDKAYDRQLDSGDNPYLKYNHADAEFQERLKEDTSFGGNLARAVFQAKKRVLEPLGLVEEPVKTAPGKKRPVEHSPAEPDSSSGTGKSGQQPARKRLNFGQTGDADSVPDPQPLGQPPAAPSGLGTNTMASGSGAPMADNNEGADGVGNSSGNWHCDSTWMGDRVITTSTRTWALPTYNNHLYKQISSQSGASNDNHYFGYSTPWGYFDFNRFHCHFSPRDWQRLINNNWGFRPKRLNFKLFNIQVKEVTQNDGTTTIANNLTSTVQVFTDSEYQLPYVLGSAHQGCLPPFPADVFMVPQYGYLTLNNGSQAVGRSSFYCLEYFPSQMLRTGNNFTFSYTFEDVPFHSSYAHSQSLDRLMNPLIDQYLYYLSRTNTPSGTTTQSRLQFSQAGASDIRDQSRNWLPGPCYRQQRVSKTAADNNSDYSWTGATKYHLNGRDSLVNPGTAMASHKDDEEKYFPQSGVLIFGKQDSGKTNVDIEKVMITDEEEIRTTNPVATEQYGSVSTNLQSGNTQAATSDVNTQGVLPGMVWQDRDVYLQGPIWAKIPHTDGHFHPSPLMGGFGLKHPPPQILIKNTPVPANPSTTFSAAKFASFITQYSTGQVSVEIEWELQKENSKRWNPEIQYTSNYNKSVNVDFTVDTNGVYSEPRPIGTRYLTRNL

SEQ ID NO: 3149 - protein, 738 aa, Artificial Sequence
  Description of Artificial Sequence: Synthetic polypeptide
MAADGYLPDWLEDNLSEGIREWWALKPGAPKPKANQQKQDDGRGLVLPGYKYLGPFNGLDKGEPVNAADAAALEHDKAYDQQLQAGDNPYLRYNHADAEFQERLQEDTSFGGNLGRAVFQAKKRVLEPLGLVEEGAKTAPGKKRPVEPSPQRSPDSSTGIGKKGQQPARKRLNFGQTGDSESVPDPQPLGEPPAAPSGVGPNTMAAGGGAPMADNNEGADGVGSSSGNWHCDSTWLGDRVITASTRTWALPTYNNHLYKQISNGTSGGATNDNTYFGYSTPWGYFDFNRFHCHFSPRDWQRLINNNWGFRPKRLSFKLFNIQVKEVTQNEGTKTIANNLTSTIQVFTDSEYQLPYVLGSAHQGCLPPFPADVFTIPQYGYLTLNNGSQAVGRSSFYCLEYFPSQMLRTGNNFQFTYTFEDVPFHSSYAHSQSLDRLMNPLIDQYLYYLSRTQTTGGTANTQTLGFSQGGPNTMANQAKNWLPGPCYRQQRVSTTTGQNNNSNFAWTAGTKYHLNGRNSLANPGIAMATHKDDEERFFPSNGILIFGKQNAARDNADYSDVMLTSEEEIKTTNPVATEEYGIVADNLQQQNTAPQIGTVNSQGALPGMVWQNRDVYLQGPIWAKIPHTDGNFHPSPLMGGFGLKHPPPQILIKNTPVPADPPTTFNQSKLNSFITQYSTGQVSVEIEWELQKENSKRWNPEIQYTSNYYKSTSVDFAVNTEGVYSEPRPIGTRYLTRNL

SEQ ID NO: 3150 - protein, 738 aa, Artificial Sequence
  Description of Artificial Sequence: Synthetic polypeptide
MAADGYLPDWLEDNLSEGIREWWALKPGAPKPKANQQKQDDGRGLVLPGYKYLGPFNGLDKGGPVNAADAAALEHDKAYDQQLQAGDNPYLRYNHADAEFQERLQEDTSFGGNLGRAVFQAKKRVLEPLGLVEEGAKTAPGKKRPVEPSPQRSPDSSTGIGKKGQQPARKRLNFGQTGDSESVPDPQPLGEPPAAPSGVGPNTMAAGGGAPMADNNEGADGVGSSSGNWHCDSTWLGDRVITTSTRTWALPTYNNHLYKQISNGTSGGATNDNTYFGYSTPWGYFDFNRFHCHFSPRDWQRLINNNWGFRPKRLSFKLFNIQVKEVTQNEGTKTIANNLTSTIQVFTDSEYQLPYVLGSAHQGCLPPFPADVFMIPQYGYLTLNNGSQAVGRSSFYCLEYFPSQMLRTGNNFQFTYTFEDVPFHSSYAHSQSLDRLMNPLIDQYLYYLSRTQTTGGTANTQTLGFSQGGPNTMANQAKNWLPGPCYRQQRVSTTTGQNNNSNFAWTAGTKYHLNGRNSLANPGIAMATHKDDEERFFPSNGILIFGKQNAARDNADYSDVMLTSEEEIKTTNPVATEEYGIVADNLQQQNTAPQIGTVNSQGALPGMVWQNRDVYLQGPIWAKIPHTDGNFHPSPLMGGFGLKHPPPQILIKNTPVPADPPTTFNQSKLNSFITQYSTGQVSVEIEWELQKENSKRWNPEIQYTSNYYKSTSVDFAVNTEGVYSEPRPIGTRYLTRNL

SEQ ID NO: 3151 - protein, 738 aa, Artificial Sequence
  Description of Artificial Sequence: Synthetic polypeptide
MAADGYLPDWLEDNLSEGIREWWALKPGAPKPKANQQKQDDGRGLVLPGYKYLGPFNGLDKGEPVNAADAAALEHDKAYDQQLQAGDNPYLRYNHADAEFQERLQEDTSFGGNLGRAVFQAKKRVLEPLGLVEEGAKTAPGKKRPVEPSPQRSPDSSTGIGKKGQQPARKRLNFGQTGDSESVPDPQPLGEPPAAPSGVGPNTMAAGGGAPMADNNEGADGVGSSSGNWHCDSTWLGDRVITTSTRTWALPTYNNHLYRQISNGTSGGATNDNTYFGYSTPWGYFDFNRFHCHFSPRDWQRLINNNWGFRPKRLSFKLFNIQVKEVTQNEGTKTIANNLTSTIQVFTDSEYQLPYVLGSAHQGCLPPFPADVFMIPQYGYLTLNNGSQAVGRSSFYCLEYFPSQMLRTGNNFQFTYTFEDVPFHSSYAHSQSLDRLMNPLIDQYLYYLSRTQTTGGTANTQTLGFSQGGPNTMANQAKNWLPGPCYRQQRVSTTTGQNNNSNFAWTAGTKYHLNGRNSLANPGIAMATHKDDEERFFPSNGILIFGKQNAARDNADYSDVMLTSEEEIKTTNPVATEEYGIVADNLQQQNTAPQIGTVNSQGALPGMVWQNRDVYLQGPIWAKIPHTDGNFHPSPLMGGFGLKHPPPQILIKNTPVPADPPTTFNQSKLNSFITQYSTGQVSVEIEWELQKENSKRWNPEIQYTSNYYKSTSVDFAVNTEGVYSEPRPIGTRYLTRNL

SEQ ID NO: 3152 - protein, 738 aa, Artificial Sequence
  Description of Artificial Sequence: Synthetic polypeptide
MAADGYLPDWLEDNLSEGIREWWALKPGAPKPKANQQKQDDGRGLVLPGYKYLGPFNGLDKGEPVNAADAAALEHDKAYDQQLQAGDNPYLRYNHADAEFQERLQEDTSFGGNLGRAVFQAKKRVLEPLGLVEEGAKTAPGKKRPVEPSPQRSPDSSTGIGKKGQQPARKRLNFGQTGDSESVPDPQPLGEPPAAPSGVGPNTMAAGGGAPMADSNEGADGVGSSSGNWHCDSTWLGDRVITTSTRTWALPTYNNHLYKQISNGTSGGATNDNTYFGYSTPWGYFDFNRFHCHFSPRDWQRLINNNWGFRPKRLSFKLFNIQVKEVTQNEGTKTIANNLTSTIQVFTDSEYQLPYVLGSAHQGCLPPFPADVFMIPQYGYLTLNNGSQAVGRSSFYCLEYFPSQMLRTGNNFQFTYTFEDVPFHSSYAHSQSLDRLMNPLIDQYLYYLSRTQTTGGTANTQTLGFSQGGPNTMANQAKNWLPGPCYRQQRVSTTTGQNNNSNFAWTAGTKYHLNGRNSLANPGIAMATHKDDEERFFPSNGILIFGKQNAARDNADYSDVMLTSEEEIKTTNPVATEEYGIVADNLQQQNTAPQIGTVNSQGALPGMVWQNRDVYLQGPIWAKIPHTDGNFHPSPLMGGFGLKHPPPQILIKNTPVPADPPTTFNQSKLNSFITQYSTGQVSVEIEWELQKENSKRWNPEIQYTSNYYKSTSVDFAVNTEGVYSEPRPIGTRYLTRNL

SEQ ID NO: 3153 - protein, 738 aa, Artificial Sequence
  Description of Artificial Sequence: Synthetic polypeptide
MAADGYLPDWLEDNLSEGIREWWALKPGAPKPKANQQKQDDGRGLVLPGYKYLGPFNGLDKGEPVNAADAAALEHDKAYDQQLQAGDNPYLRYNHADAEFQERLQEDTSFGGNLGRAVFQAKKRVLEPLGLVEEGAKTAPGKKRPVEPSPQRSPDSSTGIGKKGQQPARKRLNFGQTGDSESVPDPQPLGEPPAAPSGVGPNTMAAGGGAPMADNNEGADGVGSSSGNWHCDSTWLGDRVITTSTRTWALPTYNNHLYKQISNGTSGGATNDNTYFGYSTPWGYFDFNRFHCHFSPRDWQRLINNNWGFRPKRLSFKLFNIQVKEVTQNEGTKTIANNLTSTIQVFTDSEYQLPYVLGSAHQGCLPPFPADVFMIPQYGYLTLNNGSQAMGRSSFYCLEYFPSQMLRTGNNFQFTYTFEDVPFHSSYAHSQSLDRLMNPLIDQYLYYLSRTQATGGTANTQTLGFSQGGPNTMANQAKNWLPGPCYRQQRVSTTTGQNNNSNFAWTAGTKYHLNGRNSLANPGIAMATHKDDEERFFPSNGILIFGKQNAARDNADYSDVMLTSEEEIKTTNPVATEEYGIVADNLQQQNTAPQIGTVNSQGALPGMVWQNRDVYLQGPIWAKIPHTDGNFHPSPLMGGFGLKHPPPQILIKNTPVPADPPTTFNQSKLNSFITQYSTGQVSVEIEWELQKENSKRWNPEIQYTSNYYKSTSVDFAVNTEGVYSEPRPIGTRYLTRNL

SEQ ID NO: 3154 - protein, 738 aa, Artificial Sequence
  Description of Artificial Sequence: Synthetic polypeptide
MAADGYLPDWLEDNLSEGIREWWALKPGAPKPKANQQKQDDGRGLVLPGYKYLGPFNGLDKGEPVNAADAAALEHDKAYDQQLQAGNNPYLRYNHADAEFQERLQEDTSFGGNLGRAVFQAKKRVLGPLGLVEEGAKTAPGKKRPVEPSPQRSPDSSTGIGKKGQQPARKRLNFGQTGDSESVPDPQPLGEPPAAPSGVGPNTMAAGGGAPMADNNEGADGVGSSSGNWHCDSTWLGDRVITTSTRTWALPTYNNHLYKQISNGTSGGATNDNTYFGYSTPWGYFDFNRFHCHFSPRDWQRLINNNWGFRPKRLSFKLFNIQVKEVTQNEGTKTIANNLTSTIQVFTDSEYQLPYVLGSAHQGCLPPFPADVFMIPQYGYLTLNNGSRAVGRSSFYCLEYFPSQMLRTGNNFQFTYTFEDVPFHSSYAHSQSLDRLMNPLIDQYLYYLSRTQTTGGTANTQTLGFSQGGPNTMANQAKNWLPGPCYRQQRVSTTTGQNNNSNFAWTAGTKYHLNGRNSLANPGIAMATHKDDEERFFPSNGILIFGKQNAARDNADYSDVMLTSEEEIKTTNPVATEEYGIVADNLQQQNTAPQIGTVNSQGALPGMVWQNRDVYLQGPIWAKIPHTDGNFHPSPLMGGFGLKHPPPQILIKNTPVPADPPTTFNQSKLNSFITQYSTGQVSVEIEWELQKENSKRWNPEIQYTSNYYKSTSVDFAVNTEGVYSEPRPIGTRYLTRNL

SEQ ID NO: 3155 - protein, 738 aa, Artificial Sequence
  Description of Artificial Sequence: Synthetic polypeptide
MAADGYLPDWLEDNLSEGIREWWALKPGAPKPKANQQKQDDGRGLVLPGYKYLGPFNGLDKGEPVNAADAAALEHDKAYDQQLQAGDNPYLRYNHADAEFQERLQEDTSFGGNLGRAVFQAKKRVLEPLGLVEEGAKTAPGKKRPVEPSPQRSPDSSTGIGKKGQQPARKRLNFGQTGDSESVPDPQPLGEPPAAPSGVGPNTMAAGGGAPMADNNEGADGVGSSSGNWHCDSTWLGDRVITTSTRTWALPTYNNHLYKQISNGTSGGATNDNTYFGYSTPWGYFDFNRFHCHFSPRDWQRLINNNWGFRPKRLSFKLFNIQVKEVTQNEGTKTIANNLTSTIQVFTDSEYQLPYVLGSAHQGCLPPFPADVFMIPQYGYLTLNNGSQAVGRSSFYCLEYFPSQMLRTGNNFQFTYTFEDVPFHSSYAHSQSLDRLMNPLIDQYLYYLSRTQTTGGTANTQTLGFSQGGPNTMANQAKNWLPGPCYRQQRVSTTTGQNNNSDFAWTAGTKYHLNGRNSLANPGIAMATHKDDEERFFPSNGILIFGKQNAARDNADYSDVMLTSEEEIKTTNPVATEEYGIVADNLQQQNTAPQIGTVNSQGALPGMVWQNRDVYLQGPVWAKIPHTDGNFHPSPLMGGFGLKHPPPQILIKNTPVPADPPTTFNQSKLNSFITQYSTGQVSVEIEWELQKENSKRWNPEIQYTSNYYKSTSVDFAVNTEGVYSEPRPIGTRYLTRNL

SEQ ID NO: 3156 - protein, 738 aa, Artificial Sequence
  Description of Artificial Sequence: Synthetic polypeptide
MAADGYLPDWLEDNLSEGIREWWALKPGAPKPKANQQKQDDGRGLVLPGYKYLGPFNGLDKGEPVNAADAAALEHDKAYDQQLQAGDNPYLRYNHADAEFQERLQEDTSFGGSLGRAVFQAKKRVLEPLGLVEEGAKTAPGKKRPVEPSPQRSPDSSTGIGKKGQQPARKRLNFGQTGDSESVPDPQPLGEPPAAPSGVGPNTMAAGGGAPMADNNEGADGVGSSSGNWHCDSTWLGDRVITTSTRTWALPTYNNHLYKQISNGTSGGATNDNTYFGYSTPWGYFDFNRFHCHFSPRDWQRLINNNWGFRPKRLSFKLFNIQVKEVTQNEGTKTIANNLTSTIQVFTDSEYQLPYVLGSAHQGCLPPFPADVFMIPQYGYLTLNNGSQAVGRSSFYCLEYFPSQMLRTGNNFQFTYTFEDVPFHSSYAHSQSLDRLMNPLIDQYLYYLSRTQTTGGTANTQTLGFSQGGPNTMANQAKNWLPGPCYRQQRVSTTTGQNNNSNFAWTAGTKYHLNGRNSLANPGIAMATHKDDEERFFPSNGILIFGKQNAARDNADYSDVMLTSEEEIKTTNPVATEEYGIVADNLQQQNTAPQIGTVNSQGALPGMVWQNRDVYLQGPIWAKIPHTDGNFHPSPLMGGFGLKHPPPQILIKNTPVPADPPTTFNQSKLNSFITQYSTGQVSVEIEWELQKENSKRWNPEIQYTSNYYKSTSVDFAVNTEGVYSEPRPIGTRYLTRNL

SEQ ID NO: 3157 - protein, 738 aa, Artificial Sequence
  Description of Artificial Sequence: Synthetic polypeptide
MAADGYLPDWLEDNLSEGIREWWALKPGAPKPKANQQKQDDGRGLVLPGYKYLGPFNGLDKGEPVNAADAAALEHDKAYDQQLQAGDNPYQRYNHADAEFQERLQEDTSFGGNLGRAVFQAKKRVLEPLGLVEEGAKTAPGKKRPVEPSPQRSPDSSTGIGKKGQQPARKRLNFGQTGDSESVPDPQPLGEPPAAPSGVGPNTMAAGGGAPMADNNEGADGVGSSSGNWHCDSAWLGDRVITTSTRTWALPTYNNHLYKQISNGTSGGATNDNTYFGYSTPWGYFDFNRFHCHFSPRDWQRLINNNWGFRPKRLSFKLFNIQVKEVTQNEGTKTIANNLTSTIQVFTDSEYQLPYVLGSAHQGCLPPFPADVFTIPQYGYLTLNNGSQAVGRSSFYCLEYFPSQMLRTGNNFQFTYTFEDVPFHSSYAHSQSLDRLMNPLIDQYLYYLSRTQTTGGTANTQTLGFSQGGPNTMANQAKNWLPGPCYRQQRVSTTTGQNNNSNFAWTAGTKYHLNGRNSLANPGIAMATHKDDEERFFPSNGILIFGKQNAARDNADYSDVMLTSEEEIKTTNPVATEEYGIVADNLQQQNTAPQIGTVNSQGALPGMVWQNRDVYLQGPIWAKIPHTDGNFHPSPLMGGFGLKHPPPQILIKNTPVPADPPTTFNQSKLNSFITQYSTGQVSVEIEWELQKENSKRWNPEIQYTSNYYKSTSVDFAVNTEGVYSEPRPIGTRYLTRNL

SEQ ID NO: 3158 - protein, 738 aa, Artificial Sequence
  Description of Artificial Sequence: Synthetic polypeptide
MAADGYLPDWLEDNLSEGIREWWALKPGAPKPKANQQKQDDGRGLVLPGYKYLGPFNGLDKGEPVNAADTAALEHDKAYDQQLQAGDNPYLRYNHADAEFQERLQEDTSFGGNLGRAVFQAKKRVLEPLGLVEEGAKTAPGKKRPVEPSPQRSPDSSTGIGKKGQQPARKRLNFGQTGDSESVPDPQPLGEPPAAPSGVGPNTMAAGGGAPMADNNEGADGVGSSSGNWHCDSTWLGDRVITTSTRTWALPTYNNHLYKQISNGTSGGATNDNTYFGYSTPWGYFDFNRFHCHFSPRDWQRLINNNWGFRPKRLSFKLFNIQVKEVTQNEGTKTIANNLTSTIQVFTDSEYQLPYVLGSAHQGCLPPFPADVFMIPQYGYLTLNNGSQAVGRSSFYCLEYFPSQMLRTGNNFQFTYTFEDVPFHSSYAHSQSLDRLMNPLIDQYLYYLSRTQTTGGTANTQTLGFSQGGPNTMANQAKNWLPGPCYRQQRVSTTTGQNNNSNFAWTAGTKYHLNGRNSLANPGIAMATHKDDEERFFPSNGILIFGKQNAARDNADYSDVMLTSEEEIKTTNPVATEEYGIVADNLQQQNTAPQIGTVNSQGALPGMVWQNRDVYLQGPIWAKIPHTDGNFHPSPLMGGFGLKHPPPQILIKNTPVPADPPTTFNQSKLNSFITQYSTGQVSVEIEWELQKENSKRWNPEIQYTSNYYKSTSVDFAVNTEGVYSEPRPIGTRYLTRNL

SEQ ID NO: 3159 - protein, 738 aa, Artificial Sequence
  Description of Artificial Sequence: Synthetic polypeptide
MAADGYLPDWLEDNLSEGIREWWALKPGAPKPKANQQKQDDGRGLVLPGYKYLGPFNGLDKGEPVNAADAAALEHDKAYDQQLQAGDNPYLRYNHADAEFQERLQEDTSFGGNLGRAVFQAKKRVLEPLGLVEEGAKTAPGKKRPVEPSPQRSPDSSTGIGKKGQQPARKRLNFGQTGDSESVPDPQPLGEPPAAPSGVGPNTMAAGGGAPMADNNEGADGVGSSSGNWHCDSTWLGDRVITTSTRTWALPTYNNHLYKQISNGTSGGATNDNTYFGYSTPWGYFDFNRFHCHFSPRDWQRLINNNWGFRPKRLSFKLFNIQVKEVTQNEGTKTIANNLTSTIQVFTDSEYQLPYVLGSAHQGCLPPFPADVFMIPQYGYLTLNNGSQAVGRSSFYCLEYFPSQMLRTGNNFQFTYTFEDVPFHSSYAHSQSLDRLMNPLIDQYLYYLSRTQTTGGTANTQTLGFSQGGPNTMANQAKNWLPGPCYRQQRVSTTTGQNNNSNFAWTAGTKYHLNGRNSLANPGIAMATHKDDEERFFPSNGILIFGKQNAARDNADYSDVMLTSEEEIKTTNPVATEEYGIVADNLQQQNAAPQIGTVNSQGALPGMVWQNRDVYLQGPIWAKIPHTDGNFHPSPLMGGFGLKHPPPQILIKNTPVPADPPTTFNQSKLNSFITQYSTGQVSVEIEWELQKENSKRWNPEIQYTSNYYKSTSVDFAVNTEGVYSEPRPIGTRYLTRNL

SEQ ID NO: 3160 - protein, 738 aa, Artificial Sequence
  Description of Artificial Sequence: Synthetic polypeptide
MAADGYLPDWLEDNLSEGIREWWALKPGAPKPKANQQKQDDGRGLVLPGYKYLGPFNGLDKGEPVNAADAAALEHDKAYDQQLQAGDNPYLRYNHADAEFQERLQEDTSFGGNLGRAVFQAKKRVLEPLGLVEEGAKTAPGKKRPVEPSPQRSPDSSTGIGKKGQQPARKRLNFGQTGDSESVPDPQPLGEPPAAPSGVGPNTMAAGGGAPMADNNEGADGVGSSSGNWHCDSTWLGDRVITTSTRTWALPTYNNHLYKQISNGTSGGATNDNTYFGYSTPWGYFDFNRFHCHFSPRDWQRLINNNWGFRPKRLSFKLFNIQVKEVTQNEGTKTIANNLTSTIQVFTDSEYQLPYVLGSAHQGCLPPFPADVFTIPQYGYLTLNNGSQAVGRSSFYCLEYFPSQMLRTGNNFQFTYTFEDVPFHSSYAHSQSLDRLMNPLIDQYLYYLSRTQTTGGTANTQTLGFSQGGPNTMANQAKNWLPGPCYRQQRVSTTTGRNNNSNFAWTAGTKYHLNGRNSLANPGIAMATHKDDEERFFPSNGILIFGKQNAARDNADYSDVMLTSEEEIKTTNPVATEEYGIVADNLQQQNTAPQIGTVNSQGALPGMVWQNRDVYLQGPIWAKIPHTDGNFHPSPLMGGFGLKHPPPQILIKNTPVPADPPTTFNQSKLNSFITQYSTGQVSVEIEWELQKENSKRWNPEIQYTSNYYKSTSVDFAVNTEGVYSEPRPIGTRYLTRNL

SEQ ID NO: 3161 - protein, 738 aa, Artificial Sequence
  Description of Artificial Sequence: Synthetic polypeptide
MAADGYLPDWLEDNLSEGIREWWALKPGAPKPKANQQKQDDGRGLVLPGYKYLGPFNGLDKGEPVNAADAAALEHDKAYDQQLQAGDNPYLRYNHADAEFQERLQEDTSFGGNLGRAVFQAKKRVLEPLGLVEEGAKTAPGKKRPVEPSPQRSPDSSTGIGKKGQQPARKRLNFGQTGDSESVPDPQPLGEPPAAPSGVGPNTMAAGGGAPMADNNEGADGVGSSSGNWHCDSTWLGDRVITTSTRTWALPTYNNHLYKQISNGTSGGATNDNTYFGYSTPWGYFDFNRFHCHFSPRDWQRLINNNWGFRPKRLSFKLFNIQVKEVTQNEGTKTIANNLTSTIQVFTDSEYQLPYVLGSAHQGCLPPFPADVFTIPQYGYLTLNNGSQAVGRSSFYCLEYFPSQMLRTGNNFQFTYTFEDVPFHSSYAHSQSLDRLMNPLIDQYLYYLSRTQTTGGTANTQTLGFSQGGPNTMANQAKNWLPGPCYRQQRVSTTTGQNNNSNFAWTAGTKYHLNGRNSLANPGIAMATHKDDEERFFPSNGILIFGKQNAARDNADYSDVVLTSEEEIKTTNPVATEEYGIVADNLQQQNTAPQIGTVNSQGALPGMVWQNRDVYLQGPIWAKIPHTDGNFHPSPLMGGFGLKHPPPQILIKNTPVPADPPTTFNQSKLNSFITQYSTGQVSVEIEWELQKENSKRWNPEIQYTSNYYKSTSVDFAVNTEGVYSEPRPIGTRYLTRNL

SEQ ID NO: 3162 - protein, 738 aa, Artificial Sequence
  Description of Artificial Sequence: Synthetic polypeptide
MAADGYLPDWLEDNLSEGIREWWALKPGAPKPKANQQKQDDGRGLVLPGYKYLGPFNGLDKGEPVNAADAAALEHDKAYDQQLQAGDNPYLRYNHADAEFQERLQEDTSFGGNLGRAVFQAKKRVLEPLGLVEEGAKTAPGKKRPVEPSPQRSPDSSTGIGKKGQQPARKRLNFGQTGDSESVPDPQPLGEPPAAPSGVGPNTMAAGGGAPMADNNEGADGVGSSSGNWHCDSTWLGDRVITTSTRTWALPTYNNHLYKQISNGTSGGATNDNTYFGYSTPWGYFDFNRFHCHFSPRDWQRLINNNWGFRPKRLSFKLFNIQVKEVTQNEGTKTIANNLTSTIQVFTDSEYQLPYVLGSAHQGCLPPFPADVFMIPQYGYLTLNNGSQAVGRSSFYCLEYFPSQMLRAGNNFQFTYTFEDVPFHSSYAHSQSLDRLMNPLIDQYLYYLSRTQTTGGTANTQTLGFSQGGPNTMANQAKNWLPGPCYRQQRVSTTTGQNNNSNFAWTAGTKYHLNGRNSLANPGIAMATHKDDEERFFPSNGILIFGKQNAARDNADYSDVMLTSEEEIKTTNPVATEEYGIVADNLQQQNTAPQIGTVDSQGALPGMVWQNRDVYLQGPIWAKIPHTDGNFHPSPLMGGFGLKHPPPQILIKNTPVPADPPTTFNQSKLNSFITQYSTGQVSVEVEWELQKENSKRWNPEIQYTSNYYKSTSVDFAVNTEGVYSEPRPIGTRYLTRNL

SEQ ID NO: 3163 - protein, 738 aa, Artificial Sequence
  Description of Artificial Sequence: Synthetic polypeptide
MAADGYLPDWLEDNLSEGIREWWALKPGAPKPKANQQKQDDGRGLVLPGYKYLGPFNGLDKGEPVNAADAAALEHDKAYDQQLQAGDNPYLRYNHADAEFQERLQEDTSFGGSLGRAVFQAKKRVLEPLGLVEEGAKTAPGKKRPVEPSPQRSPDSSTGIGKKGQQPARKRLNFGQTGDSESVPDPQPLGEPPAAPSGVGPNTMAAGGGAPMADNNEGADGVGSSSGNWHCDSTWLGDRVITTSTRTWALPTYNNHLYKQISNGTSGGATNDNTYFGYSTPWGYFDFNRFHCHFSPRDWQRLINNNWGFRPKRLSFKLFNIQVKEVTQNEGTKTIANNLTSTIQVFTDSEYQLPYVLGSAHQGCLPPFPADVFMIPQYGYLTLNNGSQAVGRSSFYCLEYFPSQMLRTGNNFQFTYTFEDVPFHSSYAHSQSLDRLMNPLIDQYLYYLSRTQTTGGTANTQTLGFSQGGPNTMANQAKNWLPGPCYRQQRVSTTTGQNNNSNFAWTAGTKYHLNGRNSLANPGIAMATHKDDEERFFPSNGILIFGKQNAARDNADYSDVMLTSEEEIKTTNPVATEEYGIVADNLQQQNTAPQIGTVNSQGALPGMVWQNRDVYLQGPIWAKIPHTDGNFHPSPLMGGFGLKHPPPQILIKNTPVPADPPTTFNQSKLNSFITQYSTGQVSVEIEWELQKENSKRWNPEIQYTSNYYKSTSVDFAVNTEGVYSEPRPIGTRHLTRNL

SEQ ID NO: 3164 - protein, 738 aa, Artificial Sequence
  Description of Artificial Sequence: Synthetic polypeptide
MAADGYLPDWLEDNLSEGIREWWALKPGAPKPKANQQKQDDGRGLVLPGYKYLGPFNGLDKGEPVNAADAAALEHDKAYDQQLQAGDNPYLRYNHADAEFQERLQEDTSFGGNLGRAVFQAKKRVLEPLGLVEEGAKTAPGKKRPVEPSPQRSPDSSTGIGKKGQQPARKRLNFGQTGDSESVPDPQPLGEPPAAPSGVGPNTMAAGGGAPMADNNEGADGVGSSSGNWHCDSTWLGDRVITTSTRTWALPTYNNHLYKQISNGTSGGATNDNTYFGYSTPWGYFDFNRFHCHFSPRDWQRLINNNWGFRPKRLSFKLFNIQVKEVTQNEGTKTIANNLTSTIQVFTDSEYQLPYVLGSAHQGCLPPFPADVFTIPQYGYLTLNNGSQAVGRSSFYCLEYFPSQMLRTGNNFQFTYTFEDVPFHSSYAHSQSLDRLMNPLIDQYLYYLSRTQTTGGTANTQTLGFSQGGPNTMANQAKNWLPGPCYRQQRVSTTTGQNNNSNFAWTAGTKYHLNGRNSLANPGIAMVTHKDDEERFFPSNGILIFGKQNAARDNADYSDVMLTSEEEIKTTNPVATEEYGIVADNLQQQNTAPQIGTVNSQGALPGMVWQNRDVYLQGPIWAKIPHTDGNFHPSPLMGGFGLKHPPPQILIKNTPVPADPPTTFNQSKLNSFITQYSTGQVSVEIEWELQKENSKRWNPEIQYTSNYYKSTSVDFAVNTEGVYSEPRPIGTRYLTRNL

SEQ ID NO: 3165 - DNA, 2208 bp, Artificial Sequence
  Description of Artificial Sequence: Synthetic polynucleotide
atggctgccgatggttatcttccagattggctcgaggacactctctctgaaggaataagacagtggtggaagctcaaacctggcccaccaccgccaaagcccgcagagcggcataaggacgacagcaggggtcttgtgcttcctgggtacaagtacctcggacccttcaacggactcgacaaaggagagccggtcaacgaggcagacgccgcggccctcgagcacgacaaggcctacgaccggcagctcgacagcggagacaacccgtacctcaagtacaaccacgccgacgcggagtttcaggagcgccttaaagaagatacgtcttttgggggcaacctcgcaagagcagtattccaggcgaaaaagagggttcttgaacctctgggcctggttgaggagcctgttaagacggctccgggaaaaaagaggccggtagagcactctcctgcggagccagattcctcctccggaactggaaagtcgggccaacagcctgcaagaaagagattgaattttggtcagactggagacgcagactccgtacctgacccccagcctctcggacagccaccagcagccccctctggtctgggaactaatacgatggcttcaggcagtggcgcaccaatggcagacaataacgagggcgccgacggagtgggtaattcctcgggaaattggcattgcgattccacatggatgggcgacagagtcatcaccaccagcacccgcacctgggctctgcccacctacaacaaccatctgtacaagcaaatttccagccagtctggagccagcaacgacaaccactactttggctacagcaccccttgggggtattttgacttcaacagattccactgccacttctccccacgtgactggcaaagactcatcaacaacaattggggattccggcccaaaagactcaacttcaagctctttaacattcaagtcaaggaggtcacgcagaatgacggtacgacgacgattgccaataaccttaccagcacggttcaggtgtttactgactcggagtaccagctcccgtacgtcctcggctcggcgcatcaaggatgcctcccgccgttcccagcagacgtcttcatggtgccacagtatggatacctcaccctgaacaacgggagtcaggcggtaggacgctcttcattttactgcctggagtactttccttctcagatgctgcgtaccggaaacaactttaccttcagctacacctttgaggacgttccttttcacagcagctacgctcacagccagagtttggaccgtcttatgaatcctctcatcgaccagtacctgtattacttgagcagaacaaacactccaagcggaaccactacgcagtccaggcttcagttttctcaagccggagcgagtgacattcgggaccagtctaggaactggcttcctagaccctgttaccgccagcagcgagtatcaaagacagctgcggacaacaacaacagtgattactcgtggactggagctaccaagtatcacctcaatggaagagactctctggtgaatccgggcacagccatggccagccacaaggacgatgaagaaaagtattttcctcagagcggggttctcatcttcggaaaacaagactcgggaaaaactaatgtggacattgaaaaggtcatgattacagacgaagaggaaatcaggaccaccaatcccgtggctacggagcagtatggttctgtatctaccaatctccagagcggcaacacacaagcagctacctcagatgtcaacacacaaggcgttcttccaggcatggtccggcaggacagagacgtgtacctgcagggacccatctgggcaaagattccacacacggacggacattttcacccttctcctcttatgggaggatttggactgaagcaccctcccccgcagattctcatcaagaataccccggtacctgcgaatccttctaccaccttcagcgcggcaaagtttgcttccttcatcacacagtactccacggggcaggtcagcgtggagatcgagtgggagccgcagaaagagaacagcaaacgctggaaccccgagatccagtatacctccaactacaacaagtctgttaatgtggactttactgtggacactaatggcgtgtattcagagcctcgccccattggcacaagatacctgactcgtaatctgtaa

SEQ ID NO: 3166 - DNA, 2208 bp, Artificial Sequence
  Description of Artificial Sequence: Synthetic polynucleotide
atggctgccgatggttatcttccagattggctcgaggacactctctctgaaggaataagacagtggtggaagctcaaacctggcccaccaccgccaaagcccgcagagcggcataaggacgacagcaggggtcttgtgcttcctgggtacaagtacctcggacccttcaacggactcgacaaaggagagccggtcaacgaggcagacgccgcggccctcgagcacgacaaggcctacgaccggcagctcgacagcggagacaacccgtacctcaagtacaaccacgccgacgcggagtttcaggagcgccttaaagaagatacgtcttttgggggcaacctcgcaagagcagtattccaggcgaaaaagagggttcttgaacctctgggcctggttgaggagcctgttaagacggctccgggaaaaaagaggccggtagagcactctcctgcggagccagattcctcctccggaactggaaagtcgggccaacagcctgcaagaaagagattgaattttggtcagactggagacgcagactccgtacctgacccccagcctctcggacagccaccagcagccccctctggtctgggaactaatacgatggcttcaggcagtggcgcaccaatggcagacaataacgagggcgccgacggagtgggtaattcctcgggaaattggcattgcgattccacatggatgggcgacagagtcatcaccaccagcacccgcacctgggctctgcccacctacaacaaccatctgtacaagcaaatttccagccagtctggagccagcaacgacaaccactactttggctacagcaccccttgggggtattttgacttcaacggattccactgccacttctccccacgtgactggcaaagactcatcaacaacaattggggattccggcccaaaagactcaacttcaagctctttaacattcaagtcaaggaggtcacgcagaatgacggtacgacgacgattgccaataaccttaccagcacggttcaggtgtttactgactcggagtaccagctcccgtacgtcctcggctcggcgcatcaaggatgcctcccgccgttcccagcagacgtcttcatggtgccacagtatggatacctcaccctgaacaacgggagtcaggcggtaggacgctcttcattttactgcctggagtactttccttctcagatgctgcgtaccggaaacaactttaccttcagctacacctttgaggacgttccttttcacagcagctacgctcacagccagagtttggaccgtcttatgaatcctctcatcgaccagtacctgtattacttgagcagaacaaacactccaagcggaaccactacgcagtccaggcttcagttttctcaagccggagcgagtgacattcgggaccagtctaggaactggcttcctggaccctgttaccgccagcagcgagtatcaaagacagctgcggacaacaacaacagtgattactcgtggactggagctaccaagtatcacctcaatggaagagactctctggtgaatccgggcacagccatggccagccacaaggacgatgaagaaaagtattttcctcagagcggggttctcatcttcggaaaacaagactcgggaaaaactaatgtggacattgaaaaggtcatgattacagacgaagaggaaatcaggaccaccaatcccgtggctacggagcagtatggttctgtatctaccaatctccagagcggcgacacacaagcagctacctcagatgtcaacacacaaggcgttcttccaggcatggcccggcaggacagagacgtgtacctgcagggacccatctgggcaaagattccacacacggacggacattttcacccttctcctcttatgggaggatttggactgaagcaccctcccccgcagattctcatcaagaataccccggtacctgcgaatccttctaccaccttcagcgcggcaaagtttgcttccttcatcacacagtactccacggggcaggtcagcgtggagatcgagtgggagccgcagaaagagaacagcaaacgctggaaccccgagatccagtatacctccaactacaacaagtctgttaatgtggactttactgtggacactaatggcgtgtattcagagcctcgccccattggcacaagatacctgactcgtaatctgtaa

SEQ ID NO: 3167 - DNA, 2208 bp, Artificial Sequence
  Description of Artificial Sequence: Synthetic polynucleotide
atggctgccgatggttatcttccagattggctcgaggacactctctctgaaggaataagacagtggtggaagctcaaacctggcccaccaccgccaaagcccgcagagcggcataaggacgacagcaggggtcttgtgcttcctgggtacaagtacctcggacccttcaacggactcgacaaaggagagccggtcaacgaggcagacgccgcggccctcgagcacgacaaggcctacgaccggcagctcgacagcggagacaacccgtacctcaagtacaaccgcgccgacgcggagtttcaggagcgccttaaagaagatacgtcttttgggggcaacctcgcaagagcagtattccaggcgaaaaagagggttcttgaacctctgggcctggttgaggagcctgttaagacggctccgggaaaaaagaggccggtagagcactctcctgcggagccagattcctcctccggaactggaaagtcgggccaacagcctgcaagaaagagattgaattttggtcagactggagacgcagactccgtacctgacccccagcctctcggacagccaccagcagccccctctggtctgggaactaatacgatggcttcaggcagtggcgcaccaatggcagacaataacgagggcgccgacggagtgggtaattcctcgggaaattggcattgcgattccacatggatgggcgacagagtcatcaccaccagcacccgcacctgggctctgcccacctacaacaaccatctgtacaagcaaatttccagccagtctggagccagcaacgacaaccactactttggctacagcaccccttgggggtattttgacttcaacagattccactgccacttctccccacgtgactggcaaagactcatcaacaacaattggggattccggcccaaaagactcaacttcaagctctttaacattcaagtcaaggaggtcacgcagaatgacggtacgacgacgattgccaataaccttaccagcacggttcaggtgtttactgactcggagtaccagctcccgtacgtcctcggctcggcgcatcaaggatgcctcccgccgttcccagcagacgtcttcatggtgccacagtatggatacctcaccctgaacaacgggagtcaggcggtaggacgctcttcattttactgcctggagtactttccttctcagatgctgcgtaccggaaacaactttaccttcagctacacctttgaggacgttccttttcacagcagctacgctcacagccagagtttggaccgtcttatgaatcctctcatcgaccagtacctgtattacttgagcagaacaaacactccaagcggaaccactacgcagtccaggcttcagttttctcaagccggagcgagtgacattcgggaccagtctaggaactggcttcctggaccctgttaccgccagcagcgagtatcaaagacagctgcggacaacaacaacagtgattactcgtggactggagctaccaagtatcacctcaatggaagagactctctggtgaatccgggcacagccatggccagccacaaggacgatgaagaaaagtattttcctcagagcggggttctcatcttcggaaaacaagactcgggaaaaactaatgtggacattgaaaaggtcatgattacagacgaagaggaaatcaggaccaccaatcccgtggctacggagcagtatggttctgtatctaccaatctccagagcggcaacacacaagcagctacctcagatgtcaacacacaaggcgttcttccaggcatggtccggcaggacagagacgtgtacctgcagggacccatctgggcaaagattccacacacggacggacattttcacccttctcctcttatgggaggatttggactgaagcaccctcccccgcagattctcatcaagaataccccggtacctgcgaatccttctaccaccttcagcgcggcaaagtttgcttccttcatcacacagtactccacggggcaggtcagcgtggagatcgagtgggagccgcagaaagagaacagcaaacgctggaaccccgagatccagtatacctccaactacaacaagtctgttaatgtggactttactgtggacactaatggcgtgtattcagagcctcgccccattggcacaagatacctgactcgtaatctgtaa

SEQ ID NO: 3168 - DNA, 2208 bp, Artificial Sequence
  Description of Artificial Sequence: Synthetic polynucleotide
atggctgccgatggttatcttccagattggctcgaggacactctctctgaaggaataagacagtggtggaagctcaaacctggcccaccaccgccaaagcccgcagagcggcataaggacgacagcaggggtcttgtgcttcctgggtacaagtacctcggacccttcaacggactcgacaaaggagagccggtcaacgaggcagacgccgcggccctcgagcacgacaaggcctacgaccggcagctcgacagcggagacaacccgtacctcaagtacaaccacgccgacgcggagtttcaggagcgccttaaagaagatacgtcttttgggggcaacctcgcaagagcagtattccaggcgaaaaagagggttcttgaacctctgggcctggttgaggagcctgttaagacggctccgggaaaaaagaggccggtagagcactctcctgcggagccagattcctcctccggaactggaaagtcgggccaacagcctgcaagaaagagattgaattttggtcagactggagacgcagactccgtacctgacccccagcctctcggacagccaccagcagccccctctggtctgggaactaatacgatggcttcaggcagtggcgcaccaatggcagacaataacgagggcgccgacggagtgggtaattcctcgggaaattggcattgcgattccacatggatgggcgacagagtcatcaccaccagcacccgcacctgggctctgcccacctacaacaaccatctgtacaagcaaatttccagccagtctggagccagcaacgacaaccactacttcggctacagcaccccttgggggtattttgacttcaacagattccactgccacttctccccacgtgactggcaaagactcatcaacaacaattggggattccggcccaaaagactcaacttcaagctctttaacattcaagtcaaggaggtcacgcagaatgacggtacgacgacgattgccaataaccttaccagcacggttcaggtgtttactgactcggagtaccagctcccgtacgtcctcggctcggcgcatcaaggatgcctcccgccgttcccagcagacgtcttcatggtgccacagtatggatacctcaccctgaacaacgggagtcaggcggtaggacgctcttcattttactgcctggagtactttccttctcagatgctgcgtaccggaaacaactttaccttcagctacacctttgaggacgttccttttcacagcagctacgctcacagccagagtttggaccgtcttatgaatcctctcatcgaccagtacctgtattacttgagcagaacaaacactccaagcggaaccactacgcagtccaggcttcagttttctcaagccggagcgagtgacattcgggaccagtctaggaactggcttcctggaccctgttaccgccagcagcgagtatcaaagacagctgcggacaacaacaacagtgattactcgtggactggagctaccaagtatcacctcaatggaagagactctctggtgaatccgggcacagccatggccagccacaaggacgatgaagaaaagtattttcctcagagcggggttctcatcttcggaaaacaagactcgggaaaaactaatgtggacattgaaaaggtcatgattacagacgaagaggaagtcaggaccaccaatcccgtggctacggagcagtatggttctgtatctaccaatctccagagcggcaacacacaagcagctacctcagatgtcaacacacaaggcgttcttccaggcatggtccggcaggacagagacgtgtacctgcagggacccatctgggcaaagattccacacacggacggacattttcacccttctcctcttatgggaggatttggactgaagcaccctcccccgcagattctcatcaagaataccccggtacctgcgaatccttctaccaccttcagcgcggcaaagtttgcttccttcatcacacagtactccacggggcaggtcagcgtggagatcgagtgggagccgcagaaagagaacagcaaacgctggaaccccgagatccagtatacctccaactacaacaagtctgttaatgtggactttactgtggacactaatggcgtgtattcagagcctcgccccattggcacaagatacctgactcgtaatctgtaa

SEQ ID NO: 3169 - DNA, 2208 bp, Artificial Sequence
  Description of Artificial Sequence: Synthetic polynucleotide
atggctgccgatggttatcttccagattggctcgaggacactctctctgaaggaataagacagtggtggaagctcaaacctggcccaccaccgccaaagcccgcagagcggcataaggacgacagcaggggtcttgtgcttcctgggtacaagtacctcggacccttcaacggactcgacaaaggagagccggtcaacgaggcagacgccgcggccctcgagcacgacaaggcctacgaccggcagctcgacagcggagacaacccgtacctcaagtacaaccacgccgacgcggagtttcaggagcgccttaaagaagatacgtcttttgggggcaacctcgcaagagcagtattccaggcgaaaaagagggttcttgaacctctgggcctggttgaggagcctgttaagacggctccgggaaaaaagaggccggtagagcactctcctgcggggccagattcctcctccggaactggaaagtcgggccaacagcctgcaagaaagagattgaattttggtcagactggagacgcagactccgtacctgacccccagcctctcggacagccaccagcagccccctctggtctgggaactaatacgatggcttcaggcagtggcgcaccaatggcagacaataacgagggcgccgacggagtgggtaattcctcgggaaattggcattgcgattccacatggatgggcgacagagtcatcaccaccagcacccgcacctgggctctgcccacctacaacaaccatctgtacaagcaaatttccagccagtctggagccagcaacgacaaccactactttggctacagcaccccttgggggtattttgacttcaacagattccactgccacttctccccacgtgactggcaaagactcatcaacaacaattggggattccggcccaaaagactcaacttcgagctctttaacattcaagtcaaggaggtcacgcagaatgacggtacgacgacgattgccaataaccttaccagcacggttcaggtgtttactgactcggagtaccagctcccgtacgtcctcggctcggcgcatcaaggatgcctcccgccgttcccagcagacgtcttcatggtgccacagtatggatacctcaccctgaacaacgggagtcaggcggtaggacgctcttcattttactgcctggagtactttccttctcagatgctgcgtaccggaaacaactttaccttcagctacacctttgaggacgttccttttcacagcagctacgctcacagccagagtttggaccgtctcatgaatcctctcatcgaccagtacctgtattacttgagcagaacaaacactccaagcggaaccactacgcagtccaggcttcagttttctcaagccggagcgagtgacattcgggaccagtctaggaactggcttcctggaccctgttaccgccagcagcgagtatcaaagacagctgcggacaacaacaacagtgattactcgtggactggagctaccaagtatcacctcaatggaagagactctctggtgaatccgggcacagccatggccagccacaaggacgatgaagaaaagtattttcctcagagcggggttctcatcttcggaaaacaagactcgggaaaaactaatgtggacattgaaaaggtcatgattacagacgaagaggaaatcaggaccaccaatcccgtggctacggagcagtatggttctgtatctaccaatctccagagcggcaacacacaagcagctacctcagatgtcaacacacaaggcgttcttccaggcatggtctggcaggacagagacgtgtacctgcagggacccatctgggcaaagattccacacacggacggacactttcacccttctcctcttatgggaggatttggactgaagcaccctcccccgcagattctcatcaagagtaccccggtacctgcgaatccttctaccaccttcagcgcggcaaagtttgcttccttcatcacacagtactccacggggcaggtcagcgtggagatcgagtgggagctgcagaaagagaacagcaaacgctggaaccccgagatccagtatacctccaactacaacaagtctgttaatgtggactttactgtggacactaatggcgtgtattcagagcctcgccccattggcacaagatacctgactcgtaatctgtaa

SEQ ID NO: 3170 - DNA, 2208 bp, Artificial Sequence
  Description of Artificial Sequence: Synthetic polynucleotide
atggctgccgatggttatcttccagattggctcgaggacactctctctgaaggaataagacagtggtggaagctcaaacctggcccaccaccgccaaagcccgcagagcggcataaggacgacagcaggggtcttgtgcttcctgggtacaagtacctcggacccttcaacggactcgacaaaggagagccggtcaacgaggcagacgccgcggccctcgagcacgacaaggcctacgaccggcagctcgacagcggagacaacccgtacctcaagtacaaccacgccgacgcggagtttcaggagcgccttaaagaagatacgtcttttgggggcaacctcgcaagagcagtattccaggcgaaaaagagggttcttgaacctctgggcctggttgaggagcctgttaagacggctccgggaaaaaagaggccggtagagcactctcctgcggggccagattcctcctccggaactggaaagtcgggccaacagcctgcaagaaagagattgaattttggtcagactggagacgcagactccgtacctgacccccagcctctcggacagccaccagcagccccctctggtctgggaactaatacgatggcttcaggcagtggcgcaccaatggcagacaataacgagggcgccgacggagtgggtaattcctcgggaaattggcattgcgattccacgtggatgggcgacagagtcatcaccaccagcacccgcacctgggctctgcccacctacaacaaccatctgtacaagcaaatttccagccagtctggagccagcaacgacaaccactactttggctacagcaccccttgggggtattttgacttcaacagattccactgctacttctccccacgtgactggcaaagactcatcaacaacaattggggattccggcccaaaagactcaacttcgagctctttaacattcaagtcaaggaggtcacgcagaatgacggtacgacgacgattgccaataaccttaccagcacggttcaggtgtttactgactcggagtaccagctcccgtacgtcctcggctcggcgcatcaaggatgcctcccgccgttcccagcagacgtcttcatggtgccacagtatggatacctcaccctgaacaacgggagtcaggcggtaggacgctcttcattttactgcctggagtactttccttctcagatgctgcgtaccggaaacaactttaccttcagctacacctttgaggacgttccttttcacagcagctacgctcacagccagagtttggaccgtctcatgaatcctctcatcgaccagtacctgtattacttgagcagaacaaacactccaagcggaaccactacgcagtccaggcttcagttttctcaagccggagcgagtgacattcgggaccagtctaggaactggcttcctggaccctgttaccgccagcagcgagtatcaaagacagctgcggacaacaacaacagtgattactcgtggactggagctaccaagtatcacctcaatggaagagactctctggtgaatccgggcacagccatggccagccacaaggacgatgaagaaaagtattttcctcagagcggggttctcatcttcggaaaacaagactcgggaaaaactaatgtggacattgaaaaggtcatgattacagacgaagaggaaatcaggaccaccaatcccgtggctacggagcagtatggttctgtatctaccaatctccagagcggcaacacacaagcagctacctcagatgtcaacacacaaggcgttcttccaggcatggtctggcaggacagagacgtgtacctgcagggacccatctgggcaaagattccacacacggacggacactttcacccttctccacttatgggaggatttggactgaagcaccctcccccgcagattctcatcaagagtaccccggtacctgcgaatccttctaccaccttcagcgcggcaaagtttgcttccttcatcacacagtactccacggggcaggtcagcgtggagatcgagtgggagctgcagaaagagaacagcaaacgctggaaccccgagatccagtatacctccaactacaacaagtccgttaatgtggactttactgtggacactaatggcgtgtattcagagcctcgccccattggcacaagatacctgactcgtaatctgtaa

SEQ ID NO: 3171 - DNA, 2205 bp, Artificial Sequence
  Description of Artificial Sequence: Synthetic polynucleotide
atggctgccgatggttatcttccagattggctcgaggacactctctctgaaggaataagacagtggtggaagctcaaacctggcccaccaccgccaaagcccgcagagcggcataaggacgacagcaggggtcttgtgcttcctgggtacaagtacctcggacccttcaacggactcgacaaaggagagccggtcaacgaggcagacgccgcggccctcgagcacgacaaggcctacgaccggcagctcgacagcggagacaacccgtacctcaagtacaaccacgccgacgcggagtttcaggagcgccttaaagaagatacgtcttttgggggcaacctcgcaagagcagtattccaggcgaaaaagagggttcttgaacctctgggcctggttgaggagcctgttaagacggctccgggaaaaaagaggccggtagagcactctcctgcggagccagattcctcctccggaactggaaagtcgggccaacagcctgcaagaaagagattgaattttggtcagactggagacgcagactccgtacctgacccccagcctctcggacagccaccagcagccccctctggtctgggaactaatacgatggcttcaggcagtggcgcaccaatggcagacaataacgagggcgccgacggagtgggtaattcctcgggaaattggcattgcgattccacatggatgggcgacagagtcatcaccaccagcacccgcacctgggctctgcccacctacaacaaccatctgtacaagcaaatttccagccagtctggagccagcaacgacaaccactactttggctacagcaccccttgggggtattttgacttcaacagattccactgccacttctccccacgtgactggcaaagactcatcaacaacaattggggattccggcccaaaagactcaacttcaagctctttaacattcaagtcaaggaggtcacgcagaatgacggtacgacgacgattgccaataaccttaccagcacggttcaggtgtttactgactcggagtaccagctcccgtacgtcctcggctcggcgcatcaaggatgcctcccgccgttcccagcagacgtcttcatggtgccacagtatggatacctcaccctgaacaacgggagtcaggcggtaggacgctcttcattttactgcctggagtactttccttctcagatgctgcgtaccggaaacaactttaccttcagctacacctttgaggacgttccttttcacagcagctacgctcacagccagagtttggaccgtcttatgaatcctctcatcgaccagtacctgtattacttgagcagaacaaacactccaagcggaaccactacgcagtccaggcttcagttttctcaagccggagcgagtgacattcgggaccagtctaggaactggcttcctggaccctgttaccgccagcagcgagtatcaaagacagctgcggacaacaacagtgattactcgtggactggagctaccaagtatcacctcaatggaagagactctctggtgaatccgggcacagccatggccagccacaaggacgatgaagaaaagtattttcctcagagcggggttctcatcttcggaaaacaagactcgggaaaaactaatgtggacattgaaaaggtcatgattacagacgaagaggaaatcaggaccaccaatcccgtggctacggagcagtatggttctgtatctaccaatctccagagcggcaacacacaagcagctacctcagatgtcaacacacaaggcgttcttccaggcatggtccggcaggacagagacgtgtacctgcagggacccatctgggcaaagattccacacacggacggacattttcacccttctcctcttatgggaggatttggactgaagcaccctcccccgcagattctcatcaagaataccccggtacctgcgaatccttctaccaccttcagcgcggcaaagtttgcttccttcatcacacagtactccacggggcaggtcagcgtggagatcgagtgggagccgcagaaagagaacagcaaacgctggaaccccgagatccagtatacctccaactacaacaagtctgttaatgtggactttactgtggacactaatggcgtgtattcagagcctcgccccattggcacaagatacctgactcgtaatctgtaa

SEQ ID NO: 3172 - DNA, 2208 bp, Artificial Sequence
  Description of Artificial Sequence: Synthetic polynucleotide
atggctgccgatggttatcttccagattggctcgaggacactctctctgaaggaataagacagtggtggaagctcaaacctggcccaccaccgccaaagcccgcagagcggcataaggacgacagcaggggtcttgtgcttcctgggtacaagtgcctcggacccttcaacggactcgacaaaggagagccggtcaacgaggcagacgccgcggccctcgagcacgacaaggcctacgaccggcagctcgacagcggagacaacccgtacctcaagtacaaccacgccgacgcggagtttcaggagcgccttaaagaagatacgtcttttgggggcaacctcgcaagagcagtattccaggcgaaaaagagggttcttgaacctctgggcctggttgaggagcctgttaagacggctccgggaaaaaagaggccggtagagcactctcctgcggagtcagattcctcctccggaactggaaagtcgggccaacagcctgcaagaaagagattgaattttggtcagactggagacgcagactccgtacctgacccccagcctctcggacagccaccagcagccccctctggtctgggaactaatacgatggcttcaggcagtggcgcaccaatggcagacaataacgagggcgccgacggagtgggtaattcctcgggaaattggcattgcgattccacatggatgggcgacagagtcatcaccaccagcacccgcacctgggctctgcccacctacaacaaccatctgtacaagcaaatttccagccagtctggagccagcaacgacaaccactactttggctacagcaccccttgggggtattttgacttcaacagattccactgccacttctccccacgtgactggcaaagactcatcaacaacaattggggattccggcccaaaagactcaacttcaagctctttaacattcaagtcaaggaggtcacgcagaatgacggtacgacgacgattgccaataaccttaccagcacggttcaggtgtttactgactcggagtaccagctcccgtacgtcctcggctcggcgcatcaaggatgcctcccgccgttcccagcagacgtcttcatggtgccacagtatggatacctcaccctgaacaacgggagtcaggcggtaggacgctcttcattttactgcctggagtactttccttctcagatgctgcgtaccggaaacaactttaccttcagctacacctttgaggacgttccttttcacagcagctacgctcacagccagagtttggaccgtctcatgaatcctctcatcgaccagtacctgtattacttgagcagaacaaacactccaagcggaaccactacgcagtccaggcttcagttttctcaagccggagcgagtgacattcgggaccagtctaggaactggcttcctggaccctgttaccgccagcagcgagtatcaaagacagctgcggacaacaacaacagtgattactcgtggactggagctaccaagtatcacctcaatggaagagactctctggtgaatccgggcacagccatggccagccacaaggacgatgaagaaaagtattttcctcagagcggggttctcatcttcggaaaacaagactcgggaaaaactaatgtggacattgaaaaggtcatgattacagacgaagaggaaatcaggaccaccaatcccgtggctacggagcagtatggttctgtatctaccaatctccagagcggcaacacacaagcagctacctcagatgtcaacacacaaggcgttcttccaggcatggtctggcaggacagagacgtgtacctgcagggacccatctgggcaaagattccacacacggacggacattttcacccttctcctcttatgggaggatttggactgaagcaccctcccccgcagattctcatcaagaataccccggtacctgcgaatccttctaccaccttcagcgcggcaaagtttgcttccttcatcacacagtactccacggggcaggtcagcgtggagatcgagtgggagctgcagaaagagaacagcaaacgctggaaccccgagatccagtatacctccaactacaacaagtctgttaatgtggactttactgtggacactaatggcgtgtattcagagcctcgccccattggcacaagatacctgactcgtaatctgtaa

SEQ ID NO: 3173 - DNA, 2208 bp, Artificial Sequence
  Description of Artificial Sequence: Synthetic polynucleotide
atggctgccgatggttatcttccagattggctcgaggacattctctctgaaggaataagacagtggtggaagctcaaacctggcccaccaccaccaaagcccgcagagcggcataaggacgacagcaggggtcttgtgcttcctgggtacaagtacctcggacccttcaacggactcgacaaaggagagccggtcaacgaggcagacgccgcggccctcgagcacgacaaggcctacgaccggcagctcgacagcggagacaacccgtacctcaagtacaaccacgccgacgcggagtttcaggagcgtcttaaagaagatacgtcttttgggggcaacctcggacgagcagtcttccaggcaaaaaagagggttcttgaacctctgggcctggttgaggaacctgttaagacggctccgggaaaaaagaggccggtagagcaatctcctgcggagccagactcctcctcgggaaccggaaaggcgggcaaccagcctgcaagaaagagattgaattttggtcagactggagacgcagactccgtacctgacccccagcctctcggacagccaccagcagccccctctggtctgggaactaatacgatggcttcaggcagtggcgcaccaatggcagacaataacgagggcgccgacggagtgggtaattcctcgggaaattggcattgcgattccacatggatgggcgacagagtcatcaccaccagcacccgcacctgggctctgcccacctacaacaaccatctgtacaagcaaatttccagccagtctggagccagcaacgacaaccactactttggctacagcaccccttgggggtattttgacttcaacagattccactgccacttctccccacgtgactggcaaagactcatcaacaacaattggggattccggcccaaaagactcaacttcaagctctttaacattcaagtcaaggaggtcacgcagaatgacggtacgacgacgattgccaataaccttaccagcacggttcaggtgtttactgactcggagtaccagctcccgtacgtcctcggctcggcgcatcaaggatgcctcccgccgttcccagcagacgtcttcatggtgccacagtatggatacctcaccctgaacaacgggagtcaggcggtaggacgctcttcattttactgcctggagtactttccttctcagatgctgcgtaccggaaacaactttaccttcagctacacctttgaggacgttccttttcacagcagctacgctcacagccagagtttggaccgtcttatgaatcctctcatcgaccagtacctgtattacttgagcagaacaaacactccaagcggaaccactacgcagtccaggcttcagttttctcaagccggagcgagtgacattcgggaccagtctaggaactggcttcctggaccctgttaccgccagcagcgagtatcaaagacagctgcggacaacaacaacagtgattactcgtggactggagctaccaagtatcacctcaatggaagagactctctggtgaatccgggcacagccatggccagccacaaggacgatgaagaaaagtattttcctcagagcggggttctcatcttcggaaaacaagactcgggaaaaactaatgtggacattgaaaaggtcatgattacagacgaagaggaaatcaggaccaccaatcccgtggctacggagcagtatggttctgtatctaccaatctccagagcggcaacacacaagcagctacctcagatgtcaacacacaaggcgttcttccaggcatggtccggcaggacagagacgtgtacctgcagggacccatctgggcaaagattccacacacggacggacattttcacccttctcctcttatgggaggatttggactgaagcaccctcccccgcagattctcatcaagaataccccggtacctgcgaatccttctaccaccttcagcgcggcaaagtttgcttccttcatcacacagtactccacggggcaggtcagcgtggagatcgagtgggagccgcagaaagagaacagcaaacgctggaaccccgagatccagtatacctccaactacaacaagtctgttaatgtggactttactgtggacactaatggcgtgtattcagagcctcgccccattggcacaagatacctgactcgtaatctgtaa

SEQ ID NO: 3174 - DNA, 2208 bp, Artificial Sequence
  Description of Artificial Sequence: Synthetic polynucleotide
atggctgccgatggttatcttccagattggctcgaggacactctctctgaaggaataagacagtggtggaagctcaaacctggcccaccaccgccaaagcccgcagagcggcataaggacgacagcaggggtcttgtgcttcctgggtacaagtacctcggacccttcaacggactcgacaaaggagagccggtcaacgaggcagacgccgcggccctcgagcacgacaaggcctacgaccggcagctcgacagcggagacaacccgtacctcaagtacaaccacgccgacgcggagtttcaggagcgccttaaagaagatacgtcttttgggggcaacctcgcaagagcagtattccaggcgaaaaagagggttcttgaacctctgggcctggttgaggagcctgttaagacggctccgggaaaaaagaggccggtagagcactctcctgcggagccagattcctcctccggaactggaaagtcgggccaacagcctgcaagaaagagattgaattttggtcagactggagacgcagactccgtacctgacccccagcctctcggacagccaccagcagccccctctggtctgggaactaatacgatggcttcaggcagtggcgcaccaatggcagacaataacgagggcgccgacggagtgggtaattcctcgggaaattggcattgcgattccacatggatgggcgacagagtcatcaccaccagcacccgcacctgggctctgcccacctacaacaaccatctgtacaagcaaatttccagccagtctggagccagcaacgacaaccactacttcggctacagcaccccttgggggtattttgacttcaacagattccactgccacttctccccacgtgactggcaaagactcatcaacaacaattggggattccggcccaaaagactcaacttcaagctctttaacattcaagtcaaggaggtcacgcagaatgacggtacgacgacgattgccaataaccttaccagcacggttcaggtgtttactgactcggagtaccagctcccgtacgtcctcggctcggcgcatcaaggatgcctcccgccgttcccagcagacgtcttcatggtgccacagtatggatacctcaccctgaacaacgggagtcaggcggtaggacgctcttcattttactgcctggagtactttccttctcagatgctgcgtaccggaaacaactttaccttcagctacacctttgaggacgttccttttcacagcagctacgctcacagccagagtttggaccgtcttatgaatcctctcatcgaccagtacctgtattacttgagcagaacaaacactccaagcggaaccactacgcagtccaggcttcagttttctcaagccggagcgagtgacattcgggaccagtctaggaactggcttcctggaccctgttaccgccagcagcgagtatcaaagacagctgcggacaacaacaacagtgattactcgtggactggagctaccaagtatcacctcaatggaagagactctctggtgaatccgggcacagccatggccagccacaaggacgatgaagaaaagtattttcctcagagcggggttctcatcttcggaaaacaagactcgggaaaaactaatgtggacattgaaaaggtcatgattacagacgaagaggaaatcaggaccaccaatcccgtggctacggagcagtatggttctgtatctaccaatctccagagcggcaacacacaagcagctacctcagatgtcaacacacaaggcgttcttccaggcatggtccggcaggacagagacgtgtacctgcagggacccatctgggcaaagattccacacacggacggacattttcacccttctcctcttatgggaggatttggactgaagcaccctcccccgcagattctcatcaagaataccccggtacctgcgaatccttctaccaccttcagcgcggcaaagtttgcttccttcatcacacagtactccacggggcaggtcagcgtggagatcgagtgggagccgcagaaagagaacagcaaacgctggaaccccgagatccagtatacctccaactacaacaagtctgttaatgtggactttactgtggacactaatggcgtgtattcagagcctcgccccattggcacaagatgcctgactcgtaatctgtaa

SEQ ID NO: 3175 - DNA, 2208 bp, Artificial Sequence
  Description of Artificial Sequence: Synthetic polynucleotide
atggctgccgatggttatcttccagattggctcgaggacactctctctgaaggaataagacagtggtggaagctcaaacctggcccaccaccgccaaagcccgcagagcggcataaggacgacagcaggggtcttgtgcttcctgggtacaagtacctcggacccttcaacggactcgacaaaggagagccggtcaacgaggcagacgccgcggccctcgagcacgacaaggcctacgaccggcagctcgacagcggagacaacccgtacctcaagtacaaccacgccgacgcggagtttcaggagcgccttaaagaagatacgtcttttgggggcaacctcgcaagagcagtattccaggcgaaaaagagggttcttgaacctctgggcctggttgaggagcctgttaagacggctccgggaaaaaagaggccggtagagcactctcctgcggagccagattcctcctccggaactggaaagtcgggccaacagcctgcaagaaagagattgaattttggtcagactggagacgcagactccgtacctgacccccagcctctcggacagccaccagcagccccctctggtctgggaactaatacgatggcttcaggcagtggcgcaccaatggcagacaataacgagggcgccgacggagtgggtaattcctcgggaaattggcattgcgattccacatggatgggcgacagagtcatcaccaccagcacccgcacctgggctctgcccacctacaacaaccatctgtacaagcaaatttccagccagtctggagccagcaacgacaaccactacttcggctacagcaccccttgggggtattttgacttcaacagattccactgccacttctccccacgtgactggcaaagactcatcaacaacaattggggattccggcccaaaagactcaacttcaagctctttaacattcaagtcaaggaggtcacgcagaatgacggtacgacgacgattgccaataaccttaccagcacggttcaggtgtttactgactcggagtaccagctcccgtacgtcctcggctcggcgcatcaaggatgcctcccgccgttcccagcagacgtcttcatggtgccacagtatggatacctcaccctgaacaacgggagtcaggcggtaggacgctcttcattttactgcctggagtactttccttctcagatgctgcgtaccggaaacaactttaccttcagctacacctttgaggacgttccttttcacagcagctacgctcacagccagagtttggaccgtcttatgaatcctctcatcgaccagtacctgtattacttgagcagaacaaacactccaagcggaaccactacgcagtccaggcttcagttttctcaagccggagcgagtgacattcgggaccagtctaggaactggcttcctggaccctgttaccgccagcagcgagtatcaaagacagctgcggacaacaacaacagtgattactcgtggactggagctaccaagtatcacctcaatggaagagactctctggtgaatccgggcacagccatggccagccacaaggacgatgaagaaaagtattttcctcagagcggggttctcatcttcggaaaacaagactcgggaaaaactaatgtggacattgaaaaggtcatgattacagacgaagaggaaatcaggaccaccaatcccgtggctacggagcagtatggttctgtatctaccaatctccagagcggcaacacacaagcagctacctcagatgtcaacacacaaggcgttcttccaggcatggtccggcagggcagagacgtgtacctgcagggacccatctgggcaaagattccacacacggacggacattttcacccttctcctcttatgggaggatttggactgaagcaccctcccccgcagattctcatcaagaataccccggtacctgcgaatccttctaccaccttcagcgcggcaaagtttgcttccttcatcacacagtactccacggggcaggtcagcgtggagatcgagtgggagccgcagaaagagaacagcaaacgctggaaccccgagatccagtatacctccaactacaacaagtctgttaatgtggactttactgtggacactaatggcgtgtattcagagcctcgccccattggcacaagatacctgactcgtaatctgtaa

SEQ ID NO: 3176 - DNA, 2208 bp, Artificial Sequence
  Description of Artificial Sequence: Synthetic polynucleotide
atggctgccgatggttatcttccagattggctcgaggacactctctctgaaggaataagacagtggtggaagctcaaacctggcccaccaccgccaaagcccgcagagcggcataaggacgacagcaggggtcttgtgcttcctgggtacaagtacctcggacccttcaacggactcgacaaaggagagccggtcaacgaggcagacgccgcggccctcgagcacgacaaggcctacgaccggcagctcgacagcggagacaacccgtacctcaagtacaaccacgccgacgcggagtttcaggagcgccttaaagaagatacgtcttttgggggcaacctcgcaagagcagtattccaggcgaaaaagagggttcttgaacctctgggcctggttgaggagcctgttaagacggctccgggaaaaaagaggccggtagagcactctcctgcggagccagattcctcctccggaactggaaagtcgggccaacagcctgcaagaaagagattgaattttggtcagactggagacgcagactccgtacctgacccccagcctctcggacagccaccagcagccccctctggtctgggaactaatacgatggcttcaggcagtggcgcaccaatggcagacaataacgagggcgccgacggagtgggtaattcctcgggaaattggcattgcgattccacatggatgggcgacagagtcatcaccaccagcacccgcacctgggctctgcccacctacaacaaccatctgtacaagcaaatttccagccagtctggagccagcaacgacaaccactacttcggctacagcaccccttgggggtattttgacttcaacagattccactgccacttctccccacgtgactggcaaagactcatcaacaacaattggggattccggcccaaaagactcaacttcaagctctttaacattcaagtcaaggaggtcacgcagaatgacggtacgacgacgattgccaataaccttaccagcacggttcaggtgtttactgactcggagtaccagctcccgtacgtcctcggctcggcgcatcaaggatgcctcccgccgttcccagcagacgtcttcatggtgccacagtatggatacctcaccctgaacaacgggagtcaggcggtaggacgctcttcattttactgcctggagtactttccttctcagatgctgcgtaccggaaacaactttaccttcagctacacctttgaggacgttccttttcacagcagctacgctcacagccagagtttggaccgtcttatgaatcctctcatcgaccagtacctgtattacttgagcagaacaaacactccaagcggaaccactacgcagtccaggcttcagttttctcaagccggagcgagtgacattcgggaccagtctaggaactggcttcctggaccctgttaccgccagcagcgagtatcaaagacagctgcggacaacaacaacagtgattactcgtggactggagctaccaagtatcacctcaatggaagagactctctggtgaatccgggcacagccatggccagccacaaggacgatgaagaaaagtattttcctcagagcggggttctcatcttcggaaaacaagactcgggaaaaactaatgtggacattgaaaaggtcatgattacagacgaaggggaaatcaggaccaccaatcccgtggctacggagcagtatggttctgtatctaccaatctccagagcggcaacacacaagcagctacctcagatgtcaacacacaaggcgttcttccaggcatggtccggcaggacagagacgtgtacctgcagggacccatctgggcaaagattccacacacggacggacattttcacccttctcctcttatgggaggatttggactgaagcaccctcccccgcagattctcatcaagaataccccggtacctgcgaatccttctaccaccttcagcgcggcaaagtttgcctccttcatcacacagtactccacggggcaggtcagcgtggagatcgagtgggagccgcagaaagagaacagcaaacgctggaaccccgagatccagtatacctccaactacaacaagtctgttaatgtggactttactgtggacactaatggcgtgtattcagagcctcgccccattggcacaagatacctgactcgtaatctgtaa

SEQ ID NO: 3177 - DNA, 2208 bp, Artificial Sequence
  Description of Artificial Sequence: Synthetic polynucleotide
atggctgccgatggttatcttccagattggctcgaggacactctctctgaaggaataagacagtggtggaagctcaaacctggcccaccaccgccaaagcccgcagagcggcataaggacgacagcaggggtcttgtgcttcctgggtacaagtacctcggacccttcaacggactcgacaaaggagagccggtcaacgaggcagacgccgcggccctcgagcacgacaaggcctacgaccggcagctcgacagcggagacaacccgtacctcaagtacaaccacgccgacgcggagtttcaggagcgccttaaagaagatacgtcttttgggggcaacctcgcaagagcagtattccaggcgaaaaagagggttcttgaacctctgggcctggttgaggagcctgttaagacggctccgggaaaaaagaggccggtagagcactctcctgcggagccagattcctcctccggaactggaaagtcgggccaacagcctgcaagaaagagattgaattttggtcagactggagacgcagactccgtacctgacccccagcctctcggacagccaccagcagccccctctggtctgggaactaatacgatggcttcaggcagtggcgcaccaatggcagacaataacgagggcgccgacggagtgggtaattcctcgggaaattggcattgcgattccacgtggatgggcgacagagtcatcaccaccagcacccgcacctgggctctgcccacctacaacaaccatctgtacaagcaaatttccagccagtctggagccagcaacgacaaccactactttggctacagcaccccttgggggtattttgacttcaacagattccactgccacttctccccacgtgactggcaaagactcatcaacaacaattggggattccggcccaaaagactcaacttcgagctctttaacattcaagtcaaggaggtcacgcagaatgacggtacgacgacgattgccaataaccttaccagcacggttcaggtgtttactgactcggagtaccagctcccgtacgtcctcggctcggcgcatcaaggatgcctcccgccgttcccagcagacgtcttcatggtgccacagtatggatacctcaccctgaacaacgggagtcaggcggtaggacgctcttcattttactgcctggagtactttccttctcagatgctgcgtaccggaaacaactttaccttcagctacacctttgaggacgttccttttcacagcagctacgctcacagccagagtttggaccgtctcatgaatcctctcatcgaccagtacctgtattacttgagcagaacaaacactccaagcggaaccactacgcagtccaggcttcagttttctcaagccggagcgagtgacattcgggaccagtctaggaactggcttcctggaccctgttaccgccagcagcgagtatcaaagacagctgcggacaacaacaacagtgattactcgtggactggagctaccaagtatcacctcaatggaagagactctctggtgaatccgggcacagccatggccagccacaaggacgatgaagaaaagtattttcctcagagcggggttctcatcttcggaaaacaagactcgggaaaaactaatgtggacattgaaaaggtcatgattacagacgaagaggaaatcaggaccaccaatcccgtggctacggagcagtatggttctgtatctaccaatctccagagcggcaacacacaagcagctacctcagatgtcaacacacaaggcgttcttccaggcatggtctggcaggacagagacgtgtacctgcagggacccatctgggcaaagattccacacacggacggacactttcacccttctccacttatgggaggatttggactgaagcaccctcccccgcagattctcatcaagagtaccccggtacctgcgaatccttctaccaccttcagcgcggcaaagtttgcttccttcatcacacagtactccacggggcaggtcagcgtggagatcgagtgggagctgcagaaagagaacagcaaacgctggaaccccgagatccagtatacctccaactacaacaagtctgttaatgtggactttactgtggacactaatggcgtgtattcagagcctcgccccattggcacaagatacctgactcgtaatctgtaa

SEQ ID NO: 3178 - DNA, 2208 bp, Artificial Sequence
  Description of Artificial Sequence: Synthetic polynucleotide
atggctgccgatggttatcttccagattggctcgaggacattctctctgaaggaataagacagtggtggaagctcaaacctggcccaccaccaccaaagcccgcagagcggcataaggacgacagcaggggtcttgtgcttcctgggtacaagtacctcggacccttcaacggactcgacaaaggagagccggtcaacgaggcagacgccgcggccctcgagcacgacaaggcctacgaccggcagctcgacagcggagacaacccgtacctcaagtacaaccacgccgacgcggagtttcaggagcgtcttaaagaagatacgtcttttgggggcaacctcggacgagcagtcttccaggcaaaaaagagggttcttgaacctctgggcctggttgaggaacctgttaagacggctccgggaaaaaagaggccggtagagcaatctcctgcggagccagactcctcctcgggaaccggaaaggcgggcaaccagcctgcaagaaagagattgaattttggtcagactggagacgcagactccgtacctgacccccagcctctcggacagccaccagcagccccctctggtctgggatctactacaatggctacaggcagtggcgcaccaatggcagacaataacgagggtgccgatggagtgggtaattcctcaggaaattggcattgcgattccacatggatgggcgacagagtcatcaccaccagcacccgcacctgggctctgcccacctacaacaaccatctgtacaagcaaatttccagccagtctggagccagcaacgacaaccactactttggctacagcaccccttgggggtattttgacttcaacagattccactgccacttctccccacgtgactggcaaagactcatcaacaacaattggggattccggcccaaaagactcaacttcaagctctttaacattcaagtcaaggaggtcacgcagaatgacggtacgacgacgattgccaataaccttaccagcacggttcaggtgtttactgactcggagtaccagctcccgtacgtcctcggctcggcgcatcaaggatgcctcccgccgttcccagcagacgtcttcatggtgccacagtatggatacctcaccctgaacaacgggagtcaggcggtaggacgctcttcattttactgcctggagtactttccttctcagatgctgcgtaccggaaacaactttaccttcagctacacctttgaggacgttccttttcacagcagctacgctcacagccagagtttggaccgtcttatgaatcctctcatcgaccagtacctgtattacttgagcagaacaaacactccaagcggaaccactacgcagtccaggcttcagttttctcaagccggagcgagtgacattcgggaccagtctaggaactggcttcctggaccctgttaccgccagcagcgagtatcaaagacagctgcggacaacaacaacagtgattactcgtggactggagctaccaagtatcacctcaatggaagagactctctggtgaatccgggcacagccatggccagccacaaggacgatgaagaaaagtattttcctcagagcggggttctcatcttcggaaaacaagactcgggaaaaactaatgtggacattgaaaaggtcatgattacagacgaagaggaaatcaggaccaccaatcccgtggctacggagcagtatggttctgtatctaccaatctccagagcggcaacacacaagcagctacctcagatgtcaacacacaaggcgttcttccaggcatggtccggcaggacagagacgtgtacctgcagggacccatctgggcaaagattccacacacggacggacattttcacccttctcctcttatgggaggatttggactgaagcaccctcccccgcagattctcatcaagaataccccggtacctgcgaatccttctaccaccttcagcgcggcaaagtttgcttccttcatcacacagtactccacggggcaggtcagcgtggagatcgagtgggagccgcagaaagagaacagcaaacgctggaaccccgagatccagtatacctccaactacaacaagtctgttaatgtggactttactgtggacactaatggcgtgtattcagagcctcgccccattggcacaagatacctgactcgtaatctgtaa

SEQ ID NO: 3179 - DNA, 2208 bp, Artificial Sequence
  Description of Artificial Sequence: Synthetic polynucleotide
atggctgccgatggttatcttccagattggctcgaggacactctctctgaaggaataagacagtggtggaagctcaaacctggcccaccaccgccaaagcccgcagagcggcataaggacgacagcaggggtcttgtgcttcctgggtacaagtacctcggacccttcaacggactcgacaaaggagagccggtcaacgaggcagacgccgcggccctcgagcacgacaaggcctacgaccggcagctcgacagcggagacaacccgtacctcaagtacaaccacgccgacgcggagtttcaggagcgccttaaagaagatacgtcttttgggggcaacctcgcaagagcagtattccaggcgaaaaagagggttcttgaacctctgggcctggttgaggagcctgttaagacggctccgggaaaaaagaggccggtagagcactctcctgcggagccagattcctcctccggaactggaaagtcgggccaacagcctgcaagaaagagattgaattttggtcagactggagacgcagactccgtacctgacccccagcctctcggacagccaccagcagccccctctggtctgggaactaatacgatggcttcaggcagtggcgcaccaatggcagacaataacgagggcgccgacggagtgggtaattcctcgggaaattggcattgcgattccacatggatgggcgacagagtcatcaccaccagcacccgcacctgggctctgcccacctacaacaaccatctgtacaagcaaatttccagccagtctggagccagcaacgacaaccactactttggctacagcaccccttgggggtattttgacttcaacagattccactgccacttctccccacgtgactggcaaagactcatcaacaacaattggggattccggcccaaaagactcaacttcaagctctttaacattcaagtcaaggaggtcacgcagaatgacggtacgacgacgattgccaataaccttaccagcacggttcaggtgtttactgactcggagtaccagctcccgtacgtcctcggctcggcgcatcaaggatgcctcccgccgttcccagcagacgtcttcatggtgccacagtatggatacctcaccctgaacaacgggagtcaggcggtaggacgctcttcattttactgcctggagtactttccttctcagatgctgcgtaccggaaacaactttaccttcagctacacctttgaggacgttccttttcacagcagctacgctcacagccagagtttggaccgtcttatgaatcctctcatcgaccagtacctgtattacttgagcagaacaaacactccaagcggaaccactacgcagtccaggcttcagttttctcaagccggagcgagtgacattcgggaccagtctaggaactggcttcctggaccctgttaccgccagcagcgagtatcaaagacagctgcggacaacaacaacagtgattactcgtggactggagctaccaagtatcacctcaatggaagagactctctggtgaatccgggcacagccatggccagccacaaggacgatgaagaaaagtattttcctcagagcggggttctcatcttcggaaaacaagactcgggaaaaactaatgtggacattgaaaaggtcatgattacagacgaagaggaaatcaggaccaccaatcccgtggctacggagcagtatggttctgtatctaccaatctccagagcggcaacacacaagcagctacctcagatgtcaacacacaaggcgttcttccaggcatggtccggcaggacagagacgtgtacctgcagggacccatctgggcaaagattccacacacggacggacattttcacccttctcctcttatgggaggatttggactgaagcaccctcccccgcagattctcatcaagaataccccggtacctgcgaatccttctaccaccttcagcgcggcaaagtttgcttccttcatcacacagtactccacggggcaggtcagcgtggagatcgagtgggagccgcagaaagagaacagcaaacgctggaaccccgagatccagtatacctccaactacaacaagtctgttaatgtggactttactgtggacactaatggcgtgtattcagagcctcgccccattggcacaagatacctgactcgtaatctgtaa

SEQ ID NO: 3180 - DNA, 2208 bp, Artificial Sequence
  Description of Artificial Sequence: Synthetic polynucleotide
atggctgccgatggttatcttccagattggctcgaggacactctctctgaaggaataagacagtggtggaagctcaaacctggcccaccaccgccaaagcccgcagagcggcataaggacgacagcaggggtcttgtgcttcctgggtacaagtacctcggacccttcaacggactcgacaaaggagagccggtcaacgaggcagacgccgcggccctcgagcacgacaaggcctacgaccggcagctcgacagcggagacaacccgtacctcaagtacaaccacgccgacgcggagtttcaggagcgccttaaagaagatacgtcttttgggggcaacctcgcaagagcagtattccaggcgaaaaagagggttcttgaacctctgggcctggttgaggagcctgttaagacggctccgggaaaaaagaggccggtagagcactctcctgcggagccagattcctcctccggaactggaaagtcgggccaacagcctgcaagaaagagattgaattttggtcagactggagacgcagactccgtacctgacccccagcctctcggacagccaccagcagccccctctggtctgggaactaatacgatggcttcaggcagtggcgcaccaatggcagacaataacgagggcgccgacggagtgggtaattcctcgggaaattggcattgcgattccacatggatgggcgacagagtcatcaccaccagcacccgcacctgggctctgcccacctacaacaaccatctgtacaagcaaatttccagccagtctggagccagcaacgacaaccactacttcggctacagcaccccttgggggtattttgacttcaacagattccactgccacttctccccacgtgactggcaaagactcatcaacaacaattggggattccggcccaaaagactcaacttcaagctctttaacattcaagtcaaggaggtcacgcagaatgacggtacgacgacgattgccaataaccttaccagcacggttcaggtgtttactgactcggagtaccagctcccgtacgtcctcggctcggcgcatcaaggatgcctcccgccgttcccagcagacgtcttcatggtgccacagtatggatacctcacccagaacaacgggagtcaggcggtaggacgctcttcattttactgcctggagtactttccttctcagatgctgcgtaccggaaacaactttaccttcagctacacctttgaggacgttccttttcacagcagctacgctcacagccagagtttggaccgtcttatgaatcctctcatcgaccagtacctgtattacttgagcagaacaaacactccaagcggaaccactacgcagtccaggcttcagttttctcaagccggagcgagtgacattcgggaccagtctaggaactggcttcctggaccctgttaccgccagcagcgagtatcaaagacagctgcggacaacaacaacagtgattactcgtggactggagctaccaagtatcacctcaatggaagagactctctggtgaatccgggcacagccatggccagccacaaggacgatgaagaaaagtattttcctcagagcggggttctcatcttcggaaaacaagactcgggaaaaactaatgtggacattgaaaaggtcatgattacagacgaagaggaaatcaggaccaccaatcccgtggctacggagcagtatggttctgtatctaccaatctccagagcggcaacacacaagcagctacctcagatgtcaacacacaaggcgttcttccaggcatggtccggcaggacagagacgtgtacctgcagggacccatctgggcaaagattccacacacggacggacattttcacccttctcctcttatgggaggatttggactgaagcaccctcccccgcagattctcatcaagaataccccggtacctgcgaatccttctaccaccttcagcgcggcaaagtttgcttccttcatcacacagtactccacggggcaggtcagcgtggagatcgagtgggagccgcagaaagagaacagcaaacgctggaaccccgagatccagtatacctccaactacaacaagtctgttaatgtggactttactgtggacactaatggcgtgtattcagagcctcgccccattggcacaagatacctgactcgtaatctgtaa

SEQ ID NO: 3181 - DNA, 2208 bp, Artificial Sequence
  Description of Artificial Sequence: Synthetic polynucleotide
atggctgccgatggttatcttccagattggctcgaggacactctctctgaaggaataagacagtggtggaagctcaaacctggcccaccaccgccaaagcccgcagagcggcataaggacgacagcaggggtcttgtgcttcctgggtacaagtacctcggacccttcaacggactcgacaaaggagagccggtcaacgaggcagacgccgcggccctcgagcacgacaaggcctacgaccggcagctcgacagcggagacaacccgtacctcaagtacaaccgcgccgacgcggagtttcaggagcgccttaaagaagatacgtcttttgggggcaacctcgcaagagcagtattccaggcgaaaaagagggttcttgaacctctgggcctggttgaggagcctgttaagacggctccgggaaaaaagaggccggtagagcactctcctgcggggccagattcctcctccggaactggaaagtcgggccaacagcctgcaagaaagagattgaattttggtcagactggagacgcagactccgtacctgacccccagcctctcggacagccaccagcagccccctctggtctgggaactaatacgatggcttcaggcagtggcgcaccaatggcagacaataacgagggcgccgacggagtgggtaattcctcgggaaattggcattgcgattccacatggatgggcgacagagtcatcaccaccagcacccgcacctgggctctgcccacctacaacaaccatctgtacaagcaaatttccagccagtctggagccagcaacgacaaccactactttggctacagcaccccttgggggtattttgacttcaacagattccactgccacttctccccacgtgactggcaaagactcatcaacaacaattggggattccggcccaaaagactcaacttcgagctctttaacattcaagtcaaggaggtcacgcagaatgacggtacgacgacgattgccaataaccttaccagcacggttcaggtgtttactgactcggagtaccagctcccgtacgtcctcggctcggcgcatcaaggatgcctcccgccgttcccagcagacgtcttcatggtgccacagtatggataccccaccctgaacaacgggagtcaggcggtaggacgctcttcattttactgcctggagtactttccttctcagatgctgcgtaccggaaacaactttaccttcagctacacctttgaggacgttccttttcacagcagctacgctcacagccagagtttggaccgtctcatgaatcctctcatcgaccagtacctgtattacttgagcagaacaaacactccaagcggaaccactacgcagtccaggcttcagttttctcaagccggagcgagtgacattcgggaccagtctaggaactggcttcctggaccctgttaccgccagcagcgagtatcaaagacagctgcggacaacaacaacagtgattactcgtggactggagctaccaagtatcacctcaatggaagagactctctggtgaatccgggcacagccatggccagccacaaggacgatgaagaaaagtattttcctcagagcggggttctcatcttcggaaaacaagactcgggaaaaactaatgtggacattgaaaaggtcatgattacagacgaagaggaaatcaggaccaccaatcccgtggctacggagcagtatggttctgtatctaccaatctccagagcggcaacacacaagcagctacctcagatgtcaacacacaaggcgttcttccaggcatggtctggcaggacagagacgtgtacctgcagggacccatctgggcaaagattccacacacggacggacactttcacccttctcctcttatgggaggatttggactgaagcaccctcccccgcagattctcatcaagagtaccccggtacctgcgaatccttctaccaccttcagcgcggcaaagtttgcttccttcatcacacagtactccacggggcaggtcagcgtggagatcgagtgggagctgcagaaagagaacagcaaacgctggaaccccgagatccagtatacctccaactacaacaagtctgttaatgtggactttactgtggacactaatggcgtgtattcagagcctcgccccattggcacaagatacctgactcgtaatctgtaa

SEQ ID NO: 3182 - DNA, 2208 bp, Artificial Sequence
  Description of Artificial Sequence: Synthetic polynucleotide
atggctgccgatggttatcttccagattggctcgaggacactctctctgaaggaataagacagtggtggaagctcaaacctggcccaccaccgccaaagcccgcagagcggcataaggacgacagcaggggtcttgtgcttcctgggtacaagtacctcggacccttcaacggactcgacaaaggagagccggtcaacgaggcagacgccgcggccctcgagcacgacaaggcctacgaccggcagctcgacagcggagacaacccgtacctcaagtacaaccacgccgacgcggagtttcaggagcgccttaaagaagatacgtcttttgggggcaacctcgcaagagcagtattccaggcgaaaaagagggttcttgaacctctgggcctggttgaggagcctgttaagacggctccgggaaaaaagaggccggtagagcactctcctgcggagccagattcctcctccggaactggaaagtcgggccaacagcctgcaagaaagagattgaattttggtcagactggagacgcagactccgtacctgacccccagcctctcggacagccaccagcagccccctctggtctgggaactaatacgatggcttcaggcagtggcgcaccaatggcagacaataacgagggcgccgacggagtgggtaattcctcgggaaattggcattgcgattccacatggatgggcgacagagtcatcaccaccagcacccgcacctgggctctgcccacctacaacaaccatctgtacaagcaaatttccagccagtctggagccagcaacgacaaccactactttggctacagcaccccttgggggtattttgacttcaacggattccactgccacttctccccacgtgactggcaaagactcatcaacaacaattggggattccggcccaaaagactcaacttcaagctctttaacattcaagtcaaggaggtcacgcagaatgacggtacgacgacgattgccaataaccttaccagcacggttcaggtgtttactgactcggagtaccagctcccgtacgtcctcggctcggcgcatcaaggatgcctcccgccgttcccagcagacgtcttcatggtgccacagtatggatacctcaccctgaacaacgggagtcaggcggtaggacgctcttcattttactgcctggagtactttccttctcagatgctgcgtaccggaaacaactttaccttcagctacacctttgaggacgttccttttcacagcagctacgctcacagccagagtttggaccgtcttatgaatcctctcatcgaccagtacctgtattacttgagcagaacaaacactccaagcggaaccactacgcagtccaggcttcagttttctcaagccggagcgagtgacattcgggaccagtctaggaactggcttcctggaccctgttaccgccagcagcgagtatcaaagacagctgcggacaacaacaacagtgattactcgtggactggagctaccaagtatcacctcaatggaagagactctctggtgaatccgggcacagccatggccagccacaaggacgatgaagaaaagtattttcctcagagcggggttctcatcttcggaaaacaagactcgggaaaaactaatgtggacattgaaaaggtcatgattacagacgaagaggaaatcaggaccaccaatcccgtggctacggagcagtatggttctgtatctaccaatctccagagcggcaacacacaagcagctacctcagatgtcaacacacaaggcgttcttccaggcatggtccggcaggacagagacgtgtacctgcagggacccatctgggcaaagattccacacacggacggacattttcacccttctcctcttatgggaggatttggactgaagcaccctcccccgcagattctcatcaagaataccccggtacctgcgaatccttctaccaccttcagcgcggcaaagtttgcttccttcatcacacagtactccacggggcaggtcagcgtggagatcgagtgggagccgcagaaagagaacagcaaacgctggaaccccgagatccagtatacctccaactacaacaagtctgttaatgtggactttactgtggacactaatggcgtgtattcagagcctcgccccattggcacaagatacctgactcgtaatctgtaa

SEQ ID NO: 3183 - DNA, 2208 bp, Artificial Sequence
  Description of Artificial Sequence: Synthetic polynucleotide
atggctgccgatggttatcttccagattggctcgaggacactctctctgaaggaataagacagtggtggaagctcaaacctggcccaccaccgccaaagcccgcagagcggcataaggacgacagcaggggtcttgtgcttcctgggtacaagtacctcggacccttcaacggactcgacaaaggagagccggtcaacgaggcagacgccgcggccctcgagcacgacaaggcctacgaccggcagctcgacagcggagacaacccgtacctcaagtacaaccacgccgacgcggagtttcaggagcgccttaaagaagatacgtcttttgggggcaacctcgcaagagcagtattccaggcgaaaaagagggttcttgaacctccgggcctggttgaggagcctgttaagacggctccgggaaaaaagaggccggtagagcactctcctgcggagccagattcctcctccggaactggaaagtcgggccaacagcctgcaagaaagagattgaattttggtcagaccggagacgcagactccgtacctgacccccagcctctcggacagccaccagcagccccctctggtctgggaactaatacgatggcttcaggcagtggcgcaccaatggcagacaataacgagggcgccgacggagtgggtaattcctcgggaaattggcattgcgattccacatggatgggcgacagagtcatcaccaccagcacccgcacctgggctctgcccacctacaacaaccatctgtacaagcaaatttccagccagtctggagccagcaacgacaaccactacttcggctacagcaccccttgggggtattttgacttcaacagattccactgccacttctccccacgtgactggcaaagactcatcaacaacaattggggattccggcccaaaagactcaacttcaagctctttaacattcaagtcaaggaggtcacgcagaatgacggtacgacgacgattgccaataaccttaccagcacggttcaggtgtttactgactcggagtaccagctcccgtacgtcctcggctcggcgcatcaaggatgcctcccgccgttcccagcagacgtcttcatggtgccacagtatggatacctcaccctgaacaacgggagtcaggcggtaggacgctcttcattttactgcctggagtactttccttctcagatgctgcgtaccggaaacaactttaccttcagctacacctttgaggacgttccttttcacagcagctacgctcacagccagagtttggaccgtcttatgaatcctctcatcgaccagtacctgtattacttgagcagaacaaacactccaagcggaaccactacgcagtccaggcttcagttttctcaagccggagcgagtgacattcgggaccagtctaggaactggcttcctggaccctgttaccgccagcagcgagtatcaaagacagctgcggacaacaacaacagtgattactcgtggactggagctaccaagtatcacctcaatggaagagactctctggtgaatccgggcacagccatggccagccacaaggacgatgaagaaaagtattttcctcagagcggggttctcatcttcggaaaacaagactcgggaaaaactaatgtggacattgaaaaggtcatgattacagacgaaggggaaatcaggaccaccaatcccgtggctacggagcagtatggctctgtatctaccaatctccagagcggcaacacacaagcagctacctcagatgtcaacacacaaggcgttcttccaggcatggtccggcaggacagagacgtgtacctgcagggacccatctgggcaaagattccacacacggacggacattttcacccttctcctcttatgggaggatttggactgaagcaccctcccccgcagattctcatcaagaataccccggtacctgcgaatccttctaccaccttcagcgcggcaaagtttgcttccttcatcacacagtactccacggggcaggtcagcgtggagatcgagtgggagccgcagaaagagaacagcaaacgctggaaccccgagatccagtatacctccaactacagcaagtctgttaatgtggactttactgtggacactaatggcgtgtattcagagcctcgccccattggcacaagatacctgactcgtaatctgtaa

SEQ ID NO: 3184 - DNA, 2208 bp, Artificial Sequence
  Description of Artificial Sequence: Synthetic polynucleotide
atggctgccgatggttatcttccagattggctcgaggacattctctctgaaggaataagacagtggtggaagctcaaacctggcccaccaccaccaaagcccgcagagcggcataaggacgacagcaggggtcttgtgcttcctgggtacaagtacctcggacccttcaacggactcgacaaaggagagccggtcaacgaggcagacgccgcggccctcgagcacgacaaggcctacgaccggcagctcgacagcggagacaacccgtacctcaagtacaaccacgccgacgcggagtttcaggagcgtcttaaagaagatacgtcttttgggggcaacctcggacgagcagtcttccaggcaaaaaagagggttcttgaacctctgggcctggttgaggaacctgttaagacggctccgggaaaaaagaggccggtagagcaatctcctgcggagccagactcctcctcgggaaccggaaaggcgggcaaccagcctgcaagaaagagattgaattttggtcagactggagacgcagactccgtacctgacccccagcctctcggacagccaccagcagccccctctggtctgggatctactacaatggctacaggcagtggcgcaccaatggcagacaataacgagggtgccgatggagtgggtaattcctcaggaaattggcattgcgattcccaatggttgggcgacagagtcatcaccaccagcacccgaacctgggccctgcccacctacaacaatcacctctacaagcaaatctccagccaatcaggagccagcaacgacaaccactactttggctacagcaccccctgggggtattttgacttcaacagattccactgccacttctccccacgtgactggcaaagactcatcaacaacaattggggattccggcccaaaagactcaacttcaagctctttaacattcaagtcaaggaggtcacgcagaatgacggtacgacgacgattgccaataaccttaccagcacggttcaggtgtttactgactcggagtaccagctcccgtacgtcctcggctcggcgcatcaaggatgcctcccgccgttcccagcagacgtcttcatggtgccacagtatggatacctcaccctgaacaacgggagtcaggcggtaggacgctcttcattttactgcctggagtactttccttctcagatgctgcgtaccggaaacaactttaccttcagctacacctttgaggacgttccttttcacagcagctacgctcacagccagagtttggaccgtcttatgaatcctctcatcgaccagtacctgtattacttgagcagaacaaacactccaagcggaaccactacgcagtccaggcttcagttttctcaagccggagcgagtgacattcgggaccagtctaggaactggcttcctggaccctgttaccgccagcagcgagtatcaaagacagctgcggacaacaacaacagtgattactcgtggactggagctaccaagtatcacctcaatggaagagactctctggtgaatccgggcacagccatggccagccacaaggacgatgaagaaaagtattttcctcagagcggggttctcatcttcggaaaacaagactcgggaaaaactaatgtggacattgaaaaggtcatgattacagacgaagaggaaatcaggaccaccaatcccgtggctacggagcagtatggttctgtatctaccaatctccagagcggcaacacacaagcagctacctcagatgtcaacacacaaggcgttcttccaggcatggtccggcaggacagagacgtgtacctgcagggacccatctgggcaaagattccacacacggacggacattttcacccttctcctcttatgggaggatttggactgaagcaccctcccccgcagattctcatcaagaataccccggtacctgcgaatccttctaccaccttcagcgcggcaaagtttgcttccttcatcacacagtactccacggggcaggtcagcgtggagatcgagtgggagccgcagaaagagaacagcaaacgctggaaccccgagatccagtatacctccaactacaacaagtctgttaatgtggactttactgtggacactaatggcgtgtattcagagcctcgccccattggcacaagatacctgactcgtaatctgtaa

SEQ ID NO: 3185 - DNA, 2208 bp, Artificial Sequence
  Description of Artificial Sequence: Synthetic polynucleotide
atggctgccgatggttatcttccagattggctcgaggacactctctctgaaggaataagacagtggtggaagctcaaacctggcccaccaccgccaaagcccgcagagcggcataaggacgacagcaggggtcttgtgcttcctgggtacaagtacctcggacccttcaacggactcgacaaaggagagccggtcaacgaggcagacgccgcggccctcgagcacgacaaggcctacgaccggcagctcgacagcggagacaacccgtacctcaagtacaaccacgccgacgcggagtttcaggagcgccttaaagaagatacgtcttttgggggcaacctcgcaagagcagtattccaggcgaaaaagagggttcttgaacctctgggcctggttgaggagcctgttaagacggctccgggaaaaaagaggccggtagagcactctcctgcggagccagattcctcctccggaactggaaagtcgggccaacagcctgcaagaaagagattgaattttggtcagactggagacgcagactccgtacctgacccccagcctctcggacagccaccagcagccccctctggtctgggaactaatacgatggcttcaggcagtggcgcaccaatggcagacaataacgagggcgccgacggagtgggtaattcctcgggaaattggcattgcgattccacatggatgggcgacagagtcatcaccaccagcacccgcacctgggctctgcccacctacaacaaccatctgtacaagcaaatttccagccagtctggagccagcaacgacaaccactacttcggctacagcaccccttgggggtattttgacttcaacagattccactgccacttctccccacgtgactggcaaagactcatcaacaacaattggggattccggcccaaaagactcaacttcaagctctttaacattcaagtcaaggaggtcacgcagaatgacggtacgacgacgattgccaataaccttaccagcacggttcaggtgtttactgactcggagtaccagctcccgtacgtcctcggctcggcgcatcaaggatgcctcccgccgttcccagcagacgtcttcatggtgccacagtatggatacctcaccctgaacaacgggagtcaggcggtaggacgctcttcattttactgcctggagtactttccttctcagatgctgcgtaccggaaacaactttaccttcagctacacctttgaggacgttccttttcacagcagctacgctcacagccagagtttggaccgtcttatgaatcctctcatcgaccagtacctgtattacttgagcagaacaaacactccaagcggaaccactacgcagtccaggcttcagttttctcaagccggagcgagtgacattcgggaccagtctaggaactggcttcctggaccctgttaccgccagcagcgagtatcaaagacagctgcggacaacaacaacagtgattactcgtggactggagctaccaagtatcacctcaatggaagagactctctggtgaatccgggcacagccatggccagccacaaggacgatgaagaaaagtattttcctcagagcggggttctcatcttcggaaaacaagactcgggaaaaactaatgtggacattgaaaaggtcatgattacagacgaagaggaaatcaggaccaccaatcccgtggctacggagcagtatggttctgtatctaccaatctccagagcggcaacacacaagcagctacctcagatgtcaacacacaaggcgttcttccaggcacggtccggcaggacagagacgtgtacctgcagggacccatctgggcaaagattccacacacggacggacattttcacccttctcctcttatgggaggatttggactgaagcaccctcccccgcagattctcatcaagaataccccggtacctgcgaatccttctaccaccttcagcgcggcaaagtttgcttccttcatcacacagtactccacggggcaggtcagcgtggagatcgagtgggagccgcagaaagagaacagcaaacgctggaaccccgagatccagtatacctccaactacaacaagtctgttaatgtggactttactgtggacactaatggcgtgtattcagagcctcgccccattggcacaagatacctgactcgtaatctgtaa

SEQ ID NO: 3186 - DNA, 2208 bp, Artificial Sequence
  Description of Artificial Sequence: Synthetic polynucleotide
atggctgccgatggttatcttccagattggctcgaggacattctctctgaaggaataagacagtggtggaagctcaaacctggcccaccaccaccaaagcccgcagagcggcataaggacgacagcaggggtcttgtgcttcctgggtacaagtacctcggacccttcaacggactcgacaaaggagagccggtcaacgaggcagacgccgcggccctcgagcacgacaaggcctacgaccggcagctcgacagcggagacaacccgtacctcaagtacaaccacgccgacgcggagtttcaggagcgtcttaaagaagatacgtcttttgggggcaacctcggacgagcagtcttccaggcaaaaaagagggttcttgaacctctgggcctggttgaggarcctgttaagacggctccgggaaaaaagaggccggtagagcactctcctgcggagccagattcctcctccggaactggaaagtcgggccaacagcctgcaagaaagagattgaattttggtcagactggagacgcagactccgtacctgacccccagcctctcggacagccaccagcagccccctctggtctgggaactaatacgatggcttcaggcagtggcgcaccaatggcagacaataacgagggcgccgacggagtgggtaattcctcgggaaattggcattgcgattccacatggatgggcgacagagtcatcaccaccagcacccgcacctgggctctgcccacctacaacaaccatctgtacaagcaaatttccagccagtctggagccagcaacgacaaccactacttcggctacagcaccccttgggggtattttgacttcaacagattccactgccacttctccccacgtgactggcaaagactcatcaacaacaattggggattccggcccaaaagactcaacttcaagctctttaacattcaagtcaaggaggtcacgcagaatgacggtacgacgacgattgccaataaccttaccagcacggttcaggtgtttactgactcggagtaccagctcccgtacgtcctcggctcggcgcatcaaggatgcctcccgccgttcccagcagacgtcttcatggtgccacagtatggatacctcaccctgaacaacgggagtcaggcggtaggacgctcttcattttactgcctggagtactttccttctcagatgctgcgtaccggaaacaactttaccttcagctacacctttgaggacgttccttttcacagcagctacgctcacagccagagtttggaccgtcttatgaatcctctcatcgaccagtacctgtattacttgagcagaacaaacactccaagcggaaccactacgcagtccaggcttcagttttctcaagccggagcgagtgacattcgggaccagtctaggaactggcttcctggaccctgttaccgccagcagcgagtatcaaagacagctgcggacaacaacaacagtgattactcgtggactggagctaccaagtatcacctcaatggaagagactctctggtgaatccgggcacagccatggccagccacaaggacgatgaagaaaagtattttcctcagagcggggttctcatcttcggaaaacaagactcgggaaaaactaatgtggacattgaaaaggtcatgattacagacgaagaggaaatcaggaccaccaatcccgtggctacggagcagtatggttctgtatctaccaatctccagagcggcaacacacaagcagctacctcagatgtcaacacacaaggcgttcttccaggcatggtccggcaggacagagacgtgtacctgcagggacccatctgggcaaagattccacacacggacggacattttcacccttctcctcttatgggaggatttggactgaagcaccctcccccgcagattctcatcaagaataccccggtacctgcgaatccttctaccaccttcagcgcggcaaagtttgcttccttcatcacacagtactccacggggcaggtcagcgtggagatcgagtgggagccgcagaaagagaacagcaaacgctggaaccccgagatccagtatacctccaactacaacaagtctgttaatgtggactttactgtggacactaatggcgtgtattcagagcctcgccccattggcacaagatacctgactcgtaatctgtaa

SEQ ID NO: 3187 - DNA, 2208 bp, Artificial Sequence
  Description of Artificial Sequence: Synthetic polynucleotide
atggctgccgatggttatcttccagattggctcgaggacactctctctgaaggaataagacagtggtggaagctcaaacctggcccaccaccgccaaagcccgcagagcggcataaggacgacagcaggggtcttgtgcttcctgggtacaagtacctcggacccttcaacggactcgacaaaggagagccggtcaacgaggcagacgccgcggccctcgagcacgacaaggcctacgaccggcagctcgacagcggagacaacccgtacctcaagtacaaccacgccgacgcggagtttcaggagcgccttaaagaagatacgtcttttgggggcaacctcgcaagagcagtattccaggcgaaaaagagggttcttgaacctctgggcctggttgaggagcctgttaagacggctccgggaaaaaagaggccggtagagcactctcctgcggagtcagattcctcctccggaactggaaagtcgggccaacagcctgcaagaaagagattgaattttggtcagactggagacgcagactccgtacctgacccccagcctctcggacagccaccagcagccccctctggtctgggaactaatacgatggcttcaggcagtggcgcaccaatggcagacaataacgagggcgccgacggagtgggtaattcctcgggaaattggcattgcgattccacatggatgggcgacagagtcatcaccaccagcacccgcacctgggctctgcccacctacaacaaccatctgtacaagcaaatttccagccagtctggagccagcaacgacaaccactactttggctacagcaccccttgggggtattttgacttcaacagattccactgccacttctccccacgtgactggcaaagactcatcaacaacaattggggattccggcccaaaagactcaacttcaagctctttaacattcaagtcaaggaggtcacgcagaatgacggtacgacgacgattgccaataaccttaccagcacggttcaggtgtttactgactcggagtaccagctcccgtacgtcctcggctcggcgcatcaaggatgcctcccgccgttcccagcagacgtcttcatggtgccacagtatggatacctcaccctgaacaacgggagtcaggcggtaggacgctcttcattttactgcctggagtactttccttctcagatgctgcgtaccggaaacaactttaccttcagctacacctttgaggacgttccttttcacagcagctacgctcacagccagagtttggaccgtctcatgaatcctctcatcgaccagtacctgtattacttgagcagaacaaacactccaagcggaaccactacgcagtccaggcttcagttttctcaagccggagcgagtgacattcgggaccagtctaggaactggcttcctggaccctgttaccgccagcagcgagtatcaaagacagctgcggacaacaacaacagtgattactcgtggactggagctaccaagtatcacctcaatggaagagactctctggtgaatccgggcacagccatggccagccacaaggacgatgaagaaaagtattttcctcagagcggggttctcatcttcggaaaacaagactcgggaaaaactaatgtggacattgaaaaggtcatgattacagacgaagaggaaatcaggaccaccaatcccgtggctacggagcagtatggttctgtatctaccaatctccagagcggcaacacacaagcagctacctcagatgtcaacacacaaggcgttcttccaggcatggtctggcaggacagagacgtgtacctgcagggacccatctgggcaaagattccacacacggacggacattttcacccttctcctcttatgggaggatttggactgaagcaccctcccccgcagattctcatcaagaataccccggtacctgcgaatccttctaccaccttcagcgcggcaaagtttgcttccttcatcacacagtactccacggggcaggtcagcgtggagatcgagtgggagctgcagaaagagaacagcaaacgctggaaccccgagatccagtatacctccaactacaacaagtctgttaatgtggactttactgtggacactaatggcgtgtattcagagcctcgccccattggcacaagatacctgactcgtaatctgtaa

SEQ ID NO: 3188 - DNA, 2208 bp, Artificial Sequence
  Description of Artificial Sequence: Synthetic polynucleotide
atggctgccgatggttatcttccagattggctcgaggacactctctctgaaggaataagacagtggtggaagctcaaacctggcccaccaccgccaaagcccgcagagcggcataaggacgacagcaggggtcttgtgcttcctgggtacaagtacctcggacccttcaacggactcgacaaaggagagccggtcaacgaggcagacgccgcggccctcgagcacgacaaggcctacgaccggcagctcgacagcggagacaacccgtacctcaagtacaaccacgccgacgcggagtttcaggagcgccttaaagaagatacgtcttttgggggcaacctcgcaagagcagtattccaggcgaaaaagagggttcttgaacctctgggcctggttgaggagcctgttaagacggctccgggaaaaaagaggccggtagagcactctcctgcggagccagattcctcctccggaactggaaagtcgggccaacagcctgcaagaaagagattgaattttggtcagactggagacgcagactccgtacctgacccccagcctctcggacagccaccagcagccccctctggtctgggaactaatacgatggcttcaggcagtggcgcaccaatggcagacaataacgagggcgccgacggagtgggtaattcctcgggaaattggcattgcgattccacatggatgggcgacagagtcatcaccaccagcacccgcacctgggctctgcccacctacaacaaccatctgtacaagcaaatttccagccagtctggagccagcaacgacaaccactactttggctacagcaccccttgggggtattttgacttcaacagattccactgccacttctccccacgtgactggcaaagactcatcaacaacaattggggattccggcccaaaagactcaacttcaagctctttaacattcaagtcaaggaggtcacgcagaatgacggtacgacgacgattgccaataaccttaccagcacggttcaggtgtttactgactcggagtaccagctcccgtacgtcctcggctcggcgcatcaaggatgcctcccgccgttcccagcagacgtcttcatggtgccacagtatggatacctcaccctgaacaacgggagtcaggcggtaggacgctcttcattttactgcctggagtactttccttctcagatgctgcgtaccggaaacaactttaccttcagctacacctttgaggacgttccttttcacagcagctacgctcacagccagagtttggaccgtcttatgaatcctctcatcgaccagtacctgtattacttgagcagaacaaacactccaagcggaaccactacgcagtccaggcttcagttttctcaagccggagcgagtgacattcgggaccagtctaggaactggcttcctggaccctgttaccgccagcagcgagtatcaaagacagctgcggacaacaacaacagtgattactcgtggactggagctaccaagtatcacctcaatggaagagactctctggtgaatccgggcacagccatggccagccacaaggacgatgaagaaaagtattttcctcagagcggggttctcatcttccggaaacaagactcgggaaaaactaatgtggacattgaaaaggtcatgattacagacgaagaggaaatcaggaccaccaatcccgtggctacggagcagtatggttctgtatctaccaatctccagagcggcaacacacaagcagctacctcagatgtcaacacacaaggcgttcttccaggcatggtccggcaggacagagacgtgtacctgcagggacccatctgggcaaagattccacacacggacggacattttcacccttctcctcttatgggaggatttggactgaagcaccctcccccgcagattctcatcaagaataccccggtacctgcgaatccttctaccaccttcagcgcggcaaagtttgcttccttcatcacacagtactccacggggcaggtcagcgtggagatcgagtgggagccgcagaaagagaacagcaaacgctggaaccccgagatccagtatacctccaactacaacaagtctgttaatgtggactttactgtggacactaatggcgtgtattcagagcctcgccccattggcacaagatacctgactcgtaatctgtaa

SEQ ID NO: 3189 - DNA, 2208 bp, Artificial Sequence
  Description of Artificial Sequence: Synthetic polynucleotide
atggctgccgatggttatcttccagattggctcgaggacactctctctgaaggaataagacagtggtggaagctcaaacctggcccaccaccaccaaagcccgcagagcggcatcaggacgacagcaggggtcttgtgcttcctgggtacaagtacctcggacccttcaacggactcgacaagggagagccggtcaacgaggcagacgccgcggccctcgagcacgacaaggcctacgaccggcagctcgacagcggagacaacccgtacctcaagtacaaccacgccgacgcggagtttcaggagcgtcttaaagaagatacgtcttttgggggcaacctcggacgagcagtcttccaggcgaaaaagagggttcttgaacctctgggcctggttgaggaacctgttaagacggctccgggaaaaaagaggccggtagagcattctcctgcggagccagactcctcctcgggaaccggaaaggcgggccagcagcctgcgagaaagagattgaatttcggtcagactggagacgcagactccgtacctgacccccagcctctcggacagccaccagcagccccctccggtctgggaactaatacgacggctacaggcagtggcgcaccaatggcagacaataacgagggcgccgacggagtgggtaattcctcgggaaattggcattgcgattccacatggatgggcgacagagtcatcaccaccagcacccgaacctgggccctgcccacctacaacaaccacctctacaagcaaatctccagccaatctggagcctcaaacgacaaccactactttggctacagcaccccttgggggtattttgacttcaacagattccactgtcacttctccccacgtgactggcaaagactcatcaacaacaactggggattccgacccaagagactcaacttcaagctctttaacattcaagtcaaagaggtcacgcagaatgacggtacgacgacgattgccaataaccttaccagcacggttcaagtctttgctgactcggagtaccagctcccgtacgtcctcggctcggcgcatcaaggatgcctcccgccgtttccagcagacgtcttcatggtgccacagtatggatacctcaccctgaacaacgggagtcaggcggtaggacgctcttccttttactgcctggagtactttccttctcagatgctgcgtaccggaaacaactttaccttcagctacacctttgaggacgttcctttccacagcagctacgctcacagccagagtttggaccggctgatgaatcctctgatcgaccagtatctgtattacttgagcaaaacaaacgctccaagcggaaccaccacgatgtccaggcttcagttttctcaggccggagcgagtgacattcgggaccagtctaggaactggcttcctggaccctgttaccgccagcagcgagtatcaaaaacagctgcggataacaacaacagtgattattcgtggactggagctaccaagtaccacctcaatggaagagactctctggtgaatccgggcccagctatggccagccacaaggacgatgaagaaaaatattttcctcagagcggggttctcatctttggaaaacaagactcgggaaaaactaatgtggacattgaaaaggtcatgattacagacgaagaggaaatcaggaccaccaatcccgtggctacggagcagtatggttctgtatctaccaacctccagagcggcaacacacaggcagccaccacagatgtcaacacacaaggcgttcttccaggcatggtctggcaggacagagacgtgtacctgcaaggacccatctgggcaaagattcctcacacggacggacactttcacccttctcccctcatgggaggatttggactcaaacaccctcctccgcaaatcctcatcaagaatacccccgtacctgcgaatccttcgaccacattcagcgcggcaaagtttgcttctttcatcacacagtactctacggggcaggtcagcgtggagattgagtgggagctgcagaaggagaacagcaaacgctggaaccccgaaatccagtacacttccaactacaacaagtctgttaatgtggactttactgtggacactaatggtgtgtattcagagcctcgccccattggcacaagatacctgactcgtaatctgtaa

SEQ ID NO: 3190 - DNA, 2208 bp, Artificial Sequence
  Description of Artificial Sequence: Synthetic polynucleotide
atggctgccgatggttatcttccagattggctcgaggacactctctctgaaggaataagacagtggtggaagctcaaacctggcccaccaccaccaaagcccgcagagcggcatcaggacgacagcaggggtcttgtgcttcctgggtacaagtacctcggacccttcaacggactcgacaagggagagccggtcaacgaggcagacgccgcggccctcgagcacgacaaggcctacgaccggcagctcgacagcggagacaacccgtacctcaagtacaaccacgccgacgcggagtttcaggagcgtcttaaagaagatacgtcttttgggggcaacctcggacgagcagtcttccaggcgaaaaagagggttcttgaacctctgggcctggttgaggaacctgttaagacggctccgggaaaaaagaggccggtagagcattctcctgcggagccagactcctcctcgggaaccggaaaggcgggccagcagcctgcgagaaagagattgaatttcggtcagactggagacgcagactccgtacctgacccccagcctctcggacagccaccagcagccccctctggtctgggaactaatacgatggctacaggcagtggcgcaccaatggcagacaataacgagggcgccgacggagtgggtaattcctcgggaaattggcattgcgattccacatggatgggcgacagagtcatcaccaccagcacccgaacctgggccctgcccacctacaacaaccacctctacaagcaaatctccagccaatctggagcctcaaacgacaaccactactttggctacagcaccccttgggggtattttgacttcaacagattccactgtcacttctccccacgtgactggcaaagactcatcaacaacaactggggattccgacccaagagactcaacttcaagctctttaacattcaagtcaaagaggtcacgcagaatgacggtacgacgacgattgccaataaccttaccagcacggttcaagtctttactgactcggagtaccagctcccgtacgtcctcggctcggcgcatcaaggatgcctcccgccgtttccagcagacgtcttcatggtgccacagtatggatacctcaccctgaacaacgggagtcaggcggtaggacgctcttccttttactgcctggagtactttccttctcagatgctgcgtaccggaaacaactttaccttcagctacacctttgaggacgttcctttccacagcagctacgctcacagccagagtttggaccggctgatgaatcctctgatcgaccagtatctgtattacttgagcaaaacaaacgctccaagcggaaccaccacgatgtccaggcttcagttttctcaggccggagcgagtgacattcgggaccagtctaggaactggcttcctggaccctgttaccgccagcagcgagtatcaaaaacagctgcggataacaacaacagtgattattcgtggactggagctaccaagtaccaccccaatggaagagactctctggtgaatccgggcccagctatggccagccacaaggacgatgaagaaaaatattttcctcagagcggggttctcatctttggaaaacaagactcgggaaaaactaatgtggacattgaaaaggtcatgattacagacgaagaggaaatcaggaccaccaatcccgtggctacggagcagtatggttctgtatctaccaacctccagagcggcaacacacaggcagccaccacagatgtcaacacacaaggcgttcttccaggcatggtctggcaggacagagacgtgtacctgcacggacccatctgggcaaagattcctcacacggacggacactttcacccttctcccctcatgggaggatttggactcaaacaccctcctccgcaaatcctcatcaagaatacccccgtacctgcgaatccttcgaccacattcagcgcggcaaagtttgcttctttcatcacacagtactctacggggcaggtcagcgtggagattgagtgggagctgcagaaggagaacagcaaacgctggaaccccgaaatccagtacacttccaactacaacaagtctgttaatgtggactttactgtggacactaatggtgtgtattcagagcctcgccccattggcacaagatacctgactcgtaatctgtaa

SEQ ID NO: 3191 - DNA, 2208 bp, Artificial Sequence
  Description of Artificial Sequence: Synthetic polynucleotide
atggctgccgatggttatcttccagattggctcgaggacactctctctgaaggaataagacagtggtggaagctcaaacctggcccaccaccaccaaagcccgcagagcggcatcaggacgacagcaggggtcttgtgcttcctgggtacaagtacctcggacccttcaacggactcgacaagggagagccggtcaacgaggcagacgccgcggccctcgagcacgacaaggcctacgaccggcagctcgacagcggagacaacccgtacctcaagtacaaccacgccgacgcggagtttcaggagcgtcttaaagaagatacgtcttttgggggcaacctcggacgagcagtcttccaggcgaaaaagagggttcttgaacctctgggcctggttgaggaacctgttaagacggctccgggaaaaaagaggccggtagagcattctcctgcggagccagactcctcctcgggaaccggaaaggcgggccagcagcctgcgagaaagagattgaatttcggtcagactggagacgcagactccgtacctgacccccagcctctcggacagccaccagcagccccctctggtctgggaactaatacgatggctacaggcagtggcgcaccaatggcagacaataacgagggcgccgacggagtgggtaattcctcgggaaattggcattgcgattccacatggatgggcgacagagccatcaccaccagcacccgaacctgggccctgcccacctacaacaaccacctctacaagcaaatctccagccaatctggagcctcaaacgacaaccactactttggctacagcaccccttgggggtattttgacttcaacagattccactgtcacttctccccacgtgactggcaaagactcatcaacaacaactggggattccgacccaagagactcaacttcaagctctttaacattcaagtcaaagaggtcacgcagaatgacggtacgacgacgattgccaataaccttaccagcacggttcaagtctttactgactcggagtaccagctcccgtacgtcctcggctcggcgcatcaaggatgcctcccgccgtttccagcagacgtcttcatggtgccacagtatggatacctcaccctgaacaacgggagtcaggcggtaggacgctcttccttttactgcctggagtactttccttctcagatgctgcgtaccggaaacaactttaccttcagctacacctttgaggacgttcctttccacagcagctacgctcacagccagagtttggaccggctgatgaatcctctgatcgaccagtatctgtattacttgagcaaaacaaacgctccaagcggaaccaccacgatgtccaggcttcagttttctcaggccggagcgagtgacattcgggaccagtctaggaactggcttcctggaccctgttaccgccagcagcgagtatcaaaaacagctgcggataacaacaacagtgattattcgtggactggagctaccaagtaccacctcaatggaagagactctctggtgaatccgggcccagctatggccagccacaaggacgatgaagaaaaatattttcctcagagcggggttctcatctttggaaaacaagactcgggaaaaactaatgtggacattgaaaaggtcatgattacggacgaagaggaaatcaggaccaccaatcccgtggctacggagcagtatggttctgtatctaccaacctccagagcggcaacacacaggcagccaccacagatgtcaacacacaaggcgttcttccaggcatggtctggcaggacagagacgtgtacctgcaaggacccatctgggcaaagattcctcacacggacggacactttcacccttctcccctcatgggaggatttggactcaaacaccctcctccgcaaatcctcatcaagaatacccccgtacctgcgaatccttcgaccacattcagcgcggcaaagcttgcttctttcatcacacagtactctacggggcaggtcagcgtggagattgagtgggagctgcagaaggagaacagcaaacgctggaaccccgaaatccagtacacttccaactacaacaagtctgttaatgtggactttactgtggacactaatggtgtgtattcagagcctcgccccattggcacaagatacctgactcgtaatctgtaa

SEQ ID NO: 3192 - DNA, 2208 bp, Artificial Sequence
  Description of Artificial Sequence: Synthetic polynucleotide
atggctgccgatggttatcttccagattggctcgaggacactctctctgaaggaataagacagtggtggaagctcaaacctggcccaccaccaccaaagcccgcagagcggcatcaggacgacagcaggggtcttgtgcttcctgggtacaagtacctcggacccttcaacggactcgacaagggagagccggtcaacgaggcagacgccgcggccctcgagcacgacaaggcctacgaccggcagctcgacagcggagacaacccgtacctcaagtacaaccacgccgacgcggagtttcaggagcgtcttaaagaagatacgtcttttgggggcaacctcggacgagcagtcttccaggcgaaaaagagggttcttgaacctctaggcctggttgaggaacctgttaagacggctccgggaaaaaagaggccggtagagcattctcctgcggagccagactcctcctcgggaaccggaaaggcgggccagcagcctgcgagaaagagattgaatttcggtcagactggagacgcagactccgtacctgacccccagcctcccggacagccaccagcagccccctctggtctgggaactaatacgatggctacaggcagtggcgcaccaatggcagacaataacgagggcgccgacggagtgggtaattcctcgggaaattggcattgcgattccacatggatgggcgacagagtcatcaccaccagcacccgaacctgggccctgcccacctacaacaaccacctctacaagcaaatctccagccaatctggagcctcaaacgacaaccactactttggctacagcaccccttgggggtattttgacttcaacagattccactgtcacttctccccacgtgactggcaaagactcatcaacaacaactggggattccgacccaagagactcaacttcaagctctttaacattcaagtcaaagaggtcacgcagaatgacggtacgacgacgattgccaataaccttaccagcacggttcaagtctttactgactcggagtaccagctcccgtacgtcctcggctcggcgcatcaaggatgcctcccgccgtttccagcagacgtcttcatggtgccacagtatggatacctcaccctgaacaacgggagtcaggcggtaggacgctcttccttttactgcctggagtactttccttctcagatgctgcgtaccggaaacaactttaccttcagctacacctttgaggacgttcctttccacagcagctacgctcacagccagagtttggaccggctgatgaatcctctgatcgaccagtatctgtattacttgagcaaaacaaacgctccaagcggaaccaccacgatgtccaggcttcagttttctcaggccggagcgagtgacattcgggaccagtctaggaactggcttcctggaccctgttaccgccagcagcgagtatcaaaaacagctgcggataacaacaacagtgattattcgtggactggagctaccaagtaccacctcaatggaagagactctctggtgaatccgggcccagctatggccagccacaaggacgatgaagaaaaatattttcctcagagcggggttctcatctttggaaaacaagactcgggaaaaactaatgtggacattgaaaaggtcatgattacagacgaagaggaagtcaggaccaccaatcccgtggctacggagcagtatggttctgtatctaccaacctccagagcggcaacacacaggcagccaccacagatgtcaacacacaaggcgttcttccaggcatggtctggcaggacagagacgtgtacctgcaaggacccatctgggcaaagattcctcacacggacggacactttcacccttctcccctcatgggaggatttggactcaaacaccctcctccgcaaatcctcatcaagaatacccccgtacctgcgaatccttcgaccacattcagcgcggcaaagtttgcttctttcatcacacagtactctacggggcaggtcagcgtggagattgagtgggagctgcagaaggagaacagcaaacgctggaaccccgaaatccagtacacttccaactacaacaagtctgttaatgtggactttactgtggacactaatggtgtgtattcagagcctcgccccattggcacaggatacctgactcgtaatctgtaa

SEQ ID NO: 3193 - DNA, 2208 bp, Artificial Sequence
  Description of Artificial Sequence: Synthetic polynucleotide
atggctgccgatggttatcttccagattggctcgaggacactctctctgaaggaataagacagtggtggaagctcaaacctggcccaccaccaccaaagcccgcagagcggcatcaggacgacagcaggggtcttgtgcttcctgggtacaagtacctcggacccttcaacggactcgacaagggagagccggtcaacgaggcagacgccgcggccctcgagcacgacaaggcctacgaccggcagctcgacagcggagacaacccgtacctcaagtacaaccacgccgacgcggagtttcaggagcgtcttaaagaagatacgtcttttgggggcaacctcggacgagcagtcttccaggcgaaaaagagggttcttgaacctctgggcctggttgaggaacctgttaagacggctccgggaaaaaagaggccggtagagcattctcctgcggagccagactcctcctcgggaaccggaaaggcgggccagcagcctgcgagaaagagattgaatttcggtcagactggagacgcagactccgtacctgacccccagcctctcggacagccaccagcagccccctctggtctgggaactaatacggtggctacaggcagtggcgcaccaatggcagacaataacgagggcgccgacggagtgggtaattcctcgggaaattggcattgcgattccacatggatgggcgacagagtcatcaccaccagcacccgaacctgggccctgcccacctacaacaaccacctctacaagcaaatctccagccaatctggagcctcaaacgacaaccactactttggctacagcaccccttgggggtattttgacttcaacagattccactgtcacttctccccacgtgactggcaaagactcatcaacaacaactggagattccgacccaagagactcaacttcaagctctttaacattcaagtcaaagaggtcacgcagaatgacggtacgacgacgattgccgataaccttaccagcacggttcaagtctttactgactcggagtaccagctcccgtacgtcctcggctcggcgcatcaaggatgcctcccgccgtttccagcagacgtcttcatggtgccacagtatggatacctcaccctgaacaacgggagtcaggcggtaggacgctcttccttttactgcctggagtactttccttctcagatgctgcgtaccggaaacaactttaccttcagctacacctttgaggacgttcctctccacagcagctacgctcacagccagagtttggaccggctgatgaatcctctgatcgaccagtatctgtattacttgagcaaaacaaacgctccaagcggaaccaccacgatgtccaggcttcagttttctcaggccggagcgagtgacattcgggaccagtctaggaactggcttcctggaccctgttaccgccagcagcgagtatcaaaaacagctgcggataacaacaacagtgattattcgtggactggagctaccaagtaccacctcaatggaagagactctctggtgaatccgggcccagctatggccagccacaaggacgatgaagaaaaatattttcctcagagcggggttctcatctttggaaaacaagactcgggaaaaactaatgtggacattgaaaaggtcatgattacagacgaagaggaaatcaggaccaccaatcccgtggctacggagcagtatggttctgtatctaccaacctccagagcggcaacacacaggcagccaccacagatgtcaacacacaaggcgttcttccaggcatggtctggcaggacagagacgtgtacctgcaaggacccatctgggcaaagattcctcacacggacggacactttcacccttctcccctcatgggaggatttggactcaaacaccctcctccgcaaatcctcatcaagaatacccccgtacctgcgaatccttcgaccacattcagcgcggcaaagcttgcttctttcatcacacagtactctacggggcaggtcagcgtggagattgagtgggagctgcagaaggagaacagcaaacgctggaaccccgaaatccagtacacttccaactacaacaagtctgttaatgtggactttactgcggacactaatggtgtgtattcagagcctcgccccattggcacaagatacctgactcgtaatctgtaa

SEQ ID NO: 3194 - DNA, 2208 bp, Artificial Sequence
  Description of Artificial Sequence: Synthetic polynucleotide
atggctgccgatggttatcttccagattggctcgaggacactctctctgaaggaataagacagtggtggaagctcaaacctggcccaccaccaccaaagcccgcagagcggcatcaggacgacagcaggggtcttgtgcttcctgggtacaagtacctcggacccttcaacggactcgacaagggagagccggtcaacgaggcagacgccgcggccctcgagcacgacaaggcctacgaccggcagctcgacagcggagacaacccgtacctcaagtacaaccacgccgacgcggagtttcaggagcgtcttaaagaggatacgtcttttgggggcaacctcggacgagcagtcttccaggcgaaaaagagggttcttgaacctctgggcctggttgaggaacctgttaagacggctccgggaaaaaagaggccggtagagcattctcctgcggagccagactcctcctcgggaaccggaaaggcgggccagcagcctgcgagaaagagatcgaatttcggtcagactggagacgcagactccgtacctgacccccagcctctcggacagccaccagcagccccctctggtctgggaactaatacgatggctacaggcagtggcgcaccaatggcagacaataacgagggcgccgacggagtgggtaattcctcgggaaattggcattgcgattccacatggatgggcgacagagtcatcaccaccagcacccgaacctgggccctgcccacctacaacaaccacctctacaagcaaatctccagccaatctggagcctcaaacgacaaccactactttggctacagcaccccttgggggtattttgacttcaacagattccactgtcacttctccccacgtgactggcaaagactcatcaacaacaactggggattccgacccaagagactcaacttcaagctctttaacattcaagtcaaagaggtcgcgcagaatgacggtacgacgacgattgccaataaccttaccagcacggttcaagtctttactgactcggagtaccagctcccgtacgtcctcggctcggcgcatcaaggatgcctcccgccgtttccagcagacgtcttcatggtgccacagtatggatacctcaccctgaacaacgggagtcaggcggtaggacgctcttccttttactgcctggagtactttccttctcagatgctgcgtaccggaaacaactttaccttcagctacacctttgaggacgttcctttccacagcagctacgctcacagccagagtttggaccggctgatgaatcctctgatcgaccagtatctgtattacttgagcaaaacaaacgctccaagcggaaccaccacgatgtccaggcttcagttttctcaggccggagcgagtgacattcgggaccagtctaggaactggcttcctggaccctgttaccgccagcagcgagtatcaaaaacagctgcggataacaacaacagtgattattcgtggactggagctaccaagtaccacctcaatggaagagactctctggtgaatccgggcccagctatggccagccacaaggacgatgaagaaaaatattttcctcagagcggggttctcatctttggaaaacaagactcgggaaaaactaatgtggacattaaaaaggtcatgattacagacgaagaggaaatcaggaccaccaatcccgtggctacggagcagtatggttctgtatctaccaacctccagagcggcaacacacaggcagccaccacagatgtcaacacacaaggcgttcttccaggcatggtctggcaggacagagacgtgtacctgcaaggacccatctgggcaaagatccctcacacggacggacactttcacccttctcccctcatgggaggatttggactcaaacaccctcctccgcaaatcctcatcaagaatacccccgtacctgcgaatccttcgaccacattcagcgcggcaaagtttgcttctttcatcacacagtactctacggggcaggtcagcgtggagattgagtgggagctgcagaaggagaacagcaaacgctggaaccccgaaatccagtacacttccaactacaacaagtctgttaatgtggactttactgtggacactaatggtgtgtattcagagcctcgccccattggcacaagatacctgactcgtaatctgtaa

SEQ ID NO: 3195 - DNA, 2205 bp, Artificial Sequence
  Description of Artificial Sequence: Synthetic polynucleotide
atggctgccgatggttatcttccagattggctcgaggacactctctctgaaggaataagacagtggtggaagctcaaacctggcccaccaccaccaaagcccgcagagcggcatcaggacgacagcaggggtcttgtgcttcctgggtacaagtacctcggacccttcaacggactcgacaagggagagccggtcaacgaggcagacgccgcggccctcgagcacgacaaggcctacgaccggcagctcgacagcggagacaacccgtacctcaagtacaaccacgccgacgcggagtttcaggagcgtcttaaagaagatacgtcttttgggggcaacctcggacgagcagtcttccaggcgaaaaagagggttcttgaacctctgggcctggttgaggaacctgttaagacggctccgggaaaaaagaggccggtagagcattctcctgcggagccagactcctcctcgggaaccggaaaggcgggccagcagcctgcgagaaagagattgaatttcggtcagactggagacgcagactccgtacctgacccccagcctctcggacagccaccagcagccccctctggtctgggaactaatacgatggctacaggcagtggcgcaccaatggcagacaataacgagggcgccgacggagtgggtaattcctcgggaaattggcattgcgattccacatggatgggcgacagagtcatcaccaccagcacccgaacctgggccctgcccacctacaacaaccacctctacaagcaaatctccagccaatctggagcctcaaacgacaaccactactttggctacagcaccccttgggggtattttgacttcaacagattccactgtcacttctccccacgtgactggcaaagactcatcaacaactggggattccgacccaagagactcaacttcaagctctttaacattcaagtcaaagaggtcacgcagaatgacggtacgacgacgattgccaataaccttaccagcacggttcaagtctttactgactcggagtaccagctcccgtacgtcctcggctcggcgcatcaaggatgcctcccgccgtttccagcagacgtcttcatggtgccacagtatggatacctcaccctgaacaacgggagtcaggcggtaggacgctcttccttttactgcctggagtactttccttctcagatgctgcgtaccggaaacaactttaccttcagctacacctttgaggacgttcctttccacagcagctacgctcacagccagagtttggaccggctgatgaatcctctgatcgaccagtatctgtattacttgagcaaaacaaacgctccaagcggaaccaccacgatgtccaggcttcagttttctcaggccggagcgagtgacattcgggaccagtctaggaactggcttcctggaccctgttaccgccagcagcgagtatcaaaaacagctgcggataacaacaacagtgattattcgtggactggagctaccaagtaccacctcaatggaagagactctctggtgaatccgggcccagctatggccagccacaaggacgatgaagaaaaatattttcctcagagcggggttctcatctttggaaaacaagactcgggaaaaactaatgtggacattgaaaaggtcatgattacagacgaagaggaaatcaggaccaccaatcccgtggctacggagcagtatggttctgtatctaccaacctccagagcggcaacacacaggcagccaccacagatgtcaacacacaaggcgttcttccaggcatggtctggcaggacagagacgtgtacctgcaaggacccatctgggcaaagattcctcacacggacggacactttcacccttctcccctcatgggaggatttggactcaaacaccctcctccgcaaatcctcatcaagaatacccccgtacctgcgaatccttcgaccacattcagcgcggcaaagtttgcttctttcatcacacagtactctacggggcaggtcagcgtggagattgagtgggagctgcagaaggagaacagcaaacgctggaaccccgaaatccagtacacttccaactacaacaagtctgttaatgtggactttactgtggacactaatggtgtgtattcagagcctcgccccattggcacaagatacctgactcgtaatctgtaa

SEQ ID NO: 3196 - DNA, 2208 bp, Artificial Sequence
  Description of Artificial Sequence: Synthetic polynucleotide
atggctgccgatggttatcttccagattggctcgaggacactctctctgaaggaataagacagtggtggaagctcaaacctggcccaccaccaccaaagcccgcagagcggcatcaggacgacagcaggggtcttgtgcttcctgggtacaagtacctcggacccttcaacggactcgacaagggagagccggtcaacgaggcagacgccgcggccctcgagcacgacaaggcctacgaccggcagctcgacagcggagacaacccgtacctcaagtacaaccacgccgacgcggagtttcaggagcgtcttaaagaagatacgtcttttgggggcaacctcggacgagcagtcttccaggcgaaaaagagggttcttgaacctctgggcctggttgaggaacctgttaagacggctccgggaaaaaagaggccggtagagcattctcctgcggagccagactcctcctcgggaaccggaaaggcgggccagcagcctgcgagaaagagattgaatttcggtcagactggagacgcagactccgtacctgacccccagcctctcggacagccaccagcagccccctctggtctgggaactaatacgatggctacaggcagtggcgcaccaatggcagacaataacgagggcgccgacggagtgggtaattcctcgggaaattggcattgcgattccacatggatgggcgacagagtcatcaccaccagcacccgaacctgggccctgcccacctacaacaaccacctctacaagcaaatctccagccaatctggagcctcaaacgacaaccactactttggctacagcaccccttgggggtattttgacttcaacagattccactgtcacttctccccacgtgactggcaaagactcatcaacaacaactggggattccgacccaagagactcaacttcaagctctttaacattcaagtcaaagaggtcacgcagaatgacggtacgacgacgattgccaataaccttaccagcacggttcaagtctttactgactcggagtaccagctcccgtacgtcctcggctcggcgcatcaaggatgcctcccgccgtttccagcagacgtcttcatggtgccacagtatggatacctcaccctgaacaacgggagtcaggcggtaggacgctcttccttttactgcctggagtactttccttctcagatgctgcgtaccggaaacaactttaccttcagctacacctttgaggacgttcctttccacagcagctacgctcacagccagagtttggaccggctgatgaatcctctgatcgaccagtatctgtattacttgagcaaaacaaacgctccaagcggaaccaccacgatgtccaggcttcagttttctcaggccggagcgagtgacattcgggaccagtctaggaactggcttcctggaccctgttaccgccagcagcgagtatcaaaaacagctgcggataacaacaacagtgattattcgtggactggagctaccaagtaccacctcaatggaagagactctctggtgaatccgggcccagctatggccagccacaaggacgatgaagaaaaatattttcctcagagcggggttctcatctttggaaaacaagactcgggaaaaactaatgtggacattgaaaaggtcatgattacagacgaagaggaaatcaggaccaccaatcccgtggctacggagcagtatggttctgtatctaccaacctccagagcggcaacacacaggcagccaccacagatgtcaacacacaaggcgttcttccaggcatggtctggcaggacagagacgtgtacctgcaaggacccatctgggcaaagattcctcacacggacggacactttcacccttctcccctcatgggaggatttggactcaaacaccctcctccgcaaatcctcatcaagaatacccccgtacctgcgaatccttcgaccacattcagcgcggcaaagtttgcttctttcatcacacagtactctacggggcaggtcagcgtggagattgagtgggagctgcagaaggagaacagcaaacgctggaaccccgaaatccagtacacttccaactacaacaagtctgttaatgtggactttactgtggacactaatggtgtgtattcagagcctcgccccattgacacaagatacctgactcgtaatctgtaa

SEQ ID NO: 3197 - DNA, 2208 bp, Artificial Sequence
  Description of Artificial Sequence: Synthetic polynucleotide
atggctgccgatggttatcttccagattggctcgaggacactctctctgaaggaataagacagtggtggaagctcaaacctggcccaccaccaccaaagcccgcagagcggcatcaggacgacagcaggggtcttgtgcttcctgggtacaagtacctcggacccttcaacggactcgacaagggagagccggtcaacgaggcagacgccgcggccctcgagcacgacaaggcctacgaccggcagctcgacagcggagacaacccgtacctcaagtacaaccacgccgacgcggagtttcaggagcgtcttaaagaagatacgtcttttgggggcaacctcggacgagcagtcttccaggcgaaaaagagggttcttgaacctctgggcctggttgaggaacctgttaagacggctccgggaaaaaagaggccggtagagcattctcctgcggagccagactcctcctcgggaaccggaaaggcgggccagcagcctgcgagaaagagattgaatttcggtcagactggagacgcagactccgtacctgacccccagcctctcggacagccaccagcagccccctctggtctgggaactaatacgatggctacaggcagtggcgcaccaatggcagacaataacgagggcgccgacggagtgggtaattcctcgggaaattggcattgcgattccacatggatgggcgacagagtcatcaccaccagcacccgaacctgggccctgcccacctacaacaaccacctctacaagcaaatctccagccaatctggagcctcaaacgacaaccactactttggctacagcaccccttgggggtattttgacttcaacagattccactgtcacttctccccacgtgactggcaaagactcatcaacaacaactggggattccgacccaagagactcaacttcaagctctttaacattcaagtcaaagaggtcacgcagaatgacggtacgacgacgattgccaataaccttaccagcacggttcaagtctttactgactcggagtaccagctcccgtacgtcctcggctcggcgcatcaaggatgcctcccgccgtttccagcagacgtcttcatggtgccacagtatggatacctcaccctgaacaacgggagtcaggcggtaggacgctcttccttttactgcctggagtactttccttctcagatgctgcgtaccggaaacaactttaccttcagctacacctttgaggacgttcctttccacagcagctacgctcacagccagagtttggaccggctgatgaatcctctgatcaaccagtatctgtattacttgagcaaaacaaacgctccaagcggaaccaccacgatgtccaggcttcagttttctcaggccggagcgagtgacattcgggaccagtctaggaactggcttcctggaccctgttaccgccagcagcgagtatcaaaaacagctgcggataacaacaacagtgattattcgtggactggagctaccaagtaccacctcaatggaagagactctctggtgaatccgggcccagctatggccagccacaaggacgatgaagaaaaatattttcctcagagcggggttctcatctttggaaaacaagactcgggaaaaactaatgtggacattgaaaaggtcatgattacagacgaagaggaaatcaggaccaccaatcccgtggctacggagcagtatggttctgtatctaccaacctccagagcggcaacacacaggcagccaccacagatgtcaacacacaaggcgttcttccaggcatggtctggcaggacagagacgtgtacctgcaaggacccatctgggcaaagattcctcacacggacggacactttcacccttctcccctcatgggaggatttggactcaaacaccctcctccgcaaatcctcatcaagaatacccccgtacctgcgaatccttcgaccacattcagcgcggcaaagtttgcttctttcatcacacagtactctacggggcaggtcagcgtggagattgagtgggagctgcagaaggagaacagcaaacgctggaaccccgaaatccagtacacttccaactacaacaagtctgttaatgtggactttactgtggacactaatggtgtgtattcagagcctcgccccattggcacaagatacctgactcgtaatctgtaa

SEQ ID NO: 3198 - DNA, 2208 bp, Artificial Sequence
  Description of Artificial Sequence: Synthetic polynucleotide
atggctgccgatggttatcttccagattggctcgaggacactctctctgaaggaataagacagtggtggaagctcaaacctggcccaccaccaccaaagcccgcagagcggcatcaggacgacagcaggggtcttgtgcttcctgggtacaagtacctcggacccttcaacggactcgacaagggagagccggtcaacgaggcagacgccgcggccctcgagcacgacaaggcctacgaccggcagctcgacagcggagacaacccgtacctcaagtacaaccacgccgacgcggagtttcaggagcgtcttaaagaagatacgtcttttgggggcaacctcggacgagcagtcttccaggcgaaaaagagggttcttgaacctctgggcctggttgaggaacctgttaagatggctccgggaaaaaagaggccggtagagcattctcctgcggagccagactcctcctcgggaaccggaaaggcgggccagcagcctgcgagaaagagattgaatttcggtcagactggagacgcagactccgtacctgacccccagcctctcggacagccaccagcagccccctctggtctgggaactaatacgacggctacaggcagtggcgcaccaatggcagacaataacgagggcgccgacggagtgggtaattcctcgggaaattggcattgcgattccacatggatgggcgacagagtcatcaccaccagcacccgaacctgggccctgcccacctacaacaaccacctctacaagcaaatctccagccaatctggagcctcaaacgacaaccactactttggctacagcaccccttgggggtattttgacttcaacagattccactgtcacttctccccacgtgactggcaaagactcatcaacaacaactggggattccgacccaagagactcaacttcaagctctttaacattcaagtcaaagaggtcacgcagaatgacggtacgacgacgattgccaataaccttaccagcacggttcaagtctttactgactcggagtaccagctcccgtacgtcctcggctcggcgcatcaaggatgcctcccgccgtttccagcagacgtcttcatggtgccacagtatggatacctcaccctgaacaacgggagtcaggcggtaggacgctcttccttttactgcctggagtactttccttctcagatgctgcgtaccggaaacaactttaccttcagctacacctttgaggacgttcctttccacagcagctacgctcacagccagagtttggaccggctgatgaatcctctgatcgaccagtatctgtattacttgagcaaaacaaacgctccaagcggaaccaccacgatgtccaggcttcagttttctcaggccggagcgagtgacattcgggaccagtctaggaactggcttcctggaccctgttaccgccagcagcgagtatcaaaaacagctgcggataacaacaacagtgattattcgtggactggagctaccaagtaccacctcaatggaagagactctctggtgaatccgggcccagctatggccagccacaaggacgatgaagaaaaatattttcctcagagcggggttctcatctttggaaaacaagactcgggaaaaactaatgtggacattgaaaaggtcatgattacagacgaagaggaaatcaggaccaccaatcccgtggctacggagcagtatggttctgtatctaccaacctccagagcggcaacacacaggcagccaccacagatgtcaacacacaaggcgttcttccaggcatggtctggcaggacagagacgtgtacctgcaaggacccatctgggcaaagattcctcacacggacggacactttcacccttctcccctcatgggaggatttggactcaaacaccctcctccgcaaatcctcatcaagaatacccccgtacctgcgaatccttcgaccacattcagcgcggcaaagtttgcttctttcatcacacagtactctacggggcaggtcagcgtggagattgagtgggagctgcagaaggagaacagcaaacgctggaaccccgaaatccagtacacttccaactacaacaagtctgttaatgtggactttactgtggacactaatggtgtgtattcagagcctcgccccattggcacaagatacctgactcgtaatctgtaa

SEQ ID NO: 3199 - DNA, 2208 bp, Artificial Sequence
  Description of Artificial Sequence: Synthetic polynucleotide
atggctgccgatggttatcttccagattggctcgaggacactctctctgaaggaataagacagtggtggaagctcaaacctggcccaccaccaccaaagcccgcagagcggcatcaggacgacagcaggggtcttgtgcttcctgggtacaagtacctcggacccttcaacggactcgacaagggagagccggtcaacgaggcagacgccgcggccctcgagcacgacaaggcctacgaccggcagctcgacagcggagacaacccgtacctcaagtacaaccacgccgacgcggagtttcaggagcgtcttaaagaagatacgtcttttgggggcaacctcggacgagcagtcttccaggcgaaaaagagggttcttgaacctctgggcctggttgaggaacctgttaagacggctccgggaaaaaagaggccggtagagcattctcctgcggagccagactcctcctcgggaaccggaaaggcgggccagcagcctgcgagaaagagattgaatttcggtcagactggagacgcagactccgtacctgacccccagcctctcggacagccaccagcagccccctctggtctgggaactaatacgatggctacaggcagtggcgcaccaatggcagacaataacgagggcgccgacggagtgggtaattcctcgggaaattggcattgcgattccacatggatgggcgacagagtcatcaccaccagcacccgaacctgggccctgcccacctacaacaaccacctctacaagcaaatctccagccaatctggagcctcaaacgacaaccactactttggctacagcaccccttgggggtattttgacttcaacagattccactgtcacttctccccacgtgactggcaaagactcatcaacaacaactggggattccgacccaagagactcaacttcaagctctttaacattcaagtcaaagaggtcacgcagaatgacggtacgacgacgattgccaataaccttaccagcacggttcaagtctttactgactcggagtaccagctcccgtacgtcctcggctcggcgcatcaaggatgcctcccgccgtttccagcagacgtcttcatggtgccacagtatggatacctcaccctgaacaacgggagtcaggcggtaggacgctcttccttttactgcctggagtactttccttctcagatgctgcgtaccggaaacaactttaccttcagctacacctttgaggacgttcctttccacagcagctacgctcacagccagagtttggaccggctgatgaatcctctgatcgaccagtatctgtattacttgagcaaaacaaacgctccaagcggaaccaccacgatgtccaggcttcagttttctcaggccggagcgagtgacattcgggaccagtctaggaactggcttcctggaccctgttaccgccagcagcgagtatcaaaaacagctgcggataacaacaacagtgattattcgtggactggagctaccaagtaccacctcaatggaagagactctctggtgaatccgggcccagctatggccagccacaaggacgatgaagaaaaatattttcctcagagcggggttctcatctttggaaaacaagactcgggaaaaactaatgtggacattgaaaaggtcatgattacagacgaagaggaaatcaggaccaccaatcccatggctacggagcagtatggttctgtatctaccaacctccagagcggcaacacacaggcagccaccacagatgtcaacacacaaggcgttcttccaggcatggtctggcaggacagagacgtgtacctgcaaggacccatctgggcaaagattcctcacacggacggacactttcacccttctcccctcatgggaggatttggactcaaacaccctcctccgcaaatcctcatcaagaatacccccgtacctgcgaatccttcgaccacattcagcgcggcaaagtttgcttctttcatcacacagtactctacggggcaggtcagcgtggagattgagtgggagctgcagaaggagaacagcaaacgctggaaccccgaaatccagtacacttccaactacaacaagtctgttaatgtggactttactgtggacactaatggtgtgtattcagagcctcgccccattggcacaagatacctgactcgtaatctgtaa

SEQ ID NO: 3200 - DNA, 2208 bp, Artificial Sequence
  Description of Artificial Sequence: Synthetic polynucleotide
atggctgccgatggttatcttccagattggctcgaggacactctctctgaaggaataagacagtggtggaagctcaaacctggcccaccaccaccaaagcccgcagagcggcatcaggacgacagcaggggtcttgtgcttcctgggtacaagtacctcggacccttcaacggactcgacaagggagagccggtcaacgaggcagacgccgcggccctcgagcacgacaaggcctacgaccggcagctcgacagcggagacaacccgtacctcaagtacaaccacgccgacgcggagtttcaggagcgtcttaaagaagatacgtcttttgggggcaacctcggacgagcagtcttccaggcgaaaaagagggttcttgaacctctgggcctggttgaggaacctgttaagacggctccgggaaaaaagaggccggtagagcattctcctgcggagccagactcctcctcgggaaccggaaaggcgggccagcagcctgcgagaaagagattgaatttcggtcagactggagacgcagactccgtacctgacccccagcctctcggacagccaccagcagccccctctggtctgggaactaatacgatggctacaggcagtggcgcaccaatggcagacaataacgagggcgccgacggagtgggtaattcctcgggaaattggcattgcgattccacatggatgggcgacagagtcatcaccaccagcacccgaacctgggccctgcccacctacaacaaccacctctacaagcaaatctccagccaatctggagcctcaaacgacaaccactactttggctacagcaccccttgggggtattttgacttcaacagattccactgtcacttctccccacgtgactggcaaagactcatcaacaacaactggggattccgacccaagagactcaacttcaagctctttaacattcaagtcaaagaggtcacgcagaatgacggtacgacgacgattgccaataaccttaccagcacggttcaagtctttactgactcggagtaccagctcccgtacgtcctcggctcggcgcatcaaggatgcctcccgccgtttccagcagacgtctccatggtgccacagtatggatacctcaccctgaacaacgggagtcaggcggtaggacgctcttccttttactgcctggagtactttccttctcagatgctgcgtaccggaaacaactttaccttcagctacacctttgaggacgttcctttccacagcagctacgctcacagccagagtttggaccggctgatgaatcctctgatcgaccagtatctgtattacttgagcaaaacaaacgctccaagcggaaccaccacgatgtccaggcttcagttttctcaggccggagcgagtgacattcgggaccagtctaggaactggcttcctggaccctgttaccgccagcagcgagtatcaaaaacagctgcggataacaacaacagtgattattcgtggactggagctaccaagtaccacctcaatggaagagactctctggtgaatccgggcccagctatggccagccacaaggacgatgaagaaaaatattttcctcagagcggggttctcatctttggaaaacaagactcgggaaaaactaatgtggacattgaaaaggtcatgattacagacgaagaggaaatcaggaccaccaatcccgtggctacggagcagtatggttctgtatctaccaacctccagagcggcaacacacaggcagccaccacagatgtcaacacacaaggcgttcttccaggcatggtctggcaggacagagacgtgtacctgcaaggacccatctgggcaaagattcctcacacggacggacactttcacccttctcccctcatgggaggatttggactcaaacaccctcctccgcaaatcctcatcaagaatacccccgtacctgcgaatccttcgaccacattcagcgcggcaaagcttgcttctttcatcacacagtactctacggggcaggtcagcgtggagattgagtgggagctgcagaaggagaacagcaaacgctggaaccccgaaatccagtacacttccaactacaacaagtctgttaatgtggactttactgtggacactaatggtgtgtattcagagcctcgccccattggcacaagatacctgactcgtaatctgtaa

SEQ ID NO: 3201 - DNA, 2208 bp, Artificial Sequence
  Description of Artificial Sequence: Synthetic polynucleotide
atggctgccgatggttatcttccagattggcccgaggacactctctctgaaggaataagacagtggtggaagctcaaacctggcccaccaccaccaaagcccgcagagcggcatcaggacgacagcaggggtcttgtgcttcctgggtacaagtacctcggacccttcaacggactcgacaagggagagccggtcaacgaggcagacgccgcggccctcgagcacgacaaggcctacgaccggcagctcgacagcggagacaacccgtacctcaagtacaaccacgccgacgcggagtttcaggagcgtcttaaagaagatacgtcttttgggggcaacctcggacgagcagtcttccaggcgaaaaagagggttcttgaacctctgggcctggttgaggaacctgttaagacggctccgggaaaaaagaggccggtagagcattctcctgcggagccagactcctcctcgggaaccggaaaggcgggccagcagcctgcgagaaagagattgaatttcggtcagactggagacgcagactccgtacctgacccccagcctctcggacagccaccagcagccccctctggtctgggaactaatacgatggctacaggcagtggcgcaccaatggcagacaataacgagggcgccgacggagtgggtaattcctcgggaaattggcattgcgattccacatggatgggcgacagagtcatcaccaccagcacccgaacctgggccctgcccacctacaacaaccacctctacaagcaaatctccagccaatctggagcctcaaacgacaaccactactttggctacagcaccccttgggggtattttgacttcaacagattccactgtcacttctccccacgtgactggcaaagactcatcaacaacaactggggattccgacccaagagactcaacttcaagctctttaacattcaagtcaaagaggtcacgcagaatgacggtacgacgacgattgccaataaccttaccagcacggttcaagtctttactgactcggagtaccagctcccgtacgtcctcggctcggcgcatcaaggatgcctcccgccgtttccagcagacgtcttcatggtgccacagtatggatacctcaccctgaacaacgggagtcaggcggtaggacgctcttccttttactgcctggagtactttccttctcagatgctgcgtaccggaaacaactttaccttcagctacacctttgaggacgttcctttccacagcagctacgctcacagccagagtttggaccggctgatgaatcctctgatcgaccagtatctgtattacttgagcaaaacaaacgctccaagcggaaccaccacgatgtccaggcttcagttttctcaggccggagcgagtgacattcgggaccagtctaggaactggcttcctggaccctgttaccgccagcagcgagtatcaaaaacagctgcggataacaacaacagtgattattcgtggactggagctaccaagtaccacctcaatggaagagactctctggtgaatccgggcccagctatggccagccacaaggacgatgaagaaaaatattttcctcagagcggggttctcatctttggaaaacaagactcgggaaaaactaatgtggacattgaaaaggtcatgattacagacgaagaggaaatcaggaccaccaatcccgtggctacggagcagtatggttctgtatctaccaacctccagagcggcaacacacaggcagccaccacagatgtcaacacacaaggcgttcttccaggcatggtctggcaggacagagacgtgtacctgcaaggacccatctgggcaaagattcctcacacggacggacactttcacccttctcccctcatgggaggatttggactcaaacaccctcctccgcaaatcctcatcaagaatacccccgtacctgcgaatccttcgaccacattcagcgcggcaaagtttgcttctttcatcacacagtactctacggggcaggtcagcgtggagattgagtgggagctgcagaaggagaacagcaaacgctggaaccccgaaatccagtacacttccaactacaacaagtctgttaatgtggactttactgtggacactaatggtgtgtattcagagcctcgccccattggcacaagatacctgactcgtaatctgtaa

SEQ ID NO: 3202 - DNA, 2208 bp, Artificial Sequence
  Description of Artificial Sequence: Synthetic polynucleotide
atggctgccgatggttatcttccagattggctcgaggacactctctctgaaggaataagacagtggtggaagctcaaacctggcccaccaccaccaaagcccgcagagcggcatcaggacgacagcaggggtcttgtgcttcctgggtacaagtacctcggacccttcaacggactcgacaagggagagccggtcaacgaggcagacgccgcggccctcgagcacgacaaggcctacgaccggcagctcgacagcggagacaacccgtacctcaagtacaaccacgccgacgcggagtttcaggagcgtcttaaagaagatacgtcttttgggggcaacctcggacgagcagtcttccaggcgaaaaagagggttcttgaacctctgggcctggttgaggaacctgttaagacggctccgggaaaaaagaggccggtagagcattctcctgcggagccagactcctcctcgggaaccggaaaggcgggccagcagcctgcgagaaagagattgaatttcggtcagactggagacgcagactccgtacctgacccccagcctctcggacagccaccagcagccccctctggtctgggaactaatacgatggctacaggcagtggcgcaccaatggcagacaataacgagggcgccgacggagtgggtaattcctcgggaaattggcattgcgattccacatggatgggcgacagagtcatcaccaccagcacccgaacctgggccctgcccacctacaacaaccacctctacaagcaaatctccagccaatctggagcctcaaacgacaaccactactttggctacagcaccccttgggggtattttgacttcaacagattccactgtcacttctccccacgtgactggcaaagactcatcaacaacaactggggattccgacccaagagactcaacttcaagctctttaacattcaagtcaaagaggtcacgcagaatgacggtacgacgacgattgccaataaccttaccagcacggttcaagtctttactgactcggagtaccagctcccgtacgtcctcggctcggcgcatcaaggatgcctcccgccgtttccagcagacgtcttcatggtgccacagtatggatacctcaccctgaacaacgggagtcaggcggtaggacgctcttccttttactgcctggagtactttccttctcagatgctgcgtaccggaaacaactttaccttcagctacacctttgaggacgttcctttccacagcagctacgctcacagccagagtttggaccggctgatgaatcctctgatcgaccagtatctgtattacttgagcaaaacaaacgctccaagcggaaccaccacgatgtccaggcttcagttttctcaggccggagcgagtgacattcgggaccagtctaggaactggcttcctggaccctgttaccgccagcagcgagtatcaaaaacagctgcggataacaacaacagtgattattcgtggactggagctaccaagtaccacctcaatggaagagactctctggtgaatccgggcccagctatggccagccacaaggacgatgaagaaaaattttttcctcagagcggggttctcatctttggaaaacaagactcgggaaaaactaatgtggacattgaaaaggtcatgattacagacgaagaggaaatcaggaccaccaatcccgtggctacggagcagtatggttctgtatctaccaacctccagagcggcaacacacaggcagccaccacagatgtcaacacacaaggcgttcttccaggcatggtctggcaggacagagacgtgtacctgcaaggacccatctgggcaaagattcctcacacggacggacactttcacccttctcccctcatgggaggatttggactcaaacaccctcctccgcaaatcctcatcaagaatacccccgtacctgcgaatccttcgaccacattcagcgcggcaaagtttgcttctttcatcacacagtactctacggggcaggtcagcgtggagattgagtgggagctgcagaaggagaacagcaaacgctggaaccccgaaatccagtacacttccaactacaacaagtctgttaatgtggactttactgtggacactaatggtgtgtattcagagcctcgccccattggcacaagatacctgactcgtaatctgtaa

SEQ ID NO: 3203 - DNA, 2208 bp, Artificial Sequence
  Description of Artificial Sequence: Synthetic polynucleotide
atggctgccgatggttatcttccagattggctcgaggacactctctctgaaggaataagacagtggtggaagctcaaacctggcccaccaccaccaaagcccgcagagcggcatcaggacgacagcaggggtcttgtgcttcctgggtacaagtacctcggacccttcaacggactcgacaagggagagccggtcaacgaggcagacgccgcggccctcgagcacgacaaggcctacgaccggcagctcgacagcggagacaacccgtacctcaagtacaaccacgccgacgcggagtttcaggagcgtcttaaagaagatacgtcttttgggggcaacctcggacgagcagtcttccaggcgaaaaagagggttcttgaacctctgggcctggttgaggaacctgttaagacggctccgggaaaaaagaggccggtagagcattctcctgcggagccagactcctcctcgggaatcggaaaggcgggccagcagcctgcgagaaagagattgaatttcggtcagactggagacgcagactccgtacctgacccccagcctctcggacagccaccagcagccccctctggtctgggaactaatacgatggctacaggcagtggcgcaccaatggcagacaataacgagggcgccgacggagtgggtaattcctcgggaaattggcattgcgattccacatggatgggcgacagagtcatcaccaccagcacccgaacctgggccctgcccacctacaacaaccacctctacaagcaaatctccagccaatctggagcctcaaacgacaaccactactttggctacagcaccccttgggggtattttgacttcaacagattccactgtcacttctccccacgtgactggcaaagactcatcaacaacaactggggattccgacccaagagactcaacttcaagctctttaacattcaagtcaaagaggtcacgcagaatgacggtacgacgacgattgccaataaccttaccagcacggttcaagtctttactgactcggagtaccagctcccgtacgtcctcggctcggcgcatcaaggatgcctcccgccgtttccagcagacgtcttcatggtgccacagtatggatacctcaccctgaacaacgggagtcaggcggtaggacgctcttccttttactgcctggagtactttccttctcagatgctgcgtaccggaaacaactttaccttcagctacacctttgaggacgttcctttccacagcagctacgctcacagccagagtttggaccggctgatgaatcctctgatcgaccagtatctgtattacttgagcaaaacaaacgctccaagcggaaccaccacgatgtccaggcttcagttttctcaggccggagcgagtgacattcgggaccagtctaggaactggcttcctggaccctgttaccgccagcagcgagtatcaaaaacagctgcggataacaacaacagtgattattcgtggactggagctaccaagtaccacctcaatggaagagactctctggtgaatccgggcccagctatggccagccacaaggacgatgaagaaaaatattttcctcagagcggggttctcatctttggaaaacaagactcgggaaaaactaatgtggacattgaaaaggtcatgattacagacgaagaggaaatcaggaccaccaatcccgtggctacggagcagtatggttctgtatctaccaacctccagagcggcaacacacaggcagccaccacagatgtcaacacacaaggcgttcttccaggcatggtctggcaggacagagacgtgtacctgcaaggacccatctgggcaaagattcctcacacggacggacactttcacccttctcccctcatgggaggatttggactcaaacaccctcctccgcaaatcctcatcaagaatacccccgtacctgcgaatccttcgaccacattcagcgcggcaaagtttgcttctttcatcacacagtactctacggggcaggtcagcgtggagattgagtgggagctgcagaaggagaacagcaaacgctggaaccccgaaatccagtacacttccaactacaacaagtctgttaatgtggactttactgtggacactaatggtgtgtattcagagcctcgccccattggcacaagatacctgactcgtaatctgtaa

SEQ ID NO: 3204 - DNA, 2208 bp, Artificial Sequence
  Description of Artificial Sequence: Synthetic polynucleotide
atggctgccgatggttatcttccagattggctcgaggacactctctctgaaggaataagacagtggtggaagctcaaacctggcccaccaccaccaaagcccgcagagcggcatcaggacgacagcaggggtcttgtgcttcctgggtacaagtacctcggacccttcaacggactcgacaagggagagccggtcaacgaggcagacgccgcggccctcgagcacgacaaggcctacgaccggcagctcgacagcggagacaacccgtacctcaagtacaaccacgccgacgcggagtttcaggagcgtcttaaagaagatacgtcttttgggggcaacctcggacgagcagtcttccaggcgaaaaagagggttcttgaacctctgggcctggttgaggaacctgttaagacggctccgggaaaaaagaggccggtagagcattctcctgcggagccagactcctcctcgggaaccggaaaggcgggccagcagcctgcgagaaagagattgaatttcggtcagactggagacgcagactccgtacctgacccccagcctctcggacagccaccagcagccccctctggtctgggaactaatacgatggctacaggcagtggcgcaccaatggcagacaataacgagggcgccgacggagtgggtaattcctcgggaaattggcattgcgattccacatggatgggcgacagagtcatcaccaccagcacccgaacctgggccctgcccacctacaacaaccacctctacaagcaaatctccagccaatctggagcctcaaacgacaaccactactttggctacagcaccccttgggggtattttgacttcaacagattccactgtcacttctccccacgtgactggcaaagactcatcaacaacaactggagattccgacccaagagactcaacttcaagctctttaacattcaagtcaaagaggtcacgcagaatgacggtacgacgacgattgccaataaccttaccagcacggttcaagtctttactgactcggagtaccagctcccgtacgtcctcggctcggcgcatcaaggatgcctcccgccgtttccagcagacgtcttcatggtgccacagtatggatacctcaccctgaacaacgggagtcaggcggtaggacgctcttccttttactgcctggagtactttccttctcagatgctgcgtaccggaaacaactttaccttcagctacacctttgaggacgttcctttccacagcagctacgctcacagccagagtttggaccggctgatgaatcctctgatcgaccagtatctgtattacttgagcaaaacaaacgctccaagcggaaccaccacgatgtccaggcttcagttttctcaggccggagcgagtgacattcgggaccagtctaggaactggcttcctggaccctgttaccgccagcagcgagtatcaaaaacagctgcggataacaacaacagtgattattcgtggactggagctaccaagtaccacctcaatggaagagactctctggtgaatccgggcccagctatggccagccacaaggacgatgaagaaaaatattttcctcagagcggggttctcatctttggaaaacaagactcgggaaaaactaatgtggacattgaaaaggtcatgattacagacgaagaggaaatcaggaccaccaatcccgtggctacggagcagtatggttctgtatctaccaacctccagagcggcaacacacaggcagccaccacagatgtcaacacacaaggcgttcttccaggcatggtctggcaggacagagacgtgtacctgcaaggacccatctgggcaaagattcctcacacggacggacactttcacccttctcccctcatgggaggatttggactcaaacaccctcctccgcaaatcctcatcaagaatacccccgtacctgcgaatccttcgaccacattcagcgcggcaaagcttgcttctttcatcacacagtactctacggggcaggtcagcgtggagattgagtgggagctgcagaaggagaacagcaaacgctggaaccccgaaatccagtacacttccaactacaacaagtctgttaatgtggactttactgtggacactaatggtgtgtattcagagcctcgccccattggcacaagatacctgactcgtaatctgtaa

SEQ ID NO: 3205 - DNA, 2208 bp, Artificial Sequence
  Description of Artificial Sequence: Synthetic polynucleotide
atggctgccgatggttatcttccagattggctcgaggacactctctctgaaggaataagacagtggtggaagctcaaacctggcccaccaccaccaaagcccgcagagcggcatcaggacgacagcaggggtcttgtgcttcctgggtacaagtacctcggacccttcaacggactcgacaagggagagccggtcaacgaggcagacgccgcggccctcgagcacgacaaggcctacgaccggcagctcgacagcggagacaacccgtacctcaagtacaaccacgccgacgcggagtttcaggagcgtcttaaagaagatacgtcttttgggggcaacctcggacgagcagtcttccaggcgaaaaagagggttcttgaacctctgggcctggttgaggaacctgttaagacggctccgggaaaaaagaggccggtagagcattctcctgcggagccagactcctcctcgggaaccggaaaggcgggccagcagcctgcgagaaagagattgaatttcggtcagactggagacgcagactccgtacctgacccccagcctctcggacagccaccagcagccccctctggtctgggaactaatacgatggctacaggcagtggcgcaccaatggcagacaataacgagggcgccgacggagtgggtaattcctcgggaaattggcattgcgattccacatggatgggcgacagagtcatcaccaccagcacccgaacctgggccctgcccacctacaacaaccacctctacaagcaaatctccagccaatctggagcctcaaacgacaaccactactttggctacagcactccttgggggtattttgacttcaacagattccactgtcacttctccccacgtgactggcaaagactcatcaacaacaactggggattccgacccaagagactcaacttcaagctctttaacattcaagtcaaagaggtcacgcagaatgacggtacgacgacgattgccaataaccttaccagcacggttcaagtctttactgactcggagtaccagctcccgtacgtcctcggctcggcgcatcaaggatgcctcccgccgtttccagcagacgtcttcatggtgccacagtatggatacctcaccctgaacaacgggagtcaggcggtaggacgctcttccttttactgcctggagtactttccttctcagatgctgcgtaccggaaacaactttaccttcagctacacctttgaggacgttcctttccacagcagctacgctcacagccagagtttggaccggctgatgaatcctctgatcgaccagtatctgtattacttgagcaaaacaaacgctccaagcggaaccaccacgatgtccaggcttcagttttctcaggccggagcgagtgacattcgggaccagtctaggaactggcttcctggaccctgttaccgccagcagcgagtatcaaaaacagctgcggataacaacaacagtgattattcgtggactggagctaccaagtaccacctcaatggaagagactctctggtgaatccgggcccagctatggccagccacaaggacgatgaagaaaaatattttcctcagagcggggttctcatctttggaaaacaagactcgggaaaaactaatgtggacattgaaaaggtcatgattacagacgaagaggaaatcaggaccaccaatcccgtggctacggagcagtatggttctgtatctaccaacctccagagcggcaacacacaggcagccaccacagatgtcaacacacaaggcgttcttccaggcatggtctggcaggacagagacgtgtacctgcaaggacccatctgggcaaagattcctcacacggacggacactttcacccttctcccctcatgggaggatttggactcaaacaccctcctccgcaaatcctcatcaagaatacccccgtacctgcgaatccttcgaccacattcagcgcggcaaagtttgcttctttcatcacacagtactctacggggcaggtcagcgtggagattgagtgggagctgcagaaggagaacagcaaacgctggaaccccgaaatccagtacacttccaactacaacaagtctgttaatgtggactttactgtggacactaatggtgtgtattcagagcctcgccccattggcacaagatacctggctcgtaatctgtaa

SEQ ID NO: 3206 - DNA, 2208 bp, Artificial Sequence
  Description of Artificial Sequence: Synthetic polynucleotide
atggctgccgatggttatcttccagattggctcgaggacactctctctgaaggaataagacagtggtggaagctcaaacctggcccaccaccaccaaagcccgcagagcggcatcaggacgacagcaggggtcttgtgcttcctgggtacaagtacctcggacccttcaacggactcgacaagggagagccggtcaacgaggcagacgccgcggccctcgagcacgacaaggcctacgaccggcagctcgacagcggagacaacccgtacctcaagtacaaccacgccgacgcggagtttcaggagcgtcttaaagaagatacgtcttttgggggcaacctcggacgagcagtcttccaggcgaaaaagagggttcttgaacctctgggcctggttgaggaacctgttaagacggctccgggaaaaaagaggccggtagagcattctcctgcggagccagactcctcctcgggaaccggaaaggcgggccagcagcctgcgaggaagagattgaatttcggtcagactggagacgcagactccgtacctgacccccagcctctcggacagccaccagcagccccctctggtctgggaactaatacgatggctacaggcagtggcgcaccaatggcagacaataacgagggcgccgacggagtgggtaattcctcgggaaattggcattgcgattccacatggatgggcgacagagtcatcaccaccagcacccgaacctgggccctgcccacctacaacaaccacctctacaagcaaatctccagccaatctggagcctcaaacgacgaccactactttggctacagcaccccttgggggtattttgacttcaacagattccactgtcacttctccccacgtgactggcaaagactcatcaacaacaactggggattccgacccaagagactcaacttcaagctctttaacattcaagtcaaagaggtcacgcagaatgacggtacgacgacgattgccaataaccttaccagcacggttcaagtctttactgactcggagtaccagctcccgtacgtcctcggctcggcgcatcaaggatgcctcccgccgtttccagcagacgtcttcatggtgccacagtatggatacctcaccctgaacaacgggagtcaggcggtaggacgctcttccttttactgcctggagtactttccttctcagatgctgcgtaccggaaacaactttaccttcagctacacctttgaggacgttcctttccacagcagctacgctcacagccagagtttggaccggctgatgaatcctctgatcgaccagtatctgtattacttgagcaaaacaaacgctccaagcggaaccaccacgatgtccaggcttcagttttctcaggccggagcgagtgacattcgggaccagtctaggaactggcttcctggaccctgttaccgccagcagcgagtatcaaaaacagctgcggataacaacaacagtgattattcgtggactggagctaccaagtaccacctcaatggaagagactctctggtgaatccgggcccagctatggccagccacaaggacgatgaagaaaaatattttcctcagagcggggttctcatctttggaaaacaagactcgggaaaaactaatgtggacattgaaaaggtcatgattacagacgaagaggaaatcaggaccaccaatcccgtggctacggagcagtatggttctgtatctaccaacctccagagcggcaacacacaggcagccaccacagatgtcaacacacaaggcgttcttccaggcatggtctggcaggacagagacgtgtacctgcaaggacccatctgggcaaagattcctcacacggacggacactttcacccttctcccctcatgggaggatttggactcaaacaccctcctccgcaaatcctcatcaagaatacccccgtacctgcgaatccttcgaccacattcagcgcggcaaagtttgcttctttcatcacacagtactctacggggcaggtcagcgtggagattgagtgggagctgcagaaggagaacagcaaacgctggaaccccgaaatccagtacacttccaactacaacaagtctgttaatgtggactttactgtggacactaatggtgtgtattcagagcctcgccccattggcacaagatacctgactcgtaatctgtaa

SEQ ID NO: 3207 - DNA, 2208 bp, Artificial Sequence
  Description of Artificial Sequence: Synthetic polynucleotide
atggctgccgatggttatcttccagattggctcgaggacactctctctgaaggaataagacagtggtggaagctcaaacctggcccaccaccaccaaagcccgcagagcggcatcaggacgacagcaggggtcttgtgcttcctgggtacaagtacctcggacccttcaacggactcgacaagggagagccggtcaacgaggcagacgccgcggccctcgagcacgacaaggcctacgaccggcagctcgacagcggagacaacccgtacctcaagtacaaccacgccgacgcggagtttcaggagcgtcttaaagaagatacgtcttttgggggcaacctcggacgagcagtcttccaggcgaaaaagggggttcttgaacctctgggcctggttgaggaacctgttaagacggctccgggaaaaaagaggccggtagagcattctcctgcggagccagactcctcctcgggaaccggaaaggcgggccagcagcctgcgagaaagagattgaatttcggtcagactggagacgcagactccgtacctgacccccagcctctcggacagccaccagcagccccctctggtctgggaactaatacgatggctacaggcagtggcgcaccaatggcagacaataacgagggcgccgacggagtgggtaattcctcgggaaattggcattgcgattccacatggatgggcgacagagtcatcaccaccagcacccgaacctgggccctgcccacctacaacaaccacctctacaagcaaatctccagccaatctggagcctcaaacgacaaccactactttggctacagcaccccttgggggtattttgacttcaacagattccactgtcacttctccccacgtgactggcaaagactcatcaacaacaactggggattccgacccaagagactcaacttcaagctctttaacattcaagtcaaagaggtcacgcagaatgacggtacgacgacgattgccaataaccttaccagcacggttcaagtctttactgactcggagtaccagctcccgtacgtcctcggctcggcgcatcaaggatgcctcccgccgtttccagcagacgtcttcatggtgccacagtatggatacctcaccctgaacaacgggagtcaggcggtaggacgctcttccttttactgcctggagtactttccttctcagatgctgcgtaccggaaacaactttaccttcagctacacctttgaggacgttcctttccacagcagctacgctcacagccagagtttggaccggctgatgaatcctctgatcgaccagtatctgtattacttgagcaaaacaaacgctccaagcggaaccaccacgatgtccaggcttcagttttctcaggccggagcgagtgacattcgggaccagtctaggaactggcttcctggaccctgttaccgccagcagcgagtatcaaaaacagctgcggataacaacaacagtgattattcgtggactggagctaccaagtaccacctcaatggaagagactctctggtgaatccgggcccagctatggccagccacaaggacgatgaagaaaaatattttcctcagagcggggttctcatctttggaaaacaagactcgggaaaaactaatgtggacattgaaaaggtcatgattacagacgaagaggaaatcaggaccaccaatcccgtggctacggagcagtatggttctgtatctaccaacctccagagcggcaacacacaggcagccaccacagatgtcaacacacaaggcgttcttccaggcatggtctggcaggacagagacgtgtacctgcaaggacccatctgggcaaagattcctcacacggacggacactttcacccttctcccctcatgggaggatttggactcaaacaccctcctccgcaaatcctcatcaagaatacccccgtacctgcgaatccttcgaccacattcagcgcggcaaagcttgcttctttcatcacacagtactctacggggcaggtcagcgtggagattgagtgggagctgcagaaggagaacagcaaacgctggaaccccgaaatccagtacacttccaactacaacaagtctgttaatgtggactttactgtggacactaatggtgtgtattcagagcctcgccccattggcacaagatacctgactcgtaatctgtaa

SEQ ID NO: 3208 - DNA, 2208 bp, Artificial Sequence
  Description of Artificial Sequence: Synthetic polynucleotide
atggctgccgatggttatcttccagattggctcgaggacactctctctgaaggaataagacagtggtggaagctcaaacctggcccaccaccaccaaagcccgcagagcggcatcaggacgacagcaggggtcttgtgcttcctgggtacaagtacctcggacccttcaacggactcgacaagggagagccggtcaacgaggcagacgccgcggccctcgagcacgacaaggcctacgaccggcagctcgacagcggagacaacccgtacctcaagtacaaccacgccgacgcggagtttcaggagcgtcttaaagaagatacgtcttttgggggcaacctcggacgagcagtcttccaggcgaaaaagagggttcttgaacctctgggcctggttgaggaacctgttaagacggctccgggaaaaaagaggccggtagagcattctcctgcggagccagactccccctcgggaaccggaaaggcgggccagcagcctgcgagaaagagattgaatttcggtcagactggagacgcagactccgtacctgacccccagcctctcggacagccaccagcagccccctctggtctgggaactaatacgatggctacaggcagtggcgcaccaatggcagacaataacgagggcgccgacggagtgggtaattcctcgggaaattggcattgcgattccacatggatgggcgacagagtcatcaccaccagcacccgaacctgggccctgcccacctacaacaaccacctctacaagcaaatctccagccaatctggagcctcaaacgacaaccactactttggctacagcaccccttgggggtattttgacttcaacagattccactgtcacttctccccacgtgactggcaaagactcatcaacaacaactggggattccgacccaagagactcaacttcaagctctttaacattcaagtcaaagaggtcacgcagaatgacggtacgacgacgattgccaataaccttaccagcacggttcaagtctttactgactcggagtaccagctcccgtacgtcctcggctcggcgcatcaaggatgcctcccgccgtttccagcagacgtcttcatggtgccacagtatggatacctcaccctgaacaacgggagtcaggcggtaggacgctcttccttttactgcctggagtactttccttctcagatgctgcgtaccggaaacaactttaccttcagctacacctttgaggacgttcctttccacagcagctacgctcacagccagagtttggaccggctgatgaatcctctgatcgaccagtatctgtattacttgagcaaaacaaacgctccaagcggaaccaccacgatgtccaggcttcagttttctcaggccggagcgagtgacattcgggaccagtctaggaactggcttcctggaccctgttaccgccagcagcgagtatcaaaaacagctgcggataacaacaacagtgattattcgtggactggagctaccaagtaccacctcaatggaagagactctctggtgaatccgggcccagctatggccagccacaaggacgatgaagaaaaatattttcctcagagcggggttctcatctttggaaaacaagactcgggaaaaactaatgtggacattgaaaaggtcatgattacagacgaagaggaaatcaggaccaccaatcccgtggctacggagcagtatggttctgtatctaccaacctccagagcggcaacacacaggcagccaccacagatgtcaacacacaaggcgttcttccaggcatggtctggcaggacagagacgtgtacctgcaaggacccatctgggcaaagattcctcacacggacggacactttcacccttctcccctcatgggaggatttggactcaaacaccctcctccgcaaatcctcatcaagaatacccccgtacctgcgaatccttcgaccacattcagcgcggcaaagtttgcttctttcatcacacagtactctacggggcaggtcagcgtggagattgagtgggagctgcagaaggagaacagcaaacgctggaaccccgaaatccagtacacttccaactacaacaagtctgttaatgtggactttactgtggacactaatggtgtgtattcagagcctcgccccattggcacaagatacctgactcgtaatctgtaa

SEQ ID NO: 3209 - DNA, 2208 bp, Artificial Sequence
  Description of Artificial Sequence: Synthetic polynucleotide
atggctgccgatggttatcttccagattggctcgaggacactctctctgaaggaataagacagtggtggaagctcaaacctggcccaccaccaccaaagcccgcagagcggcatcaggacgacagcaggggtcttgtgcttcctgggtacaagtacctcggacccttcaacggactcgacaagggagagccggtcaacgaggcagacgccgcggccctcgagcacgacaaggcctacgaccggcagctcgacagcggagacaacccgtacctcaagtacaaccacgccgacgcggagtttcaggagcgtcttaaagaagatacgtcttttgggggcaacctcggacgagcagtcttccaggcgaaaaagagggttcttgaacctctgggcctggttgaggaacctgttaagacggctccgggaaaaaagaggccggtagagcattctcctgcggagccagactcctcctcgggaaccggaaaggcgggccagcagcctgcgagaaagagattgaatttcggtcagactggagacgcagactccgtacctgacccccagcctctcggacagccaccagcagccccctctggtctgggaactaatacgatggctacaggcagtggcgcaccaatggcagacaataacgagggcgccgacggagtgggtaattcctcgggaaattggcattgcgattccacatggatgggcgacagagtcatcaccaccagcacccgaacctgggccctgcccacctacaacaaccacccctacaagcaaatctccagccaatctggagcctcaaacgacaaccactactttggctacagcaccccttgggggtattttgacttcaacagattccactgtcacttctccccacgtgactggcaaagactcatcaacaacaactggggattccgacccaagagactcaacttcaagctctttaacattcaagtcaaagaggtcacgcagaatgacggtacgacgacgattgccaataaccttaccagcacggttcaagtctttactgactcggagtaccagctcccgtacgtcctcggctcggcgcatcaaggatgcctcccgccgtttccagcagacgtcttcatggtgccacagtatggatacctcaccctgaacaacgggagtcaggcggtaggacgctcttccttttactgcctggagtactttccttctcagatgctgcgtaccggaaacaactttaccttcagctacacctttgaggacgttcctttccacagcagctacgctcacagccagagtttggaccggctgatgaatcctctgatcgaccagtatctgtattacttgagcaaaacaaacgctccaagcggaaccaccacgatgtccaggcttcagttttctcaggccggagcgagtgacattcgggaccagtctaggaactggcttcctggaccctgttaccgccagcagcgagtatcaaaaacagctgcggataacaacaacagtgattattcgtggactggagctaccaagtaccacctcaatggaagagactctctggtgaatccgggcccagctatggccagccacaaggacgatgaagaaaaatattttcctcagagcggggttctcatctttggaaaacaagactcgggaaaaactaatgtggacattgaaaaggtcatgattacagacgaagaggaaatcaggaccaccaatcccgtggctacggagcagtatggttctgtatctaccaacctccagagcggcaacacacaggcagccaccacagatgtcaacacacaaggcgttcttccaggcatggtctggcaggacagagacgtgtacctgcaaggacccatctgggcaaagattcctcacacggacggacactttcacccttctcccctcatgggaggatttggactcaaacaccctcctccgcaaatcctcatcaagaatacccccgtacctgcgaatccttcgaccacattcagcgcggcaaagtttgcttctttcatcacacagtactctacggggcaggtcagcgtggagattgagtgggagctgcagaaggagaacagcaaacgctggaaccccgaaatccagtacacttccaactacaacaagtctgttaatgtggactttactgtggacactaatggtgtgtattcagagcctcgccccattggcacaagatacctgactcgtaatctgtaa

SEQ ID NO: 3210 - DNA, 2208 bp, Artificial Sequence
  Description of Artificial Sequence: Synthetic polynucleotide
atggctgccgatggttatcttccagattggctcgaggacactctctctgaaggaataagacagtggtggaagctcaaacctggcccaccaccaccaaagcccgcagagcggcatcaggacgacagcaggggtcttgtgcttcctgggtacaagtacctcggacccttcaacggactcgacaagggagagccggtcagcgaggcagacgtcgcggccctcgagcacgacaaggcctacgaccggcagctcgacagcggagacaacccgtacctcaagtacaaccacgccgacgcggagtttcaggagcgtcttaaagaagatacgtcttttgggggcaacctcggacgagcagtcttccaggcgaaaaagagggttcttgaacctctgggcctggttgaggaacctgttaagacggctccgggaaaaaagaggccggtagagcattctcctgcggagccagactcctcctcgggaaccggaaaggcgggccagcagcctgcgagaaagagattgaatttcggtcagactggagacgcagactccgtacctgacccccagcctctcggacagccaccagcagccccctctggtctgggaactaatacgatggctacaggcagtggcgcaccaatggcagacaataacgagggcgccgacggagtgggtaattcctcgggaaattggcattgcgattccacatggatgggcgacagagtcatcaccaccagcacccgaacctgggccctgcccacctacaacaaccacctctacaagcaaatctccagccaatctggagcctcaaacgacaaccactactttggctacagcaccccttgggggtattttgacttcaacagattccactgtcacttctccccacgtgactggcaaagactcatcaacaacaactggggattccgacccaagagactcaacttcaagctctttaacattcaagtcaaagaggtcacgcagaatgacggtacgacgacgattgccaataaccttaccagcacggttcaagtctttactgactcggagtaccagctcccgtacgtcctcggctcggcgcatcaaggatgcctcccgccgtttccagcagacgtcttcatggtgccacagtatggatacctcaccctgaacaacgggagtcaggcggtaggacgctcttccttttactgcctggagtactttccttctcagatgctgcgtaccggaaacaactttaccttcagctacacctttgaggacgttcctttccacagcagctacgctcacagccagagtttggaccggctgatgaatcctctgatcgaccagtatctgtattacttgagcaaaacaaacgctccaagcggaaccaccacgatgtccaggcttcagttttctcaggccggagcgagtgacattcgggaccagtctaggaactggcttcctggaccctgttaccgccagcagcgagtatcaaaaacagctgcggataacaacaacagtgattattcgtggactggagctaccaagtaccacctcaatggaagagactctctggtgaatccgggcccagctatggccagccacaaggacgatgaagaaaaatattttcctcagagcggggttctcatctttggaaaacaagactcgggaaaaactaatgtggacattgaaaaggtcatgattacagacgaagaggaaatcaggaccaccaatcccgtggctacggagcagtatggttctgtatctaccaacctccagagcggcaacacacaggcagccaccacagatgtcaacacacaaggcgttcttccaggcatggtctggcaggacagagacgtgtacctgcaaggacccatctgggcaaagattcctcacacggacggacactttcacccttctcccctcatgggaggatttggactcaaacaccctcctccgcaaatcctcatcaagaatacccccgtacctgcgaatccttcgaccacattcagcgcggcaaagtttgcttctttcatcacacagtactctacggggcaggtcagcgtggagattgagtgggagctgcagaaggagaacagcaaacgctggaaccccgaaatccagtacacttccaactacaacaagtctgttaatgtggactttactgtggacactaatggtgtgtattcagagcctcgccccattggcacaagatacctgactcgtaatctgtaa

SEQ ID NO: 3211 - DNA, 2208 bp, Artificial Sequence
  Description of Artificial Sequence: Synthetic polynucleotide
atggctgccgatggttatcttccagattggctcgaggacactctctctgaaggaataagacagtggtggaagctcaaacctggcccaccaccaccaaagcccgcagagcggcatcaggacgacagcaggggtcttgtgcttcctgggtacaagtacctcggacccttcaacggactcgacaagggagagccggtcaacgaggcagacgccgcggccctcgagcacgacaaggcctacgaccggcagctcgacagcggagacaacccgtacctcaagtacaaccacgccgacgcggagtttcaggagcgtcttaaagaagatacgtcttttgggggcaacctcggacgagcagtcttccaggcgaaaaagagggttcttgaacctctgggcctggttgaggaacctgttaagacggctccgggaaaaaagaggccggtagagcattctcctgcggagccagactcctcctcgggaaccggaaaggcgggccagcagcctgcgagaaagagattgaatttcggtcagactggagacgcagactccgtacctgacccccagcctctcggacagccaccagcagccccctctggtctgggaactaatacgatggctacaggcagtggcgcaccaatggcagacaataacgagggcgccgacggagtgggtaattcctcgggaaattggcattgcgattccacatggatgggcgacagagtcatcaccaccagcacccgaacctgggccctgcccacctacaacaaccacctctacaagcaaatctccagccaatctggagcctcaaacgacaaccactactttggctacagcaccccttgggggtattttgacttcaacagattccactgtcacttctccccacgtgactggcaaagactcatcaacaacaactggggattccgacccaagagactcaacttcaagctctttaacattcaagtcaaagaggtcacgcagaatgacggtacgacgacgattgccaataaccttaccagcacggttcaagtctttactgactcggagtaccagctcccgtacgtcctcggctcggcgcatcaaggatgcctcccgccgtttccagcagacgtcttcatggtgccacagtatggatacctcaccctgaacaacgggagtcaggcggtaggacgctcttccttttactgcctggagtactttccttctcagatgctgcgtaccggaaacaactttaccttcagctacacctttgaggacgttcctttccacagcagctacgctcacagccagagtttggaccggctgatgaatcctctgatcgaccagtatctgtattacttgagcaaaacaaacgctccaagcggaaccaccacgatgtccaggcttcagttttctcaggccggagcgagtgacattcgggaccagtctaggaactggcttcctggaccctgttaccgccagcagcgagtatcaaaaacagctgcggataacaacaacagtgattattcgtggactggagctaccaagtaccacctcaatggaagagactctctggtgaatccgggcccagctatggccagccacaaggacgatgaagaaaaatattttcctcagagcggggttctcatctttggaaaacaagactcgggaaaaattaatgtggacattgaaaaggtcatgattacagacgaagaggaaatcaggaccaccaatcccgtggctacggagcagtatggttctgtatctaccaacctccagagcggcaacacacaggcagccaccacagatgtcaacacacaaggcgttcttccaggcatggtctggcaggacagagacgtgtacctgcaaggacccatctgggcaaagattcctcacacggacggacactttcacccttctcccctcatgggaggatttggactcaaacaccctcctccgcaaatcctcatcaagaatacccccgtacctgcgaatccttcgaccacattcagcgcggcaaagtttgcttctttcatcacacagtactctacggggcaggtcagcgtggagattgagtgggagctgcagaaggagaacagcaaacgctggaaccccgaaatccagtacacttccaactacaacaagtctgttaatgtggactttactgtggacactaatggtgtgtattcagagcctcgccccattggcacaagatacctgactcgtaatctgtaa

SEQ ID NO: 3212 - DNA, 2208 bp, Artificial Sequence
  Description of Artificial Sequence: Synthetic polynucleotide
atggctgccgatggttatcttccagattggctcgaggacactctctctgaaggaataagacagtggtggaagctcaaacctggcccaccaccactaaagcccgcagagcggcatcaggacgacagcaggggtcttgtgcttcctgggtacaagtacctcggacccttcaacggactcgacaagggagagccggtcaacgaggcagacgccgcggccctcgagcacgacaaggcctacgaccggcagctcgacagcggagacaacccgtacctcaagtacaaccacgccgacgcggagtttcaggagcgtcttaaagaagatacgtcttttgggggcaacctcggacgagcagtcttccaggcgaaaaagagggttcttgaacctctgggcctggttgaggaacctgttaagacggctccgggaaaaaagaggccggtagagcattctcctgcggagccagactcctcctcgggaaccggaaaggcgggccagcagcctgcgagaaagagattgaatttcggtcagactggagacgcagactccgtacctgacccccagcctctcggacagccaccagcagccccctctggtctgggaactaatacgatggctacaggcagtggcgcaccaatggcagacaataacgagggcgccgacggagtgggtaattcctcgggaaattggcattgcgattccacatggatgggcgacagagtcatcaccaccagcacccgaacctgggccctgcccacctacaacaaccacctctacaagcaaatctccagccaatctggagcctcaaacgacaaccactactttggctacagcaccccttgggggtattttgacttcaacagattccactgtcacttctccccacgtgactggcaaagactcatcaacaacaactggggattccgacccaagagactcaacttcaagctctttaacattcaagtcaaagaggtcacgcagaatgacggtacgacgacgattgccaataaccttaccagcacggttcaagtctttactgactcggagtaccagctcccgtacgtcctcggctcggcgcatcaaggatgcctcccgccgtttccagcagacgtcttcatggtgccacagtatggatacctcaccctgaacaacgggagtcaggcggtaggacgctcttccttttactgcctggagtactttccttctcagatgctgcgtaccggaaacaactttaccttcagctacacctttgaggacgttcctttccacagcagctacgctcacagccagagtttggaccggctgatgaatcctctgatcgaccagtatctgtattacttgagcaaaacaaacgctccaagcggaaccaccacgatgtccaggcttcagttttctcaggccggagcgagtgacattcgggaccagtctaggagctggcttcctggaccctgttaccgccagcagcgagtatcaaaaacagctgcggataacaacaacagtgattattcgtggactggagctaccaagtaccacctcaatggaagagactctctggtgaatccgggcccagctatggccagccacaaggacgatgaagaaaaatattttcctcagagcggggttctcatctttggaaaacaagactcgggaaaaactaatgtggacattgaaaaggtcatgattacagacgaagaggaaatcaggaccaccaatcccgtggctacggagcagtatggttctgtatctaccaacctccagagcggcaacacacaggcagccaccacagatgtcaacacacaaggcgttcttccaggcatggtctggcaggacagagacgtgtacctgcaaggacccatctgggcaaagattcctcacacggacggacactttcacccttctcccctcatgggaggatttggactcaaacaccctcctccgcaaatcctcatcaagaatacccccgtacctgcgaatccttcgaccacattcagcgcggcaaagtttgcttctttcatcacacagtactctacggggcaggtcagcgtggagattgagtgggagctgcagaaggagaacagcaaacgctggaaccccgaaatccagtacacttccaactacaacaagtctgttaatgtggactttactgtggacactaatggtgtgtattcagagcctcgccccattggcacaagatacctgactcgtaatctgtaa

SEQ ID NO: 3213 - DNA, 2208 bp, Artificial Sequence
  Description of Artificial Sequence: Synthetic polynucleotide
atggctgccgatggttatcttccagattggctcgaggacactctctctgaaggaataagacagtggtggaagctcaaacctggcccaccaccaccaaagcccgcagagcggcatcaggacgacagcaggggtcttgtgcttcctgggtacaagtacctcggacccttcaacggactcgacaagggagagccggtcaacgaggcagacgccgcggccctcgagcacgacaaggcctacgaccggcagctcgacagcggagacaacccgtacctcaagtacaaccacgccgacgcggagtttcaggagcgtcttaaagaagatacgtcttttgggggcaacctcggacgagcagtcttccaggcgaaaaagagggttcttgaacctctaggcctggttgaggaacctgttaagacggctccgggaaaaaagaggccggtagagcattctcctgcggagccagactcctcctcgggaaccggaaaggcgggccagcagcctgcgagaaagagattgaatttcggtcagactggagacgcagactccgtacctgacccccagcctctcggacagccaccagcagccccctctggtctgggaactaatacgatggctacaggcagtggcgcaccaatggcagacaataacgagggcgccgacggagtgggtaattcctcgggaaattggcattgcgattccacatggatgggcgacagagtcatcaccaccagcacccgaacctgggccctgcccacctacaacaaccacctctacaagcaaatctccagccaatctggagcctcaaacgacaaccactactttggctacagcaccccttgggggtattttgacttcaacagattccactgtcacttctccccacgtgactggcaaagactcatcaacaacaactggggattccgacccaagagactcaacttcaagctctttaacattcaagtcaaagaggtcacgcagaatgacggtacgacgacgattgccaataaccttaccagcacggttcaagtctttactgactcggagtaccagctcccgtacgtcctcggctcggcgcatcaaggatgcctcccgccgtttccagcagacgtcttcatggtgccacagtatggatacctcaccctgaacaacgggagtcaggcggtaggacgctcttccttttactgcctggagtactttccttctcagatgctgcgtaccggaaacaactttaccttcagctacacctttgaggacgttcctttccacagcagctacgctcacagccagagtttggaccggctgatgaatcctctgatcgaccagtatctgtattacttgagcaaaacaaacgctccaagcggaaccaccacgatgtccaggcttcagttttctcaggccggagcgagtgacattcgggaccagtctaggaactggcttcctggaccctgttaccgccagcagcgagtatcaaaaacagctgcggataacaacaacagtgattattcgtggactggagctaccaagtaccacctcaatggaagagactctctggtgaatccgggcccagctatggccagccacaaggacgatgaagaaaaatattttcctcagagcggggttctcatctttggaaaacaagactcgggaaaaactaatgtggacattgaaaaggtcatgattacagacgaagaggaaatcgggaccaccaatcccgtggctacggagcagtatggttctgtatctaccaacctccagagcggcaacacacaggcagccaccacagatgtcaacacacaaggcgttcttccaggcatggtctggcaggacagagacgtgtacctgcaaggacccatctgggcaaagattcctcacacggacggacactttcacccttctcccctcatgggaggatttggactcaaacaccctcctccgcaaatcctcatcaagaatacccccgtacctgcgaatccttcgaccacattcagcgcggcaaagtttgcttctttcatcacacagtactctacggggcaggtcagcgtggagattgagtgggagctgcagaaggagaacagcaaacgctggaaccccgaaatccagtacacttccaactacaacaagtctgttaatgtggactttactgtggacactaatggtgtgtattcagagcctcgccccattggcacaagatacctgactcgtaatctgtaa

SEQ ID NO: 3214 - DNA, 2208 bp, Artificial Sequence
  Description of Artificial Sequence: Synthetic polynucleotide
atggctgccgatggttatcttccagattggctcgaggacactctctctgaaggaataagacagtggtggaagctcaaacctggcccaccaccaccaaagcccgcagagcggcatcaggacgacagcaggggtcttgtgcttcctgggtacaagtacctcggacccttcaacggactcgacaagggagagccggtcaacgaggcagacgccgcggccctcgagcacgacaaggcctacgaccggcagctcgacagcggagacaacccgtacctcaagtacaaccacgccgacgcggagtttcaggagcgtcttaaagaagatacgtcttttgggggcaacctcggacgagcagtcttccaggcgaaaaagagggttcttgaacctctgggcctggttgaggaacctgttaagacggctccgggaaaaaagaggccggtagagcattctcctgcggagccagactcctcctcgggaaccggaaaggcgggccagcagcctgcgagaaagagattgaatttcggtcagactggagacgcagactccgtacctgacccccagcctctcggacagccaccagcagccccctctggtctgggaactaatacgatggctacaggcagtggcgcaccaatggcagacaataacgagggcgccgacggagtgggtaattcctcgggaaattggcattgcgattccacatggatgggcgacagagtcatcaccaccagcacccgaacctgggccctgcccacctacaacaaccacctctacaagcaaatctccagccaatctggagcctcaaacgacaaccactactttggctacagcaccccttgggggtattttgacttcaacagattccactgtcacttctccccacgtgactggcaaagactcatcaacaacaactggggattccgacccaagagactcaacttcaagctctttaacattcaagtcaaagaggtcacgcagaatgacggtacgacgacgattgccaataaccttaccagcacggttcaagtctttactgactcggagtaccggctcccgtacgtcctcggctcggcgcatcaaggatgcctcccgccgtttccagcagacgtcttcatggtgccacagtatggatacctcaccctgaacaacgggagtcaggcggtaggacgctcttccttttactgcctggagtactttccttctcagatgctgcgtaccggaaacaactttaccttcagctacacctttgaggacgttcctttccacagcagctacgctcacagccagagtttggaccggctgatgaatcctctgatcgaccagtatctgtattacttgagcaaaacaaacgctccaagcggaaccaccacgatgtccaggcttcagttttctcaggccggagcgagtgacattcgggaccagtctaggaactggcttcctggaccctgttaccgccagcagcgagtatcaaaaacagctgcggataacaacaacagtgattattcgtggactggagctaccaagtaccacctcaatggaagagactctctggtgaatccgggcccagctatggccagccacaaggacgatgaagaaaaatattttcctcagagcggggttctcatctttggaaaacaagactcgggaaaaactaatgtggacattgaaaaggtcatgattacagacgaagaggaaatcaggaccaccaatcccgtggctacggagcagtatggttctgtatctaccaacctccagagcggcaacacacaggcagccaccacagatgtcaacacacaaggcgttcttccaggcatggtctggcaggacagagacgtgtacctgcaaggacccatctgggcaaagattcctcacacggacggacactttcacccttctcccctcatgggaggatttggactcaaacaccctcctccgcaaatcctcatcaagaatacccccgtacctgcgaatccttcgaccacattcagcgcggcaaagtttgcttctttcatcacacagtactctacggggcaggtcagcgtggagattgagtgggagctgcagaaggagaacagcaaacgctggaaccccgaaatccagtacacttccaactacaacaagtctgttaatgtggactttactgtggacactaatggtgtgtattcagagcctcgccccattggcacaagatacctgactcgtaatctgtaa

SEQ ID NO: 3215 - DNA, 2208 bp, Artificial Sequence
  Description of Artificial Sequence: Synthetic polynucleotide
atggctgccgatggttatcttccagattggctcgaggacactctctctgaaggaataagacagtggtggaagctcaaacctggcccaccaccaccaaagcccgcagagcggcatcaggacgacagcaggggtcttgtgcttcctgggtacaagtacctcggacccttcaacggactcgacaagggagagccggtcaacgaggcagacgccgcggccctcgagcacgacaaggcctacgaccggcagctcgacagcggagacaacccgtacctcaagtacaaccacgccgacgcggagtttcaggagcgtcttaaagaagatacgtcttttgggggcaacctcggacgagcagtcttccaggcgaaaaagagggttcttgaacctctgggcctggttgaggaacctgttaagacggctccgggaaaaaagaggccggtagagcattctcctgcggagccagactcctcctcgggaaccggaaaggcgggccagcagcctgcgagaaagagattgaatttcggtcagactggagacgcagactccgtacctgacccccagcctctcggacagccaccagcagccccctctggtctgggaactaatacgatggctacaggcagtggcgcaccaatggcagacaataacgagggcgccgacggagtgggtaattcctcgggaaattggcattgcgattccacatggatgggcgacagagtcatcaccaccagcacccgaacctgggccctgcccacctacaacaaccacctctacaagcaaatctccagccaatctggagcctcaaacgacaaccactactttggctacagcaccccttgggggtattttgacttcaacagattccactgtcacttctccccacgtgactggcaaagactcatcaacaacaactggggattccgacccaagagactcaacttcaagctctttaacattcaagtcaaagaggtcacgcagaatgacggtacgacgacgattgccaataaccttaccagcacggttcaagtctttactgactcggagtaccagctcccgtacgtcctcggctcggcgcatcaaggatgcctcccgccgtttccagcagacgtcttcatggtgccacagtatggatacctcaccctgaacaacgggagtcaggcggtaggacgctcttccttttactgcctggagtactttccttctcagatgctgcgtaccgggaacaactttaccttcagctacacctttgaggacgttcctttccacagcagctacgctcacagccagagtttggaccggctgatgaatcctctgatcgaccagtatctgtattacttgagcaaaacaaacgctccaagcggaaccaccacgatgtccaggcttcagttttctcaggccggagcgagtgacattcgggaccagtctaggaactggcttcctggaccctgttaccgccagcagcgagtatcaaaaacagctgcggataacaacaacagtgattattcgtggactggagctaccaagtaccacctcaatggaagagactctctggtgaatccgggcccagctatggccagccacaaggacgatgaagaaaaatattttcctcagagcggggttctcatctttggaaaacaggactcgggaaaaaccaatgtggacattgaaaaggtcatgattacagacgaagaggaaatcaggaccaccaatcccgtggctacggagcagtatggttctgtatctaccaacctccagagcggcaacacacaggcagccaccacagatgtcaacacacaaggcgttcttccaggcatggtctggcaggacagagacgtgtacctgcaaggacccatctgggcaaagattcctcacacggacggacactttcacccttctcccctcatgggaggatttggactcaaacaccctcctccgcaaatcctcatcaagaatacccccgtacctgcgaatccttcgaccacattcagcgcggcaaagtttgcttctttcatcacacagtactctacggggcaggtcagcgtggagattgagtgggagctgcagaaggagaacagcaaacgctggaaccccaaaatccagtacacttccaactacaacaagtctgttaatgtggactttactgtggacactaatggtgtgtattcagagcctcgccccattggcacaagatacctgactcgtaatctgtaa

SEQ ID NO: 3216 - DNA, 2208 bp, Artificial Sequence
  Description of Artificial Sequence: Synthetic polynucleotide
atggctgccgatggttatcttccagattggctcgaggacactctctctgaaggaataagacagtggtggaagctcaaacctggcccaccaccaccaaagcccgcagagcggcatcaggacgacagcaggggtcttgtgcttcctgggtacaagtacctcggacccttcaacggactcgacaagggagagccggtcaacgaggcagacgccgcggccctcgagcacgacaaggcctacgaccggcagctcgacagcggagacaacccgtacctcaagtacaaccacgccgacgcggagtctcaggagcgtcttaaagaagatacgtcttttgggggcaacctcggacgagcagtcttccaggcgaaaaagagggttcttgaacctctgggcctggttgaggaacctgttaagacggctccgggaaaaaagaggccggtagagcattctcctgcggagccagactcctcctcgggaaccggaaaggcgggccagcagcctgcgagaaagagattgaatttcggtcagactggagacgcagactccgtacctgacccccagcctctcggacagccaccagcagccccctctggtctgggaactaatacgatggctacaggcagtggcgcaccaatggcagacaataacgagggcgccgacggagtgggtaattcctcgggaaattggcattgcgattccacatggatgggcgacagagtcatcaccaccagcacccgaacctgggccctgcccacctacaacaaccacctctacaagcaaatctccagccaatctggagcctcaaacgacaaccactactttggctacagcaccccttgggggtattttgacttcaacagattccactgtcacttctccccacgtgactggcaaagactcatcaacaacaactggggattccgacccaagagactcaacttcaagctctttaacattcaagtcaaagaggtcacgcagaatgacggtacgacgacgattgccaataaccttaccagcacggttcaagtctttactgactcggagtaccagctcccgtacgtcctcggctcggcgcatcaaggatgcctcccgccgtttccagcagacgtcttcatggtgccacagtatggatacctcaccctgaacaacgggagtcaggcggtaggacgctcttccttttactgcctggagtactttccttctcagatgctgcgtaccggaaacaactttaccttcagctacacctttgaggacgttcctttccacagcagctacgctcacagccagagtttggaccggctgatgaatcctctgatcgaccagtatctgtattacttgagcaaaacaaacgctccaagcggaaccaccacgatgtccaggcttcagttttctcaggccggagcgagtgacattcgggaccagtctaggaactggcttcctggaccctgttaccgccagcagcgagtatcaaaaacagctgcggataacaacaacagtgattattcgtggactggagctaccaagtaccacctcaatggaagagactctctggtgaatccgggcccagctatggccagccacaaggacgatgaagaaaaatattttcctcagagcggggttctcatctttggaaaacaagactcgggaaaaactaatgtggacattgaaaaggtcatgattacagacgaagaggaaatcaggaccaccaatcccgtggctacggagcagtatggttctgtatctaccaacctccagagcggcaacacacaggcagccaccacagatgtcaacacacaaggcgttcttccaggcatggtctggcaggacagagacgtgtacctgcaaggacccatctgggcaaagattcctcacacggacggacactttcacccttctcccctcatgggaggatttggactcaaacaccctcctccgcaaatcctcatcaagaatacccccgtacctgcgaatccttcgaccacattcagcgcggcaaagtttgcttctttcatcacacagtactctacggggcaggtcagcgtggagattgagtgggagctgcagaaggagaacagcaaacgctggaaccccgaaatccagtacacttccaactacaacaagtctgttaatgtggactttactgtggacactaatggtgtgtattcagagcctcgccccattggcacaagatacctgactcgtaatctgtaa

SEQ ID NO: 3217 - DNA, 2208 bp, Artificial Sequence
  Description of Artificial Sequence: Synthetic polynucleotide
atggctgccgatggttatcttccagattggctcgaggacactctctctgaaggaataagacagtggtggaagctcaaacctggcccaccaccaccaaagcccgcagagcggcatcaggacgacagcaggggtcttgtgcttcctgggtacaagtacctcggacccttcaacggactcgacaagggagagccggtcaacgaggcagacgccgcggccctcgagcacgacaaggcctacgaccggcagctcgacagcggagacaacccgtacctcaagtacaaccacgccgacgcggagtttcaggagcgtcttaaagaagatacgtcttttgggggcaacctcggacgagcagtcttccaggcgaaaaagagggttcttgaacctctgggcctggttgaggaacctgttaagacggctccgggaaaaaagaggccggtagagcattctcctgcggagccagactcctcctcgggaaccggaaaggcgggccagcagcctgcgagaaagagattgaatttcggtcagactggagacgcagactccgtacctgacccccagcctctcggacagccaccagcagccccctctggtctgggaactaatacgatggctacaggcagtggcgcaccaacggcagacaataacgagggcgccgacggagtgggtaattcctcgggaaattggcattgcgattccacatggatgggcgacagagtcatcaccaccagcacccgaacctgggccctgcccacctacaacaaccacctctacaagcaaatctccagccaatctggagcctcaaacgacaaccactactttggctacagcaccccttgggggtattttgacttcaacagattccactgtcacttctccccacgtgactggcaaagactcatcaacaacaactggggattccgacccaagagactcaacttcaagctctttaacattcaagtcaaagaggtcacgcagaatgacggtacgacgacgattgccaataaccttaccagcacggttcaagtctttactgactcggagtaccagctcccgtacgtcctcggctcggcgcatcaaggatgcctcccgccgtttccagcagacgtcttcatggtgccacagtatggatacctcaccctgaacaacgggagtcaggcggtaggacgctcttccttttactgcctggagtactttccttctcagatgctgcgtaccggaaacaactttaccttcagctacacctttgaggacgttcctttccacagcagctacgctcacagccagagtttggaccggctgatgaatcctctgatcgaccagtatctgtattacttgagcaaaacaaacgctccaagcggaaccaccacgatgtccaggcttcagttttctcaggccggagcgagtgacattcgggaccagtctaggaactggcttcctggaccctgttaccgccagcagcgagtatcaaaaacagctgcggataacaacaacagtgattattcgtggactggagctaccaagtaccacctcaatggaagagactctctggtgaatccgggcccagctatggccagccacaaggacgatgaagaaaaatattttcctcagagcggggttctcatctttggaaaacaagactcgggaaaaactaatgtggacattgaaaaggtcatgattacagacgaagaggaaatcaggaccaccaatcccgtggctacggagcagtatggttctgtatctaccaacctccagagcggcaacacacaggcagccaccacagatgtcaacacacaaggcgttcttccaggcatggtctggcaggacagagacgtgtacctgcaaggacccatctgggcaaagattcctcacacggacggacactttcacccttctcccctcatgggaggatttggactcaaacaccctcctccgcaaatcctcatcaagaatacccccgtacctgcgaatccttcgaccacattcagcgcggcaaagtttgcttctttcatcacacagtactctacggggcaggtcagcgtggagattgagtgggagctgcagaaggagaacagcaaacgctggaaccccgaaatccagtacacttccaactacaacaagtctgttaatgtggactttactgtggacactaatggtgtgtattcagagcctcgccccattggcacaagatacctgactcgtaatctgtaa

SEQ ID NO: 3218 - DNA, 2208 bp, Artificial Sequence
  Description of Artificial Sequence: Synthetic polynucleotide
atggctgccgatggttatcttccagattggctcgaggacactctctctgaaggaataagacagtggtggaagctcaaacctggcccaccaccaccaaagcccgcagagcggcatcaggacgacagcaggggtcttgtgcttcctgggtacaagtacctcggacccttcaacggactcgacaagggagagccggtcaacgaggcagacgccgcggccctcgagcacgacaaggcctacgaccggcagctcgacagcggagacaacccgtacctcaagtacaaccacgccgacgcggagtttcaggagcgtcttaaagaagatacgtcttttgggggcaacctcggacgagcagtcttccaggcgaaaaagagggttcttgaacctctgggcctggttgaggaacctgttaagacggctccgggaaaaaagaggccggtagagcattctcctgcggagccagacgcctcctcgggaaccggaaaggcgggccagcagcctgcgagaaagagattgaatttcggtcagactggagacgcagactccgtacctgacccccagcctctcggacagccaccagcagccccctctggtctgggaactaatacgatggctacaggcagtggcgcaccaatggcagacaataacgagggcgccgacggagtgggtaattcctcgggaaattggcattgcgattccacatggatgggcgacagagtcatcaccaccagcacccgaacctgggccctgcccacctacaacaaccacctctacaagcaaatctccagccaatctggagcctcaaacgacaaccactactttggctacagcaccccttgggggtattttgacttcaacagattccactgtcacttctccccacgtgactggcaaagactcatcaacaacaactggggattccgacccaagagactcaacttcaagctctttaacattcaagtcaaagaggtcacgcagaatgacggtacgacgacgattgccaataaccttaccagcacggttcaagtctttactgactcggagtaccagctcccgtacgtcctcggctcggcgcatcaaggatgcctcccgccgtttccagcagacgtcttcatggtgccacagtatggatacctcaccctgaacaacgggagtcaggcggtaggacgctcttccttttactgcccggagtactttccttctcagatgctgcgtaccggaaacaactttaccttcagctacacctttgaggacgttcctttccacagcagctacgctcacagccagagtttggaccggctgatgaatcctctgatcgaccagtatctgtattacttgagcaaaacaaacgctccaagcggaaccaccacgatgtccaggcttcagttttctcaggccggagcgagtgacattcgggaccagtctaggaactggcttcctggaccctgttaccgccagcagcgagtatcaaaaacagctgcggataacaacaacagtgattattcgtggactggagctaccaagtaccacctcaatggaagagactctctggtgaatccgggcccagctatggccagccacaaggacgatgaagaaaaatattttcctcagagcggggttctcatctttggaaaacaagactcgggaaaaactaatgtggacattgaaaaggtcatgattacagacgaagaggaaatcaggaccaccaatcccgtggctacggagcagtatggttctgtatctaccaacctccagagcggcaacacacaggcagccaccacagatgtcaacacacaaggcgttcttccaggcatggtctggcaggacagagacgtgtacctgcaaggacccatctgggcaaagattcctcacacggacggacactttcacccttctcccctcatgggaggatttggactcaaacaccctcctccgcaaatcctcatcaagaatacccccgtacctgcgaatccttcgaccacattcagcgcggcaaagtttgcttctttcatcacacagtactctacggggcaggtcagcgtggagattgagtgggagctgcagaaggagaacagcaaacgctggaaccccgaaatccagtacacttccaactacaacaagtctgttaatgtggactttactgtggacactaatggtgtgtattcagagcctcgccccattggcacaagatacctgactcgtaatctgtaa

SEQ ID NO: 3219 - DNA, 2208 bp, Artificial Sequence
  Description of Artificial Sequence: Synthetic polynucleotide
atggctgccgatggttatcttccagattggctcgaggacactctctctgaaggaataagacagtggtggaagctcaaacctggcccaccaccaccaaagcccgcagagcggcatcaggacgacagcaggggtcttgtgcttcctgggtacaagtacctcggacccttcaacggactcgacaagggagagccggtcaacgaggcagacgccgcggccctcgagcacgacaaggcctacgaccggcagctcgacagcggagacaacccgtacctcaagtacaaccacgccgacgcggagtttcaggagcgtcttaaagaagatacgtcttttgggggcaacctcggacgagcagtcttccaggcgaaaaagagggttcttgaacctctgggcctggttgaggaacctgttaagacggctccgggaaaaaagaggccggtagagcattctcctgcggagccagactcctcctcgggaaccggaaaggcgggccagcagcctgcgagaaagagattgaatttcggtcagactggagacgcagactccgtacctgacccccagcctctcggacagccaccagcagccccctctggtctgggaactaatacgatggctacaggcagtggcgcaccaatggcagacaataacgagggcgccgacggagtgggtaattcctcgggaaattggcattgcgattccacatggatgggcgacagagtcatcaccaccagcacccgaacctgggccctgcccacctacaacaaccacctctacaagcaaatctccagccaatctggagcctcaaacgacaaccactactttggctacagcaccccttgggggtattttgacttcaacagattccactgtcacttctccccacgtgactggcaaagactcatcaacaacaactggggactccgacccaagagactcaacttcaagctctttaacattcaagtcaaagaggtcacgcagaatgacggtacgacgacgattgccaataaccttaccagcacggttcaagtctttactgactcggagtaccagctcccgtacgtcctcggctcggcgcatcaaggatgcctcccgccgtttccagcagacgtcttcatggtgccacagtatggatacctcaccctgaacaacgggagtcaggcggtaggacgctcttccttttactgcctggagtactttccttctcagatgctgcgtaccggaaacaactttaccttcagctacacctttgaggacgttcctttccacagcagctacgctcacagccagagtttggaccggctgatgaatcctctgatcgaccagtatctgtattacttgagcaaaacaaacgctccaagcggaaccaccacgatgtccaggcttcagttttctcaggccggagcgagtgacattcgggaccagtctaggaactggcttcctggaccctgttaccgccagcagcgagtatcaaaaacagctgcggataacaacaacagtgattattcgtggactggagctaccaagtaccacctcaatggaagagactctctggtgaatccgggcccagctatggccagccacaaggacgatgaagaaaaatattttcctcagagcggggttctcatctttggaaaacaagactcgggaaaaactaatgtggacattgaaaaggtcatgattacagacgaagaggaaatcaggaccaccaatcccgtggctacggagcagtatggttctgtatctaccaacctccagagcggcaacacacaggcagccaccacagatgtcaacacacaaggcgttcttccaggcatggtctggcaggacagagacgtgtacctgcaaggacccatctgggcaaagattcctcacacggacggacactttcacccttctcccctcatgggaggatttggactcaaacaccctcctccgcaaatcctcatcaagaatacccccgtacctgcgaatccttcgaccacattcagcgcggcaaagtttgcttctttcatcacacagtactctacggggcaggtcagcgtggagattgagtgggagctgcagaaggagaacagcaaacgctggaaccccgaaatccagtacacttccaactacaacaagtctgttaatgtggactttactgtggacactaatggtgtgtattcagagcctcgccccattggcacaagatacctgactcgtaatctgtaa

SEQ ID NO: 3220 - DNA, 2208 bp, Artificial Sequence
  Description of Artificial Sequence: Synthetic polynucleotide
atggctgccgatggttatcttccagattggctcgaggacactctctctgaaggaataagacagtggtggaagctcaaacctggcccaccaccaccaaagcccgcagagcggcatcaggacgacagcaggggtcttgtgcttcctgggtacaagtacctcggacccttcaacggactcgacaagggagagccggtcaacgaggcagacgccgcggccctcgagcacgacaaggcctacgaccggcagctcgacagcggagacaacccgtacctcaagtacaaccacgccgacgcggagtttcaggagcgtcttaaagaagatacgtcttttgggggcaacctcggacgagcagtcttccaggcgaaaaagagggttcttgaacctctgggcctggttgaggaacctgttaagacggctccgggaaaaaagaggccggtagagcattttcctgcggagccagactcctcctcgggaaccggaaaggcgggccagcagcctgcgagaaagagattgaatttcggtcagactggagacgcagactccgtacctgacccccagcctctcggacagccaccagcagccccctctggtctgggaactaatacgatggctacaggcagtggcgcaccaatggcagacaataacgagggcgccgacggagtgggtaattcctcgggaaattggcattgcgattccacatggatgggcgacagagtcatcaccaccagcacccgaacctgggccctgcccacctacaacaaccacctctacaagcaaatctccagccaatctggagcctcaaacgacaaccactactttggctacagcaccccttgggggtattttgacttcaacagattccactgtcacttctccccacgtgactggcaaagactcatcaacaacaactggggattccgacccaagagactcaacttcaagctctttaacattcaagtcaaagaggtcacgcagaatgacggtacgacgacgattgccaataaccttaccagcacggttcaagtctttactgactcggagtaccagctcccgtacgtcctcggctcggcgcatcaaggatgcctcccgccgtttccagcagacgtcttcatggtgccacagtatggatacctcaccctgaacaacgggagtcaggcggtaggacgctcttccttttactgcctggagtactttccttctcagatgctgcgtaccggaaacaactttaccttcagctacacctttgaggacgttcctttccacagcagctacgctcacagccagagtttggaccggctgatgaatcctctgatcgaccagtatctgtattacttgagcaaaacaaacgctccaagcggaaccaccacgatgtccaggcttcagttttctcaggccggagcgagtgacattcgggaccagtctaggaactggcttcctggaccctgttaccgccagcagcgagtatcaaaaacagctgcggataacaacaacagtgattattcgtggactggagctaccaagtaccacctcaatggaagagactctctggtgaatccgggcccagctatggccagccacaaggacgatgaagaaaaatattttcctcagagcggggttctcatcttcggaaaacaagactcgggaaaaactaatgtggacattgaaaaggtcatgattacagacgaagaggaaatcaggaccaccaatcccgtggctacggagcagtatggttctgtatctaccaacctccagagcggcaacacacaggcagccaccacagatgtcaacacacaaggcgttcttccaggcatggtctggcaggacagagacgtgtacctgcaaggacccatctgggcaaagattcctcacacggacggacactttcacccttctcccctcatgggaggatttggactcaaacaccctcctccgcaaatcctcatcaagaatacccccgtacctgcgaatccttcgaccacattcagcgcggcaaagtttgcttctttcatcacacagtactctacggggcaggtcagcgtggagattgagtgggagctgcagaaggagaacagcaaacgctggaaccccgaaatccagtacacttccaactacaacaagtctgttaatgtggactttactgtggacactaatggtgtgtattcagagcctcgccccattggcacaagatacctgactcgtaatctgtaa

SEQ ID NO: 3221 - DNA, 2208 bp, Artificial Sequence
  Description of Artificial Sequence: Synthetic polynucleotide
atggctgccgatggttatcttccagattggctcaaggacactctctctgaaggaataagacagtggtggaagctcaaacctggcccaccaccaccaaagcccgcagagcggcatcaggacgacagcaggggtcttgtgcttcctgggtacaagtacctcggacccttcaacggactcgacaagggagagccggtcaacgaggcagacgccgcggccctcgagcacgacaaggcctacgaccggcagctcgacagcggagacaacccgtacctcaagtacaaccacgccgacgcggagtttcaggagcgtcttaaagaagatacgtcttttgggggcaacctcggacgagcagtcttccaggcgaaaaagagggttcttgaacctctgggcctggttgaggaacctgttaagacggctccgggaaaaaagaggccggtagagcattctcctgcggagccagactcctcctcgggaaccggaaaggcgggccagcagcctgcgagaaagagattgaatttcggtcagactggagacgcagactccgtacctgacccccagcctctcggacagccaccagcagccccctctggtctgggaactaatacgatggctacaggcagtggcgcaccaatggcagacaataacgagggcgccgacggagtgggtaattcctcgggaaattggcattgcgattccacatggatgggcgacagagtcatcaccaccagcacccgaacctgggccctgcccacctacaacaaccacctctacaagcaaatctccagccaatctggagcctcaaacgacaaccactactttggctacagcaccccttgggggtattttgacttcaacagattccactgtcacttctccccacgtgactggcaaagactcatcaacaacaactggggattccgacccaagagactcaacttcaagctctttaacattcaagtcaaagaggtcacgcagaatgacggtacgacgacgattgccaataaccttaccagcacggttcaagtctttactgactcggagtaccagctcccgtacgtcctcggctcggcgcatcaaggatgcctcccgccgtttccagcagacgtcttcatggtgccacagtatggatacctcaccctgaacaacgggagtcaggcggtaggacgctcttccttttactgcctggagtactttccttctcagatgctgcgtaccggaaacaactttaccttcagctacacctttgaggacgttcctttccacagcagctacgctcacagccagagtttggaccggctgatgaatcctctgatcgaccagtatctgtattacttgagcaaaacaaacgctccaagcggaaccaccacgatgtccaggcttcagttttctcaggccggagcgagtgacattcgggaccagtctaggaactggcttcctggaccctgttaccgccagcagcgagtatcaaaaacagctgcggataacaacaacagtgattattcgtggactggagctaccaagtaccacctcaatggaagagactctctggtgaatccgggcccagctatggccagccacaaggacgatgaagaaaaatattttcctcagagcggggttctcatctttggaaaacaagactcgggaaaaaccaatgtggacattgaaaaggtcatgattacagacgaagaggaaatcaggaccaccaatcccgtggctacggagcagtatggttctgtatctaccaacctccagagcggcaacacacaggcagccaccacagatgtcaacacacaaggcgttcttccaggcatggtctggcaggacagagacgtgtacctgcaaggacccatctgggcaaagattcctcacacggacggacactttcacccttctcccctcatgggaggatttggactcaaacaccctcctccgcaaatcctcatcaagaatacccccgtacctgcgaatccttcgaccacattcagcgcggcaaagtttgcttctttcatcacacagtactctacggggcaggtcagcgtggagattgagtgggagctgcagaaggagaacagcaaacgctggaaccccgaaatccagtacacttccaactacaacaagtctgttaatgtggactttactgtggacactaatggtgtgtattcagagcctcgccccattggcacaagatacctgactcgtaatctgtaa

SEQ ID NO: 3222 - DNA, 2208 bp, Artificial Sequence
  Description of Artificial Sequence: Synthetic polynucleotide
atggctgccgatggttatcttccagattggctcgaggacactctctctgaaggaataagacagtggtggaagctcaaacctggcccaccaccaccaaagcccgcagagcggcatcaggacgacagcaggggtcttgtgcttcctgggtacaagtacctcggacccttcaacggactcgacaagggagagccggtcaacgaggcagacgtcgcggccctcgagcacgacaaggcctacgaccggcagctcgacagcggagacaacccgtacctcaagtacaaccacgccgacgcggagtttcaggagcgtcttaaagaagatacgtcttttgggggcaacctcggacgagcagtcttccaggcgaaaaggagggttcttgaacctctgggcctggttgaggaacctgttaagacggctccgggaaaaaagaggccggtagagcattctcctgcggagccagactcctcctcgggaaccggaaaggcgggccagcagcctgcgagaaagagattgaatttcggtcagactggagacgcagactccgtacctgacccccagcctctcggacagccaccagcagccccctctggtctgggaactaatacgatggctacaggcagtggcgcaccaatggcagacaataacgagggcgccgacggagtgggtaattcctcgggaaattggcattgcgattccacatggatgggcgacagagtcatcaccaccagcacccgaacctgggccctgcccacctacaacaaccacctctacaagcaaatctccagccaatctggagcctcaaacgacaaccactactttggctacagcaccccttgggggtattttgacttcaacagattccactgtcacttctccccacgtgactggcaaagactcatcaacaacaactggggattccgacccaagagactcaacttcaagctctttaacattcaagtcaaagaggtcacgcagaatgacggtacgacgacgattgccaataaccttaccagcacggttcaagtctttactgactcggagtaccagctcccgtacgtcctcggctcggcgcatcaaggatgcctcccgccgtttccagcagacgtcttcatggtgccacagtatggatacctcaccctgaacaacgggagtcaggcggtaggacgctcttccttttactgcctggagtactttccttctcagatgctgcgtaccggaaacaactttaccttcagctacacctttgaggacgttcctttccacagcagctacgctcacagccagagtttggaccggctgatgaatcctctgatcgaccagtatctgtattacttgagcaaaacaaacgctccaagcggaaccaccacgatgtccaggcttcagttttctcaggccggagcgagtgacattcgggaccagtctaggaactggcttcctggaccctgttaccgccagcagcgagtatcaaaaacagctgcggataacaacaacagtgattattcgtggactggagctaccaagtaccacctcaatggaagagactctctggtgaatccgggcccagctatggccagccacaaggacgatgaagaaaaatattttcctcagagcggggttctcatctttggaaaacaagactcgggaaaaactaatgtggacattgaaaaggtcatgattacagacgaagaggaaatcaggaccaccaatcccgtggctacggagcagtatggttctgtatctaccaacctccagagcggcaacacacaggcagccaccacagatgtcaacacacaaggcgttcttccaggcatggtctggcaggacagagacgtgtacctgcaaggacccatctgggcaaagattcctcacacggacggacactttcacccttctcccctcatgggaggatttggactcaaacaccctcctccgcaaatcctcatcaagaatacccccgtacctgcgaatccttcgaccacattcagcgcggcaaagtttgcttctttcatcacacagtactctacggggcaggtcagcgtggagattgagtgggagctgcagaaggagaacagcaaacgctggaaccccgaaatccagtacacttccaactacaacaagtctgttaatgtggactttactgtggacactaatggtgtgtattcagagcctcgccccattggcacaagatacctgactcgtaatctgtaa

SEQ ID NO: 3223 - DNA, 2208 bp, Artificial Sequence
  Description of Artificial Sequence: Synthetic polynucleotide
atggctgccgatggttatcttccagattggctcgaggacactctctctgaaggaataagacagtggtggaagctcaaacctggcccaccaccaccaaagcccgcagagcggcatcaggacgacagcaggggtcttgtgcttcctgggtacaagtacctcggacccttcaacggactcgacaagggagagccggtcaacgaggcagacgccgcggccctcgagcacgacaaggcctacgaccggcagctcgacagcggagacaacccgtacctcaagtacaaccacgccgacgcggagtttcaggagcgtcttaaagaagatacgtcttttgggggcaacctcggacgagcagtcttccaggcgaaaaagagggttcttgaacctctgggcctggttgaggaacctgttaagacggctccgggaaaaaagaggccggtagagcattctcctgcggagccagactcctcctcgggaaccggaaaggcgggccagcagcctgcgagaaagagattgaatttcggtcagactggagacgcagactccgtacctgacccccagcctctcggacagccaccagcagccccctctggtctgggaactaatacgatggctacaggcagtggcgcaccaatggcagacaataacgagggcgccgacggagtgggtaattcctcgggaaattggcattgcgattccacatggatgggcgacagagtcatcaccaccagcacccgaacctgggccctgcccacctacaacaaccacctctacaagcaaatctccagccaatctggagcctcaaacgacaaccactactttggctacagcaccccttgggggtattttgacttcaacagattccactgtcacttctccccacgtgactggcaaagactcatcaacaacaactggggattccgacccaagagactcaacttcaagctctttaacattcaagtcaaagaggtcacgcagaatgacggtacgacgacgattgccaataaccttaccagcacggttcaagtctttactgactcggagtaccagctcccgtacgtcctcggctcggcgcatcaaggatgcctcccgccgtttccagcagacgtcttcatggtgccacagtatggatacctcaccctgaacaacgggagtcaggcggtaggacgctcttccttttactgcctggagtactttccttctcagatgctgcgtaccggaaacaactttaccttcagctacacctttgaggacgttcctttccacagcagctacgctcacagccagagtttggaccggctgatgaatcctctgatcgaccagtatctgtattacttgagcaaaacaaacgctctaagcggaaccaccacgatgtccaggcttcagttttctcaggccggagcgagtgacattcgggaccagtctaggaactggcttcctggaccctgttaccgccagcagcgagtatcaaaaacagctgcggataacaacaacagtgattattcgtggactggagctaccaagtaccacctcaatggaagagactctctggtgaatccgggcccagctatggccagccacaaggacgatgaagaaaaatattttcctcagagcgaggttctcatctttggaaaacaagactcgggaaaaactaatgtggacattgaaaaggtcatgattacagacgaagaggaaatcaggaccaccaatcccgtggctacggagcagtatggttctgtatctaccaacctccagagcggcaacacacaggcagccaccacagatgtcaacacacaaggcgttcttccaggcatggtctggcaggacagagacgtgtacctgcaaggacccatctgggcaaagattcctcacacggacggacactttcacccttctcccctcatgggaggatttggactcaaacaccctcctccgcaaatcctcatcaagaatacccccgtacctgcgaatccttcgaccacattcagcgcggcaaagcttgcttctttcatcacacagtactctacggggcaggtcagcgtggagattgagtgggagctgcagaaggagaacagcaaacgctggaaccccgaaatccagtacacttccaactacaacaagtctgttaatgtggactttactgtggacactaatggtgtgtattcagagcctcgccccattggcacaagatacctgactcgtaatctgtaa

SEQ ID NO: 3224 - DNA, 2208 bp, Artificial Sequence
  Description of Artificial Sequence: Synthetic polynucleotide
atggctgccgatggttatcttccagattggctcgaggacactctctctgaaggaataagacagtggtggaagctcaaacctggcccaccaccaccaaagcccgcagagcggcatcaggacgacagcaggggtcttgtgcttcctgggtacaagtacctcggacccttcaacggactcgacaagggagagccggtcaacgaggcagacgccgcggccctcgagcacgacaaggcctacgaccggcagctcgacagcggagacaacccgtacctcaagtacaaccacgccgacgcggagtttcaggagcgtcttaaagaagatacgtcttttgggggcaacctcggacgagcagtcttccaggcgaaaaagagggttcttgaacctctgggcctggttgaggaacctgttaagacggctccgggaaaaaagaggccggtagagcattctcctgcggagccagactcctcctcgggaaccggaaaggcgggccagcagcctgcgagaaagagattgaatttcggtcagactggagacgcagactccgtacctgacccccagcctctcggacagccaccagcagccccctctggtctgggaactaatacgatggctacaggcagtggcgcaccaatggcagacaataacgagggcgccgacggagtgggtaattcctcgggaaattggcattgcgattccacatggatgggcgacagagtcatcaccaccagcacccgaacctgggccctgcccacctacaacaaccacctctacaagcaaatctccagccaatctggagcctcaaacgacaaccactactttggctacagcaccccttgggggtattttgacttcaacagattccactgtcacttctccccacgtgactggcaaagactcatcaacaacaactggggattccgacccaagagactcaacttcaagctctttaacattcaagtcaaagaggtcacgcagaatgacggtacgacgacgattgccaataaccttaccagcacggttcaagtctttactgactcggagtaccagctcccgtacgccctcggctcggcgcatcaaggatgcctcccgccgtttccagcagacgtcttcatggtgccacagtatggatacctcaccctgaacaacgggagtcaggcggtaggacgctcttccttttactgcctggagtactttccttctcagatgctgcgtaccggaaacaactttaccttcagctacacctttgaggacgttcctttccacagcagctacgctcacagccagagtttggaccggctgatgaatcctctgatcgaccagtatctgtattacttgagcaaaacaaacgctccaagcggaaccaccacgatgtccaggcttcagttttctcaggccggagcgagtgacattcgggaccagtctaggaactggcttcctggaccctgttaccgccagcagcgagtatcaaaaacagctgcggataacaacaacagtgattattcgtggactggagctaccaagtaccacctcaatggaagagactctctggtgaatccgggcccagctatggccagccacaaggacgatgaagaaaaatattttcctcagagcggggttctcatctttggaaaacaagactcgggaaaaaccaatgtggacattgaaaaggtcatgattacagacgaagaggaaatcaggaccaccaatcccgtggctacggagcagtatggttctgtatctaccaacctccagagcggcaacacacaggcagccaccacagatgtcaacacacaaggcgttcttccaggcatggtctggcaggacagagacgtgtacctgcaaggacccatctgggcaaagattcctcacacggacggacactttcacccttctcccctcatgggaggatttggactcaaacaccctcctccgcaaatcctcatcaagaatacccccgtacctgcgaatccttcgaccacattcagcgcggcaaagtttgcttctttcatcacacagtactctacggggcaggtcagcgtggagattgagtgggagctgcagaaggagaacagcaaacgctggaaccccgaaatccagtacacttccaactacaacaagtctgttaatgtggactttactgtggacactaatggtgtgtattcagagcctcgccccattggcacaagatacctgactcgtaatctgtaa

SEQ ID NO: 3225 - DNA, 2208 bp, Artificial Sequence
  Description of Artificial Sequence: Synthetic polynucleotide
atggctgccgatggttatcttccagattggctcgaggacactctctctgaaggaataagacagtggtggaagctcaaacctggcccaccaccaccaaagcccgcagagcggcatcaggacgacagcaggggtcttgtgcttcctgggtacaagtacctcggacccttcaacggactcgacaagggagagccggtcaacgaggcagacgccgcggccctcgagcacgacaaggcctacgaccggcagctcgacagcggagacaacccgtacctcaagtacaaccacgccgacgcggagtttcaggagcgtcttaaagaagatacgtcttttgggggcaacctcggacgagcagtcttccaggcgaaaaagagggttcttgaacctctgggcctggttgaggaacctgttaagacggctccgggaaaaaagaggccggtagagcattctcctgcggagccagactcctcctcgggaaccggaaaggcgggccagcagcctgcgagaaagagattgaatttcggtcagactggagacgcagactccgtacctgacccccagcctctcggacagccaccagcagccccctctggtctgggaactaatacgatggctacaggcagtggcgcaccaatggcagacaataacgagggcgccgacggagtgggtaattcctcgggaaattggcattgcgattccacatggatgggcgacagagtcatcaccaccagcacccgaacctgggccctgcccacctacaacaaccacctctacaagcaaatctccagccaatctggagcctcaaacgacaaccactactttggctacagcaccccttgggggtattttgacttcagcagattccactgtcacttctccccacgtgactggcaaagactcatcaacaacaactggggattccgacccaagagactcaacttcaagctctttaacattcaagtcaaagaggtcacgcagaatgacggtacgacgacgattgccaataaccttaccagcacggttcaagtctttactgactcggagtaccagctcccgtacgtcctcggctcggcgcatcaaggatgcctcccgccgtttccagcagacgtcttcatggtgccacagtatggatacctcaccctgaacaacgggagtcaggcggtaggacgctcttccttttactgcctggagtactttccttctcagatgctgcgtaccggaaacaactttaccttcagctacacctttgaggacgttcctttccacagcagctacgctcacagccagagtttggaccggctgatgaatcctctgatcgaccagtatctgtattacttgagcaaaacaaacgctccaagcggaaccaccacgatgtccaggcttcagttttctcaggccggagcgagtgacattcgggaccagtctaggaactggcttcctggaccctgttaccgccagcagcgagtatcaaaaacagctgcggataacaacaacagtgattattcgtggactggagctaccaagtaccacctcaatggaagagactctctggtgaatccgggcccagctatggccagccacaaggacgatgaagaaaaatattttcctcagagcggggttctcatctttggaaaacaagactcgggaaaaaccaatgtggacattgaaaaggtcatgattacagacgaagaggaaatcaggaccaccaatcccgtggctacggagcagtatggttctgtatctaccaacctccagagcggcaacacacaggcagccaccacagatgtcaacacacaaggcgttcttccaggcatggtctggcaggacagagacgtgtacctgcaaggacccatctgggcaaagattcctcacacggacggacactttcacccttctcccctcatgggaggatttggactcaaacaccctcctccgcaaatcctcatcaagaatacccccgtacctgcgaatccttcgaccacattcagcgcggcaaagtttgcttctttcatcacacagtactctacggggcaggtcagcgtggagattgagtgggagctgcagaaggagaacagcaaacgctggaaccccgaaatccagtacacttccaactacaacaagtctgttaatgtggactttactgtggacactaatggtgtgtattcagagcctcgccccattggcacaagatacctgactcgtaatctgtaa

SEQ ID NO: 3226 - DNA, 2208 bp, Artificial Sequence
  Description of Artificial Sequence: Synthetic polynucleotide
atggctgccgatggttatcttccagattggctcgaggacactctctctgaaggaataagacagtggtggaagctcaaacctggcccaccaccaccaaagcccgcagagcggcatcaggacgacagcaggggtcttgtgcttcctgggtacaagtacctcggacccttcaacggactcgacaagggagagccggtcaacgaggcagacgccgcggccctcgagcacgacaaggcctacgaccggcagctcgacagcggagacaacccgtacctcaagtacaaccacgccgacgcggagtttcaggagcgtcttaaagaagatacgtcttttgggggcaacctcggacgagcagtcttccaggcgaaaaagagggttcttgaacccctgggcctggttgaggaacctgttaagacggctccgggaaaaaagaggccggtagagcattctcctgcggagccagactcctcctcgggaaccggaaaggcgggccagcagcctgcgagaaagagattgaatttcggtcagactggagacgcagactccgtacctgacccccagcctctcggacagccaccagcagccccctctggtctgggaactaatacgatggctacaggcagtggcgcaccaatggcagacaataacgagggcgccgacggagtgggtaattcctcgggaaattggcattgcgattccacatggatgggcgacagagtcatcaccaccagcacccgaacctgggccctgcccacctacaacaaccacctctacaagcaaatctccagccaatctggagcctcaaacgacaaccactacgttggctacagcaccccttgggggtattttgacttcaacagattccactgtcacttctccccacgtgactggcaaagactcatcaacaacaactggggattccgacccaagagactcaacttcaagctctttaacattcaagtcaaagaggtcacgcagaatgacggtacgacgacgattgccaataaccttaccagcacggttcaagtctttactgactcggagtaccagctcccgtacgtcctcggctcggcgcatcaaggatgcctcccgccgtttccagcagacgtcttcatggtgccacagtatggatacctcaccctgaacaacgggagtcaggcggtaggacgctcttccttttactgcctggagtactttccttctcagatgctgcgtaccggaaacaactttaccttcagctacacctttgaggacgttcctttccacagcagctacgctcacagccagagtttggaccggctgatgaatcctctgatcgaccagtatctgtattacttgagcaaaacaaacgctccaagcggaaccaccacgatgtccaggcttcagttttctcaggccggagcgagtgacattcgggaccagtctaggaactggcttcctggaccctgttaccgccagcagcgagtatcaaaaacagctgcggataacaacaacagtgattattcgtggactggagctaccaagtaccacctcaatggaagagactctctggtgaatccgggcccagctatggccagccacaaggacgatgaagaaaaatattttcctcagagcggggttctcatctttggaaaacaagactcgggaaaaactaatgtggacattgaaaaggtcatgattacagacgaagaggaaatcaggaccaccaatcccgtggctacggagcagtatggttctgtatctaccaacctccagagcggcaacacacaggcagccaccacagatgtcaacacacaaggcgttcttccaggcatggtctggcaggacagagacgtgtacctgcaaggacccatctgggcaaagattcctcacacggacggacactttcacccttctcccctcatgggaggatttggactcaaacaccctcctccgcaaatcctcatcaagaatacccccgtacctgcgaatccttcgaccacattcagcgcggcaaagtttgcttctttcatcacacagtactctacggggcaggtcagcgtggagattgagtgggagctgcagaaggagaacagcaaacgctggaaccccgaaatccagtacacttccaactacaacaagtctgttaatgtggactttactgtggacactaatggtgtgtattcagagcctcgccccattggcacaagatacctgactcgtaatctgtaa

SEQ ID NO: 3227 - DNA, 2208 bp, Artificial Sequence
  Description of Artificial Sequence: Synthetic polynucleotide
atggctgccgatggttatcttccagattggctcgaggacactctctctgaaggaataagacagtggtggaagctcaaacctggcccaccaccaccaaagcccgcagagcggcatcaggacgacagcaggggtcttgtgcttcctgggtacaagtacctcggacccttcaacggactcgacaagggagagccggtcaacgaggcagacgccgcggccctcgagcacgacaaggcctacgaccggcagctcgacagcggagacaacccgtacctcaagtacaaccacgccgacgcggagtttcaggagcgtcttaaagaagatacgtcttttgggggcaacctcggacgagcagtcttccaggcgaaaaagagggttcttgaacctctgggcctggttgaggaacctgttaagacggctccgggaaaaaagaggccggtagagcattctcctgcggagccagactcctcctcgggaaccggaaaggcgggccagcagcctgcgagaaagagattgaatttcggtcagactggagacgcagactccgtacctgacccccagcctctcggacagccaccagcagccccctctggtctgggaactaatacgatggctacaggcagtggcgcaccaatggcagacaataacgagggcgccgacggagtgggtaattcctcgggaaattggcattgcgattccacatggatgggcgacagagtcatcaccaccagcacccgaacctgggccctgcccacctacaacaaccacctctacaagcaaatctccagccaatctggagcctcaaacgacaaccactactttggctacagcaccccttgggggcattttgacttcaacagattccactgtcacttctccccacgtgactggcaaagactcatcaacaacaactggggattccgacccaagagactcaacttcaagctctttaacattcaagtcaaagaggtcacgcagaatgacggtacgacgacgattgccaataaccttaccagcacggttcaagtctttactgactcggagtaccagctcccgtacgtcctcggctcggcgcatcaaggatgcctcccgccgtttccagcagacgtcttcatggtgccacagtatggatacctcaccctgaacaacgggagtcaggcggtaggacgctcttccttttactgcctggagtactttccttctcagatgctgcgtaccggaaacaactttaccttcagctacacctttgaggacgttcctttccacagcagctacgctcacagccagagtttggaccggctgatgaatcctctgatcgaccagtatctgtattacttgagcaaaacaaacgctccaagcggaaccaccacgatgtccaggcttcagttttctcaggccggagcgagtgacattcgggaccagtctaggaactggcttcctggaccctgttaccgccagcagcgagtatcaaaaacagctgcggataacaacaacagtgattattcgtggactggagctaccaagtaccacctcaatggaagagactctctggtgaatccgggcccagctatggccagccacaaggacgatgaagaaaaatattttcctcagagcggggttctcatctttggaaaacaagactcgggaaaaaccaatgtggacattgaaaaggtcatgattacagacgaagaggaaatcaggaccaccaatcccgtggctacggagcagtatggttctgtatctaccaacctccagagcggcaacacacaggcagccaccacagatgtcaacacacaaggcgttcttccaggcatggtctggcaggacagagacgtgtacctgcaaggacccatctgggcaaagattcctcacacggacggacactttcacccttctcccctcatgggaggatttggactcaaacaccctcctccgcaaatcctcatcaagaatacccccgtacctgcgaatccttcgaccacattcagcgcggcaaagtttgcttctttcatcacacagtactctacggggcaggtcagcgtggagattgagtgggagctgcagaaggagaacagcaaacgctggaaccccgaaatccagtacacttccaactacaacaagtctgttaatgtggactttactgtggacactaatggtgtgtattcagagcctcgccccattggcacaagatacctgactcgtaatctgtaa

SEQ ID NO: 3228 - DNA, 2208 bp, Artificial Sequence
  Description of Artificial Sequence: Synthetic polynucleotide
atggctgccgatggttatcttccagattggctcgaggacactctctctgaaggaataagacagtggtggaagctcaaacctggcccaccaccaccaaagcccgcagagcggcatcaggacgacagcaggggtcttgtgcttcctgggtacaagtacctcggacccttcaacggactcgacaagggagagccggtcaacgaggcagacgtcgcggccctcgagcacgacaaggcctacgaccggcagctcgacagcggagacaacccgtacctcaagtacaaccacgccgacgcggagtttcaggagcgtcttaaagaagatacgtcttttgggggcaacctcggacgagcagtcttccaggcgaaaaagagggttcttgaacctctgggcctggttgaggaacctgttaagacggctccgggaaaaaagaggccggtagagcattctcctgcggagccagactcctcctcgggaaccggaaaggcgggccagcagcctgcgagaaagagattgaatttcggtcagactggagacgcagactccgtacctgacccccagcctctcggacagccaccagcagccccctctggtctgggaactaatacgatggctacaggcagtggcgcaccaatggcagacaataacgagggcgccgacggagtgggtaattcctcgggaaattggcattgcgattccacatggatgggcgacagagtcatcaccaccagcacccgaacctgggccctgcccacctacaacaaccacctctacaagcaaatctccagccaatctggagcctcaaacgacaaccactactttggctacagcaccccttgggggtattttgacttcaacagattccactgtcacttctccccacgtgactggcaaagactcatcaacaacgactggggattccgacccaagagactcaacttcaagctctttaacattcaagtcaaagaggtcacgcagaatgacggtacgacgacgattgccaataaccttaccagcacggttcaagtctttactgactcggagtaccagctcccgtacgtcctcggctcggcgcatcaaggatgcctcccgccgtttccagcagacgtcttcatggtgccacagtatggatacctcaccctgaacaacgggagtcaggcggtaggacgctcttccttttactgcctggagtactttccttctcagatgctgcgtaccggaaacaactttaccttcagctacacctttgaggacgttcctttccacagcagctacgctcacagccagagtttggaccggctgatgaatcctctgatcgaccagtatctgtattacttgagcaaaacaaacgctccaagcggaaccaccacgatgtccaggcttcagttttctcaggccggagcgagtgacattcgggaccagtctaggaactggcttcctggaccctgttaccgccagcagcgagtatcaaaaacagctgcggataacaacaacagtgattattcgtggactggagctaccaagtaccacctcaatggaagagactctctggtgaatccgggcccagctatggccagccacaaggacgatgaagaaaaatattttcctcagagcggggttctcatctttggaaaacaggactcgggaaaaactaatgtggacattgaaaaggtcatgattacagacgaagaggaaatcaggaccaccaatcccgtggctacggagcagtatggttctgtatctaccaacctccagagcggcaacacacaggcagccaccacagatgtcaacacacaaggcgttcttccaggcatggtctggcaggacagagacgtgtacctgcaaggacccatctgggcaaagattcctcacacggacggacactttcacccttctcccctcatgggaggatttggactcaaacaccctcctccgcaaatcctcatcaagaatacccccgtacctgcgaatccttcgaccacattcagcgcggcaaagtttgcttctttcatcacacagtactctacggggcaggtcagcgtggagattgagtgggagctgcagaaggagaacagcaaacgctggaaccccgaaatccagtacacttccaactacaacaagtctgttaatgtggactttactgtggacactaatggtgtgtattcagagcctcgccccattggcacaagatacctgactcgtaatctgtaa

SEQ ID NO: 3229 - DNA, 2208 bp, Artificial Sequence
  Description of Artificial Sequence: Synthetic polynucleotide
atggctgccgatggttatcttccagattggctcgaggacactctctctgaaggaataagacagtggtggaagctcaaacctggcccaccaccaccaaagcccgcagagcggcatcaggacgacagcaggggtcttgtgcttcctgggtacaagtacctcggacccttcaacggactcgacaagggagagccggtcaacgaggcagacgccgcggccctcgagcacgacaaggcctacgaccggcagctcgacagcggagacaacccgtacctcaagtacaaccacgccgacgcggagtttcaggagcgtcttaaagaagatacgtcttttgggggcaacctcggacgagcagtcttccaggcgaaaaagagggttcttgaacctctgggcctggttgaggaacctgttaagacggctccgggaaaaaagaggccggtagagcattctcctgcggagccagactcctcctcgggaaccggaaaggcgggccagcagcctgcgagaaagagattgaatttcggtcagactggagacgcagactccgtacctgacccccagcctctcggacagccaccagcagccccctctggtctgggaactaatacgatggctacaggcagtggcgcaccaatggcagacaataacgagggcgccgacggagtgggtaattcctcgggaaattggcattgcgattccacatggatgggcgacagagtcatcaccaccagcacccgaacctgggccctgcccacctacaacaaccacctctacaagcaaatctccagccaatctggagcctcaaacgacaaccactactttggctacagcaccccttgggggtattttgacttcaacagattccactgtcacttctccccacgtgactggcaaagactcatcaacaacaactggggattccgacccaagagactcaacttcaagctctttaacattcaagtcaaagaggtcacgcagaatgacggtacgacgacgattgccaataaccttaccagcacggttcaagtctttactgactcggagtaccagctcccgtacgtcctcggctcggcgcatcaaggatgcctcccgccgtttccagcagacgtcttcatggtgccacagtatggatacctcaccctgaacaacgggagtcaggcggtaggacgctcttccttttactgcctggagtactttccttctcagatgctgcgtaccggaaacaactttaccttcagctacacctttgaggacgttcctttccacagcagctacgctcacagccagagtttggaccggctgatgaatcctctgatcgaccagtatctgtattacttgagcaaaacaaacgctccaagcggaaccaccacgatgtccaggcttcagttttctcaggccggagcgagtgacattcgggaccagtctaggaactggcttcctggaccctgttaccgccagcagcgagtatcaaaaacagctgcggataacaacaacagtgattattcgtggactggagctaccaagtaccacctcaatggaagagactctctggtgaatccgggcccagctatggccagccacaaggacgatgaagaaaaatattttcctcagagcggggttctcatctttggaaaacaagactcggaaaaaaccaatgtggacattgaaaaggtcatgattacagacgaagaggaaatcaggaccaccaatcccgtggctacggagcagtatggttctgtatctaccaacctccagagcggcaacacacaggcagccaccacagatgtcaacacacaaggcgttcttccaggcatggtctggcaggacagagacgtgtacctgcaaggacccatctgggcaaagattcctcacacggacggacactttcacccttctcccctcatgggaggatttggactcaaacaccctcctccgcaaatcctcatcaagaatacccccgtacctgcgaatccttcgaccacattcagcgcggcaaagtttgcttctttcatcacacagtactctacggggcaggtcagcgtggagattgagtgggagctgcagaaggagaacagcaaacgctggaaccccgaaatccagtacacttccaactacaacaagtctgttaatgtggactttactgtggacactaatggtgtgtattcagagcctcgccccattggcacaagatacctgactcgtaatctgtaa

SEQ ID NO: 3230 - DNA, 2208 bp, Artificial Sequence
  Description of Artificial Sequence: Synthetic polynucleotide
atggctgccgatggttatcttccagattggctcgaggacactctctctgaaggaataagacagtggtggaagctcaaacctggcccaccaccaccaaagcccgcagagcggcatcaggacgacagcaggggtcttgtgcttcctgggtacaagtacctcggacccttcaacggactcgacaagggagagccggtcaacgaggcagacgccgcggccctcgagcacgacaaggcctacgaccggcagctcgacagcggagacaacccgtacctcaagtacaaccacgccgacgcggagtttcaggagcgtcttaaagaagatacgtcttttgggggcaacctcggacgagcagtcttccaggcgaaaaagagggttcttgaacctctgggcctggttgaggaacctgttaagacggctccgggaaaaaagaggccggtagagcattctcctgcggagccagactcctcctcgggaaccggaaaggcgggccagcagcctgcgagaaagagattgaatttcggtcagactggagacgcagactccgtacctgacccccagcctctcggacagccaccagcagccccctctggtctgggaactaatacgatggctacaggcagtggcgcaccaatggcagacaataacgagggcgccgacggagtgggtaattcctcgggaaattggcattgcgattccacatggatgggcgacagagtcatcaccaccagcacccgaacctgggccctgcccacctacaacaaccacctctacaagcaaatctccagccaatctggagcctcaaacgacaaccactactttggctacagcaccccttgggggtattttgacttcaacagattccactgtcacttctccccacgtgactggcaaagactcatcaacaacaactggggattccgacccaagagactcaacttcaagctctttaacattcaagtcaaagaggtcacgcagaatgacggtacgacgacgattgccaataaccttaccagcacggttcaagtctttactgactcggagtaccagctcccgtacgtcctcggctcggcgcatcaaggatgcctcccgccgtttccagcagacgtcttcatggtgccacagtatggatacctcaccctgaacaacgggagtcaggcggtaggacgctcttccttttactgcctggagtactttccttctcagatgctgcgtaccggaaacaactttaccttcagctacacctttgaggacgttcctttccacagcagctacgctcacagccagagtttggaccggctgatgaatcctctgatcgaccagtatctgtattacttgagcaaaacaaacgctccaagcggaaccaccacgatgtccaggcttcagttttctcaggccggagcgagtgacattcgggaccagtctaggaactggcttcctggaccctgttaccgccagcagcgagtatcaaaaacagctgcggataacaacaacagtgattattcgtggactggagctaccaagtaccacctcaatggaagagactctctggtgaatccgggcccagctatggccagccacaaggacgatgaagaaaaatattttcctcagagcggggttctcatctttggaaaacaagactcgggaaaaactaatgtggacattgaaaaggtcatgattacagacgaagaggaaatcaggaccaccaatcccgtggctacggagcagtatggttctgtatctaccaacctccagagcggcaacacacaggcagccaccacagatgtcaacacacaaggcgttcttccaggcatggtctggcaggacagagacgtgtacctgcaaggacccatctgggcaaagattcctcacacggacggacactttcacccttctcccctcatgggaggatttggactcaaacaccctcctccgcaaatcctcatcaagaatacccccgtacctgcgaatccttcgaccacattcagcgcggcaaagtttgcttctttcatcacacagtactctacggggcaggtcagcgtggagattgagtgggagctgcagaaggagaacagcaaacgctggaaccccgaaatccagtacacttccaactacaacaagtctgttaatgtggactttactgtggacactaatggtgtgtattcagagcctcgccccattggcacaagatacctgactcgtaatctgtaa

SEQ ID NO: 3231 - DNA, 2208 bp, Artificial Sequence
  Description of Artificial Sequence: Synthetic polynucleotide
atggctgccgatggttatcttccagattggctcgaggacactctctctgaaggaataagacagtggtggaagctcaaacctggcccaccaccaccaaagcccgcagagcggcatcaggacgacagcaggggtcttgtgcttcctgggtacaagtacctcggacccttcaacggactcgacaagggagagccggtcaacgaggcagacgtcgcggccctcgagcacgacaaggcctacgaccggcagctcgacagcggagacaacccgtacctcaagtacaaccacgccgacgcggagtttcaggagcgtcttaaagaagatacgtcttttgggggcaacctcggacgagcagtcttccaggcgaaaaagagggttcttgaacctctgggcctggttgaggaacctgttaagacggctccgggaaaaaagaggccggtagagcattctcctgcggagccagactcctcctcgggaaccggaaaggcgggccagcagcctgcgagaaagagattgaatttcggtcagactggagacgcagactccgtacctgacccccagcctctcggacagccaccagcagccccctctggtctgggaactaatacgatggctacaggcagtggcgcaccaatggcagacaataacgagggcgccgacggagtgggtaattcctcgggaaattggcattgcgattccacatggatgggcgacagagtcatcaccaccagcacccgaacctgggccctgcccacctacaacaaccacctctacaagcaaatctccagccaatctggagcctcaaacgacaaccactactttggctacagcaccccttgggggtattttgacttcaacagattccactgtcacttctccccacgtgactggcaaagactcatcaacaacaactggggattccgacccaagagactcaacttcaagctctttaacattcaagtcaaagaggtcacgcagaatgacggtacgacgacgattgccaataaccttaccagcacggttcaagtctttactgactcggagtaccagctcccgtacgtcctcggctcggcgcatcaaggatgcctcccgccgtttccagcagacgtcttcatggtgccacagtatggatacctcaccctgaacaacgggagtcaggcggtaggacgctcttccttttactgcctggagtactttccttctcagatgctgcgtaccggaaacaactttaccttcagctacacctttgaggacgttcctttccacagcagctacgctcacagccagagtttggaccggctgatgaatcctctgatcgaccagtatctgtattacttgagcaaaacaaacgctccaagcggaaccaccacgatgtccaggcttcagttttctcaggccggagcgagtgacattcgggaccagtctaggaactggcttcctggaccctgttaccgccagcagcgagtatcaaaaacagctgcggataacaacaacagtgattattcgtggactggagctaccaagtaccacctcaatggaagagactctctggtgaatccgggcccagctatggccagccacaaggacgatgaagaaaaatattttcctcagagcggggttctcatctttggaaaacaagactcgggaaaaactaatgtggacattgaaaaggtcatgattacagacgaagaggaaatcaggaccaccaatcccgtggctacggagcagtatggttctgtatctaccaacctccagagcggcaacacacaggcagccaccacagatgtcaacacacaaggcgttcttccaggcatggtctggcaggacagagacgtgtacctgcaaggacccatctgggcaaagattcctcacacggacggacactttcacccttctcccctcatgggaggatttggactcaaacaccctcctccgcaaatcctcatcaagaatacccccgtacctgcgaatccttcgaccacattcagcgcggcaaagtttgcttctttcatcacacagtactctacggggcaggtcagcgtggagattgagtgggagctgcagaaggagaacagcaaacgctggaaccccgaaatccagtacacttccaactacaacaagtctgttaatgtggactttactgtggacactaatggtgtgtattcagagcctcgccccattggcacaagatacctgactcgtaatctgtaa

SEQ ID NO: 3232 - DNA, 2208 bp, Artificial Sequence
  Description of Artificial Sequence: Synthetic polynucleotide
atggctgccgatggttatcttccagattggctcgaggacactctctctgaaggaataagacagtggtggaagctcaaacctggcccaccaccaccaaagcccgcagagcggcatcaggacgacagcaggggtcttgtgcttcctgggtacaagtacctcggacccttcaacggactcgacaagggagagccggtcaacgaggcagacgccgcggccctcgagcacgacaaggcctacgaccggcagctcgacagcggagacaacccgtacctcaagtacaaccacgccgacgcggagtttcaggagcgtcttaaagaagatacgtcttttgggggcaacctcggacgagcagtcttccaggcgaaaaagagggttcttgaacctctgggcctggttgaggaacctgttaagacggctccgggaaaaaagaggccggtagagcattctcctgcggagccagactcctcctcgggaaccggaaaggcgggccagcagcctgcgagaaagagattgaatttcggtcagactggagacgcagactccgtacctgacccccagcctctcggacagccaccagcagccccctctggtctgggaactaatacgatggctacaggcagtggcgcaccaatggcagacaataacgagggcgccgacggagtgggtaattcctcgggaaattggcattgcgattccacatggatgggcgacagagtcatcaccaccagcacccgaacctgggccctgcccacctacaacaaccacctctacaagcaaatctccagccaatctggagcctcaaacgacaaccactactttggctacagcaccccttgggggtattttgacttcaacagattccactgtcacttctccccacgtgactggcaaagactcatcaacaacaactggggattccgacccaagagactcaacttcaagctctttaacattcaagtcaaagaggtcacgcagaatgacggtacgacgacgattgccaataaccttaccagcacggttcaagtctttactgactcggagtaccagctcccgtacgtcctcggctcggcgcatcaaggatgcctcccgccgtttccagcagacgtcttcatggtgccacagtatggatacctcaccctgaacaacgggagtcaggcggtaggacgctcttccttttactgcctggagtactttccttctcagatgctgcgtaccggaaacaactttaccttcagctacacctttgaggacgttcctttccacagcagctacgctcacagccagagtttggaccggctgatgaatcctctgatcgaccagtatctgtattacttgagcaaaacaaacgctccaagcggaaccaccacgatgtccaggcttcagttttctcaggccggagcgagtgacattcgggaccagtctaggaactggcttcctggaccctgttaccgccagcagcgagtatcaaaaacagctgcggataacaacaacagtgattatccgtggactggagctaccaagtaccacctcaatggaagagactctctggtgaatccgggcccagctatggccagccacaaggacgatgaagaaaaatattttcctcagagcggggttctcatctttggaaaacaagactcgggaaaaaccaatgtggacattgaaaaggtcatgattacagacgaagaggaaatcaggaccaccaatcccgtggctacggagcagtatggttctgtatctaccaacctccagagcggcaacacacaggcagccaccacagatgtcaacacacaaggcgttcttccaggcatggtctggcaggacagagacgtgtacctgcaaggacccatctgggcaaagattcctcacacggacggacactttcacccttctcccctcatgggaggatttggactcaaacaccctcctccgcaaatcctcatcaagaatacccccgtacctgcgaatccttcgaccacattcagcgcggcaaagtttgcttctttcatcacacagtactctacggggcaggtcagcgtggagattgagtgggagctgcagaaggagaacagcaaacgctggaaccccgaaatccagtacacttccaactacaacaagtctgttaatgtggactttactgtggacactaatggtgtgtattcagagcctcgccccattggcacaagatacctgactcgtaatctgtaa

SEQ ID NO: 3233 - DNA, 2208 bp, Artificial Sequence
  Description of Artificial Sequence: Synthetic polynucleotide
atggctgccgatggttatcttccagattggctcgaggacactctctctgaaggaataagacagtggtggaagctcaaacctggcccaccaccaccaaagcccgcagagcggcatcaggacgacagcaggggtcttgtgcttcctgggtacaagtacctcggacccttcaacggactcgacaagggagagccggtcaacgaggcagacgccgcggccctcgagcacgacaaggcctacgaccggcagctcgacagcggagacaacccgtacctcaagtacaaccacgccgacgcggagtttcaggagcgtcttaaagaagatacgtcttttgggggcaacctcggacgagcagtcttccaggcgaaaaagagggttcttgaacctctgggcctggttgaggaacctgttaagacggctccgggaaaaaagaggccggtagagcattctcctgcggagccagactcctcctcgggaaccggaaaggcgggccagcagcctgcgagaaagagattgaatttcggtcagactggagacgcagactccgtacctgacccccagcctctcggacagccaccagcagccccctctggtctgggaactaatacgatggctacaggcagtggcgcaccaatggcagacaataacgagggcgccgacggagtgggtaattcctcgggaaattggcattgcgattccacatggatgggcgacagagtcatcaccaccagcacccgaacctgggccctgcccacctacaacaaccacctctacaagcaaatctccagccaatctggagcctcaaacgacaaccactactttggctacagcaccccttgggggtattttgacttcaacagattccactgtcacttctccccacgtgactggcaaagactcatcaacaacaactggggattccgacccaagagactcaacttcaagctctttaacattcaagtcaaagaggtcacgcagaatgacggtacgacgacgattgccaataaccttaccagcacggttcaagtctttactgactcggagtaccagctcccgtacgtcctcggctcggcgcatcaaggatgcctcccgccgtttccagcagacgtcttcatggtgccacagtatggatacctcaccctgaacaacgggagtcaggcggtaggacgctcttccttttactgcctggagtactttccttctcagatgctgcgtaccggaaacaactttaccttcagctacacctttgaggacgttcctttccacagcagctacgctcacagccagagtttggaccggctgatgaatcctctgatcgaccagtatctgtattacttgagcaaaacaaacgctccaagcggaaccaccacgatgtccaggcttcagttttctcaggccggagcgagtgacattcgggaccagtctaggaactggcttcctggaccctgttaccgccagcagcgagtatcaaaaacagctgcggataacaacaacagtgattattcgtggactggagctaccaagtaccacctcaatggaagagactctctggtgaatccgggcccagctatggccagccacaaggacgatgaagaaaaatattttcctcagagcggggttctcatctttggaaaacaagactcgggaaaaactaatgtggacattgaaaaggtcatgattacagacgaagaggaaatcaggaccaccaatcccgtggctacggagcagtatggttctgtatctaccaacctccagagcggcaacacacaggcagccaccacagatgtcaacacacaaggcgctcttccaggcatggtctggcaggacagagacgtgtacctgcaaggacccatctgggcaaagattcctcacacggacggacactttcacccttctcccctcatgggaggatttggactcaaacaccctcctccgcaaatcctcatcaagaatacccccgtacctgcgaatccttcgaccacattcagcgcggcaaagtttgcttctttcatcacacagtactctacggggcaggtcagcgtggagattgagtgggagctgcagaaggagaacagcaaacgctggaaccccgaaatccagtacacttccaactacaacaagtctgttaatgtggactttactgtggacactaatggtgtgtattcagagcctcgccccattggcacaagatacctgactcgtaatctgtaa

SEQ ID NO: 3234 - DNA, 2208 bp, Artificial Sequence
  Description of Artificial Sequence: Synthetic polynucleotide
atggctgccgatggttatcttccagattggctcgaggacactctctctgaaggaataagacagtggtggaagctcaaacctggcccaccaccaccaaagcccgcagagcggcatcaggacgacagcaggggtcttgtgcttcctgggtacaagtacctcggacccttcaacggactcgacaagggagagccggtcaacgaggcagacgccgcggccctcgagcacgacaaggcctacgaccggcagctcgacagcggagacaacccgtacctcaagtacaaccacgccgacgcggagtttcaggagcgtcttaaagaagatacgtcttttgggggcaacctcggacgagcagtcttccaggcgaaaaagagggttcttgaacctctgggcctggttgaggaacctgttaagacggctccgggaaaaaagaggccggtagagcattctcctgcggagccagactcctcctcgggaaccggaaaggcgggccagcagcctgcgagaaagagattgaatttcggtcagactggagacgcagactccgtacctgacccccagcctctcggacagccaccagcagccccctctggtctgggaactaatacgatggctacaggcagtggcgcaccaatggcagacaataacgagggcgccgacggagtgggtaattcctcgggaaattggcattgcgattccacatggatgggcgacagagtcatcaccaccagcacccgaacctgggccctgcccacctacaacaaccacctctacaagcaaatctccagccaatctggagcctcaaacgacaaccactactttggctacagcaccccttgggggtattttgacttcaacagattccactgtcacttctccccacgtgactggcaaagactcatcaacaacaactggggattccgacccaagagactcaacttcaagctctttaacattcaagtcaaagaggtcacgcagaatgacggtacgacgacgattgccaataaccttaccagcacggttcaagtctttactgactcggagtaccagctcccgtacgtcctcggctcggcgcatcaaggatgcctcccgccgtttccagcagacgtcttcatggtgccacagtatggatacctcaccctgaacaacgggagtcaggcggtaggacgctcttccttttactgcctggagtactttccttctcagatgctgcgtaccggaaacaactttaccttcagctacacctttgaggacgttcctttccacagcagctacgctcacagccagagtttggaccggctgatgaatcctctgatcgaccagtatctgtattacttgagcaaaacaaacgctccaagcggaaccaccacgatgtccaggcttcagttttctcaggccggagcgagtgacattcgggaccagtctaggaactggcttcctggaccctgttaccgccagcagcgagtatcaaaaacagctgcggataacaacaacagtgattattcgtggactggagctaccaagtaccacctcaatggaagagactctctggtgaatccgggcccagctatggccagccacaaggacgatgaagagaaatattttcctcagagcggggttctcatctttggaaaacaagactcgggaaaaactaatgtggacattgaaaaggtcatgattacagacgaagaggaaatcaggaccaccaatcccgtggctacggagcagtatggttctgtatctaccaacctccagagcggcaacacacaggcagccaccacagatgtcaacacacaaggcgttcttccaggcatggtctggcaggacagagacgtgtacctgcaaggacccatctgggcaaagattcctcacacggacggacactttcacccttctcccctcatgggaggatttggactcaaacaccctcctccgcaaatcctcatcaagaatacccccgtacctgcgaatccttcgaccacattcagcgcggcaaagcttgcttctttcatcacacagtactctacggggcaggtcagcgtggaggttgagtgggagctgcagaaggagaacagcaaacgctggaaccccgaaatccagtacacttccaactacaacaagtctgttaatgtggactttactgtggacactaatggtgtgtattcagagcctcgccccattggcacaagatacctgactcgtaatctgtaa

SEQ ID NO: 3235 - DNA, 2208 bp, Artificial Sequence
  Description of Artificial Sequence: Synthetic polynucleotide
atggctgccgatggttatcttccagattggctcgaggacactctctctgaaggaataagacagtggtggaagctcaaacctggcccaccaccaccaaagcccgcagagcggcatcaggacgacagcaggggtcttgtgcttcctgggtacaagtacctcggacccttcaacggactcgacaagggagagccggtcaacgaggcagacgtcgcggccctcgagcacgacaaggcctacgaccggcagctcgacagcggagacaacccgtacctcaagtacaaccacgccgacgcggagtttcaggagcgtcttaaagaagatacgtcttttgggggcaacctcggacgagcagtcttccaggcgaaaaagagggttcttgaacctctgggcctggttgaggaacctgttaagacggctccgggaaaaaagaggccggtagagcattctcctgcggagccagactcctcctcgggaaccggaaaggcgggccagcagcctgcgagaaagagattgaatttcggtcagactggagacgcagactccgtacctgacccccagcctctcggacagccaccagcagccccctctggtctgggaactaatacgatggctacaggcagtggcgcaccaatggcagacaataacgagggcgccgacggagtgggtaattcctcgggaaattggcattgcgattccacatggatgggcgacagagtcatcaccaccagcacccgaacctgggccctgcccacctacaacaaccacctctacaagcaaatctccagccaatctggagcctcaaacgacaaccactactttggctacagcaccccttgggggtattttgacttcaacagattccactgtcacttctccccacgtgactggcaaagactcatcaacaacaactggggattccgacccaagagactcaacttcaagctctttaacattcaagtcaaagaggtcacgcagaatgacggtacgacgacgattgccaataaccttaccagcacggttcaagtctttactgactcggagtaccagctcccgtacgtcctcggctcggcgcatcaaggatgcctcccgccgtttccagcagacgtcttcatggtgccacagtatggatacctcaccctgaacagcgggagtcaggcggtaggacgctcttccttttactgcctggagtactttccttctcagatgctgcgtaccggaaacaactttaccttcagctacacctttgaggacgttcctttccacagcagctacgctcacagccagagtttggaccggctgatgaatcctctgatcgaccagtatctgtattacttgagcaaaacaaacgctccaagcggaaccaccacgatgtccaggcttcagttttctcaggccggagcgagtgacattcgggaccagtctaggaactggcttcctggaccctgttaccgccagcagcgagtatcaaaaacagctgcggataacaacaacagtgattattcgtggactggagctaccaagtaccacctcaatggaagagactctctggtgaatccgggcccagctatggccagccacaaggacgatgaagaaaaatattttcctcagagcggggttctcatctttggaaaacaagactcgggaaaaactaatgtggacattgaaaaggtcatgattacagacgaagaggaaatcaggaccaccaatcccgtggctacggagcagtatggttctgtatctaccaacctccagagcggcaacacacaggcagccaccacagatgtcaacacacaaggcgttcttccaggcatggtctggcaggacagagacgtgtacctgcaaggacccatctgggcaaagattcctcacacggacggacactttcacccttctcccctcatgggaggatttggactcaaacaccctcctccgcaaatcctcatcaagaatacccccgtacctgcgaatccttcgaccacattcagcgcggcaaagtttgcttctttcatcacacagtactctacggggcaggtcagcgtggagattgagtgggagctgcagaaggagaacagcaaacgctggaaccccgaaatccagtacacttccaactacaacaagtctgttaatgtggactttactgtggacactaatggtgtgtattcagagcctcgccccattggcacaagatacctgactcgtaatctgtaa

SEQ ID NO: 3236 - DNA, 2208 bp, Artificial Sequence
  Description of Artificial Sequence: Synthetic polynucleotide
atggctgccgatggttatcttccagattggctcgaggacactctctctgaaggaataagacagtggtggaagctcaaacctggcccaccaccaccaaagcccgcagagcggcatcaggacgacagcaggggtcttgtgcttcctgggtacaagtacctcggacccttcaacggactcgacaagggagagccggtcaacgaggcagacgtcgcggccctcgagcacgacaaggcctacgaccggcagctcgacagcggagacaacccgtacctcaagtacaaccacgccgacgcggagtttcaggagcgtcttaaagaagatacgtcttttgggggcaacctcggacgagcagtcttccaggcgaaaaagagggttcttgaacctctgggcctggttgaggaacctgttaagacggctccgggaaaaaagaggccggtagagcattctcctgcggagccagactcctcctcgggaaccggaaaggcgggccagcagcctgcgagaaagagattgaatttcggtcagactggaggcgcagactccgtacctgacccccagcctctcggacagccaccagcagccccctctggtctgggaactaatacgatggctacaggcagtggcgcaccaatggcagacaataacgagggcgccgacggagtgggtaattcctcgggaaattggcattgcgattccacatggatgggcgacagagtcatcaccaccagcacccgaacctgggccctgcccacctacaacaaccacctctacaagcaaatctccagccaatctggagcctcaaacgacaaccactactttggctacagcaccccttgggggtattttgacttcaacagattccactgtcacttctccccacgtgactggcaaagactcatcaacaacaactggggattccgacccaagagactcaacttcaagctctttaacattcaagtcaaagaggtcacgcagaatgacggtacgacgacgattgccaataaccttaccagcacggttcaagtctttactgactcggagtaccagctcccgtacgtcctcggctcggcgcatcaaggatgcctcccgccgtttccagcagacgtcttcatggtgccacagtatggatacctcaccctgaacaacgggagtcaggcggtaggacgctcttccttttactgcctggagtactttccttctcagatgctgcgtaccggaaacaactttaccttcagctacacctttgaggacgttcctttccacagcagctacgctcacagccagagtttggaccggctgatgaatcctctgatcgaccagtatctgtattacttgagcaaaacaaacgctccaagcggaaccaccacgatgtccaggcttcagttttctcaggccggagcgagtgacattcgggaccagtctaggaactggcttcctggaccctgttaccgccagcagcgagtatcaaaaacagctgcggataacaacaacagtgattattcgtggactggagctaccaagtaccacctcaatggaagagactctctggtgaatccgggcccagctatggccagccacaaggacgatgaagaaaaatattttcctcagagcggggttctcatctttggaaaacaagactcgggaaaaactaatgtggacattgaaaaggtcatgattacagacgaagaggaaatcaggaccaccaatcccgtggctacggagcagtatggttctgtatctaccaacctccagagcggcaacacacaggcagccaccacagatgtcaacacacaaggcgttcttccaggcatggtctggcaggacagagacgtgtacctgcaaggacccatctgggcaaagattcctcacacggacggacactttcacccttctcccctcatgggaggatttggactcaaacaccctcctccgcaaatcctcatcaagaatacccccgtacctgcgaatccttcgaccacattcagcgcggcaaagtttgcttctttcatcacacagtactctacggggcaggtcagcgtggagattgagtgggagctgcagaaggagaacagcaaacgctggaaccccgaaatccagtacacttccaactacaacaagtctgttaatgtggactttactgtggacactaatggtgtgtattcagagcctcgccccattggcacaagatacctgactcgtaatctgtaa

SEQ ID NO: 3237 - DNA, 2208 bp, Artificial Sequence
  Description of Artificial Sequence: Synthetic polynucleotide
atggctgccgatggttatcttccagattggctcgaggacactctctctgaaggaataagacagtggtggaagctcaaacctggcccaccaccaccaaagcccgcagagcggcatcaggacgacagcaggggtcttgtgcttcctgggtacaagtacctcggacccttcaacggactcgacaagggagagccggtcaacgaggcagacgccgcggccctcgagcacgacaaggcctacgaccggcagctcgacagcggagacaacccgtacctcaagtacaaccacgccgacgcggagtttcaggagcgtcttaaagaagatacgtcttttgggggcaacctcggacgagcagtcttccaggcgaaaaagagggttcttgaacctctgggcctggttgaggaacctgttaagacggctccgggaaaaaagaggccggtagagcattctcctgcggagccagactcctcctcgggaaccggaaaggcgggccagcagcctgcgagaaagagattgaatttcggtcagactggagacgcagactccgtacctgacccccagcctctcggacagccaccagcagccccctctggtctgggaactaatacgatggctacaggcagtggcgcaccaatggcagacaataacgagggcgccgacggagtgggtaattcctcgggaaattggcattgcgattccacatggatgggcgacagagtcatcaccaccagcacccgaacctgggccctgcccacctacaacaaccacctctacaagcaaatctccagccaatctggagcctcaaacgacaaccactactttggctacagcaccccttgggggtattttgacttcaacagattccactgtcacttctccccacgtgactggcaaagactcatcaacaacaactggggattccgacccaagagactcaacttcaagctctttaacattcaagtcaaagaggtcacgcagaatgacggtacgacgacgattgccaataaccttaccagcacggttcaagtctttactgactcggagtaccagctcccgtacgccctcggctcggcgcatcaaggatgcctcccgccgtttccagcagacgtcttcatggtgccacagtatggatacctcaccctgaacaacgggagtcaggcggtaggacgctcttccttttactgcctggagtactttccttctcagatgctgcgtaccggaaacaactttaccttcagctacacctttgaggacgttcctttccacagcagctacgctcacagccagagtttggaccggctgatgaatcctctgatcgaccagtatctgtattacttgagcaaaacaaacgctccaagcggaaccaccacgatgtccaggcttcagttttctcaggccggagcgagtgacattcgggaccagtctaggaactggcttcctggaccctgttaccgccagcagcgagtatcaaaaacagctgcggataacaacaacagtgattattcgtggactggagctaccaagtaccacctcaatggaagagactctctggtgaatccgggcccagctatggccagccacaaggacgatgaagaaaaatattttcctcagagcggggttctcatctttggaaaacaagactcgggaaaaaccaatgtggacattgaaaaggtcatgattacagacgaagaggaaatcaggaccaccaatcccgtggctacggagcagtatggttctgtatctaccaacctccagagcggcaacacacaggcagccaccacagatgtcaacacacaaggcgttcttccaggcatggtctggcaggacagagacgtgtacctgcaaggacccatctgggcaaagattcctcacacggacggacactttcacccttctcccctcatgggaggatttggactcaaacaccctcctccgcaaatcctcatcaagaatacccccgtacctgcgaatccttcgaccacattcagcgcggcaaagtttgcttctttcatcacacagtactctacggggcaggtcagcgtggagattgagtgggagctgcagaaggaggacagcaaacgctggaaccccgaaatccagtacacttccaactacaacaagtctgttaatgtggactttactgtggacactaatggtgtgtattcagagcctcgccccattggcacaagatacctgactcgtaatctgtaa

SEQ ID NO: 3238 - DNA, 2208 bp, Artificial Sequence
  Description of Artificial Sequence: Synthetic polynucleotide
atggctgccgatggttatcttccagattggctcgaggacactctctctgaaggaataagacagtggtggaagctcaaacctggcccaccaccaccaaagcccgcagagcggcatcaggacgacagcaggggtcttgtgcttcctgggtacaagtacctcggacccttcaacggactcgacaagggagagccggtcaacgaggcagacgccgcggccctcgagcacgacaaggcctacgaccggcagctcgacagcggagacaacccgtacctcaagtacaaccacgccgacgcggagtttcaggagcgtcttaaagaagatacgtcttttgggggcaacctcggacgagcagtcttccaggcgaaaaagagggttcttgaacctctgggcctggttgaggaacctgttaagacggctccgggaaaaaagaggccggtagagcattctcctgcggagccagactcctcctcgggaaccggaaaggcgggccagcagcctgcgagaaagagattgaatttcggtcagactggagacgcagactccgtacctgacccccagcctctcggacagccaccagcagccccctctggtctgggaactaatacgatggctacaggcagtggcgcaccaatggcagacaataacgagggcgccgacggagtgggtaattcctcgggaaattggcattgcgattccacatggatgggcgacagagtcatcaccaccagcacccgaacctgggccctgcccacctacaacaaccacctctacaagcaaatctccagccaatctggagcctcaaacgacaaccactactttggctacagcaccccttgggggtattttgacttcaacagattccactgtcacttctccccacgtgactggcaaagactcatcaacaacaactggggattccgacccaagagactcaacttcaagctctttaacattcaagtcaaagaggtcacgcagaatgacggtacgacgacgattgccaataaccttaccagcacggttcaagtctttactgactcggagtaccagctcccgtacgtcctcggctcggcgcatcaaggatgcctcccgccgtttccagcagacgtcttcatggtgccacagtatggatacctcaccctgaacaacgggagtcaggcggtaggacgctcttccttttactgcctggagtactttccttctcagatgctgcgtaccggaaacaactttaccttcagctacacctttgaggacgttcctttccacagcagctacgctcacagccagagtttggaccggctgatgaatcctctgatcgaccagtatctgtattacttgagcaaaacaaacgctccaagcggaaccaccacgatgtccaggcttcagttttctcaggccggagcgagtgacattcgggaccagtctaggaactggcttcctggaccctgttaccgccagcagcgagtatcaaaaacagctgcggataacaacaacagtgattattcgtggactggagctaccaagtaccacctcaatggaagagactctctggtgaatccgggcccagctatggccagccacaaggacgatgaagaaaaatattttcctcagagcggggttctcatctttggaaaacaagactcgggaaaaactaatgtggacattgaaaaggtcatgattacagacgaagaggaaatcaggaccaccaatcccgtggctacggagcagtatggttctgtatctaccaacctccagagcggcaacacacaggcagccaccacagatgtcaacacacaaggcgttcttccaggcatggtctggcaggacagagacgtgtacctgcaaggacccatctgggcaaagattcctcacacggacggacactttcacccttctcccctcatgggaggatttggactcaaacaccctcctccgcaaatcctcatcaagaatacccccgtacctgcgaatccttcgaccacatccagcgcggcaaagtttgcttctttcatcacacagtactctacggggcaggtcagcgtggagattgagtgggagctgcagaaggagaacagcaaacgctggaaccccgaaatccagtacacttccaactacaacaagtctgttaatgtggactttactgtggacactaatggtgtgtattcagagcctcgccccattggcacaagatacctgactcgtaatctgtaa

SEQ ID NO: 3239 - DNA, 2208 bp, Artificial Sequence
  Description of Artificial Sequence: Synthetic polynucleotide
atggctgccgatggttatcttccagattggctcgaggacactctctctgaaggaataagacagtggtggaagctcaaacctggcccaccaccactaaagcccgcagagcggcatcaggacgacagcaggggtcttgtgcttcctgggtacaagtacctcggacccttcaacggactcgacaagggagagccggtcaacgaggcagacgccgcggccctcgagcacgacaaggcctacgaccggcagctcgacagcggagacaacccgtacctcaagtacaaccacgccgacgcggagtttcaggagcgtcttaaagaagatacgtcttttgggggcaacctcggacgagcagtcttccaggcgaaaaagagggttcttgaacctctgggcctggttgaggaacctgttaagacggctccgggaaaaaagaggccggtagagcattctcctgcggagccagactcctcctcgggaaccggaaaggcgggccagcagcctgcgagaaagagattgaatttcggtcagactggagacgcagactccgtacctgacccccagcctctcggacagccaccagcagccccctctggtctgggaactaatacgatggctacaggcagtggcgcaccaatggcagacaataacgagggcgccgacggagtgggtaattcctcgggaaattggcattgcgattccacatggatgggcgacagagtcatcaccaccagcacccgaacctgggccctgcccacctacaacaaccacctctacaagcaaatctccagccaatctggagcctcaaacgacaaccactactttggctacagcaccccttgggggtattttgacttcaacagattccactgtcacttctccccacgtgactggcaaagactcatcaacaacaactggggattccgacccaagagactcaacttcaagctctttaacattcaagtcaaagaggtcacgcagaatgacggtacgacgacgattgccaataaccttaccagcacggttcaagtctttactgactcggagtaccagctcccgtacgtcctcggctcggcgcatcaaggatgcctcccgccgtttccagcagacgtcttcatggtgccacagtatggatacctcaccctgaacaacgggagtcaggcggtaggacgctcttccttttactgcctggagtactttccttctcagatgctgcgtaccggaaacaactttaccttcagctacacctttgaggacgttcctttccacagcagctacgctcacagccagagtttggaccggctgatgaatcctctgatcgaccagtatctgtattacttgagcaaaacaaacgctccaagcggaaccaccacgatgtccaggcttcagttttctcaggccggagcgagtgacattcgggaccagtctaggaactggcttcctggaccctgttaccgccagcagcgagtatcaaaaacagctgcggataacaacaacagtgattattcgtggactggagctaccaagtaccacctcaatggaagagactctctggtgaatccgggcccagctatggccagccacaaggacgatgaagaaaaatattttcctcagagcggggttctcatctttggaaaacaagactcgggaaaaactaatgtggacattgaaaaggtcatgattacagacgaagaggaaatcaggaccaccaatcccgtggctacggagcagtatggttctgtatctaccaacctccagagcggcaacacacaggcagccaccacagatgtcaacacacaaggcgttcttccaggcatggtctggcaggacagagacgtgtacctgcaaggacccatctgggcaaagattcctcacacggacggacactttcacccttctcccctcatgggaggatttggactcaaacaccctcctccgccaatcctcatcaagaatacccccgtacctgcgaatccttcgaccacattcagcgcggcaaagtttgcttctttcatcacacagtactctacggggcaggtcagcgtggagattgagtgggagctgcagaaggagaacagcaaacgctggaaccccgaaatccagtacacttccaactacaacaagtctgttaatgtggactttactgtggacactaatggtgtgtattcagagcctcgccccattggcacaagatacctgactcgtaatctgtaa

SEQ ID NO: 3240 - DNA, 2208 bp, Artificial Sequence
  Description of Artificial Sequence: Synthetic polynucleotide
atggctgccgatggttatcttccagattggctcgaggacactctctctgaaggaataagacagtggtggaagctcaaacctggcccaccaccaccaaagcccgcagagcggcatcaggacgacagcaggggtcttgtgcttcctgggtacaagtacctcggacccttcaacggactcgacaagggagagccggtcaacgaggcagacgccgcggccctcgagcacgacaaggcctacgaccggcagctcgacagcggagacaacccgtacctcaagtacaaccacgccgacgcggagtttcaggagcgtcttaaagaagatacgtcttttgggggcaacctcggacgagcagtcttccaggcgaaaaagagggttcttgaacctctgggcctggttgaggaacctgttaagacggctccgggaaaaaagaggccggtagagcattctcctgcggagccagactcctcctcgggaaccggaaaggcgggccagcagcctgcgagaaagagattgaatttcggtcagactggagacgcagactccgtacctgacccccagcctctcggacagccaccagcagccccctctggtctgggaactaatacgatggctacaggcagtggcgcaccaatggcagacaataacgagggcgccgacggagtgggtaattcctcgggaaattggcattgcgattccacatggatgggcgacagagtcatcaccaccagcacccgaacctgggccctgcccacctacaacaaccacctctacaagcaaatctccagccaatctggagcctcaaacgacaaccactactttggctacagcaccccttgggggtattttgacttcaacagattccactgtcacttctccccacgtgactggcaaagactcatcaacaacaactggggattccgacccaagagactcaacttcaagctctttaacattcaagtcaaagaggtcacgcagaatgacggtacgacgacgattgccaataaccttaccagcacggttcaagtctttactgactcggagtaccagctcccgtacgtcctcggctcggcgcatcaaggatgcctcccgccgtttccagcagacgtcttcatggtgccacagtatggatacctcaccctgaacaacgggagtcaggcggtaggacgctcttccttttactgcctggagtactttccttctcagatgctgcgtaccggaaacaactttaccttcagctacacctttgaggacgttcctttccacagcagctacgctcacagccagagtttggaccggctgatgaatcctctgatcgaccagtatctgtattacttgagcaaaacaaacgctccaagcggaaccaccacgatgtccaggcttcagttttctcaggccggagcgagtgacattcgggaccagtctaggaactggcttcctggaccctgttaccgccagcagcgagtatcaaaaacagctgcggataacaacaacagtgattattcgtggactggagctaccaagtaccacctcaatggaagagactctctggtgaatccgggcccagctatggccagccacaaggacgatgaagaaaaatattttcctcagagcggggttctcatctttggaaaacaagactcgggaaaaactaatgtggacattgaaaaggtcatgattacagacgaagaggaaatcagggccaccaatcccgtggctacggagcagtatggttctgtatctaccaacctccagagcggcaacacacaggcagccaccacagatgtcaacacacaaggcgttcttccaggcatggtctggcaggacagagacgtgtacctgcaaggacccatctgggcaaagattcctcacacggacggacactttcacccttctcccctcatgggaggatttggactcaaacaccctcctccgcaaatcctcatcaagaatacccccgtacctgcgaatccttcgaccacattcagcgcggcaaagtttgcttctttcatcacacagtactctacggggcaggtcagcgtggagattgagtgggagctgcagaaggagaacagcaaacgctggaaccccgaaatccagtacacttccaactacaacaagtctgttaatgtggactttactgtggacactaatggtgtgtattcagagcctcgccccattggcacaagatacctgactcgtaatctgtaa

SEQ ID NO: 3241 - DNA, 2208 bp, Artificial Sequence
  Description of Artificial Sequence: Synthetic polynucleotide
atggctgccgatggttatcttccagattggctcgaggacactctctctgaaggaataagacagtggtggaagctcaaacctggcccaccaccaccaaagcccgcagagcggcatcaggacgacagcaggggtcttgtgcttcctgggtacaagtacctcggacccttcaacggactcgacaagggagagccggtcaacgaggcagacgccgcggccctcgagcacgacaaggcctacgaccggcagctcgacagcggagacaacccgtacctcaagtacaaccacgccgacgcggagtttcaggagcgtcttaaagaagatacgtcttttgggggcaacctcggacgagcagtcttccaggcgaaaaagagggttcttgaacctctgggcctggttgaggaacctgttaagacggctccgggaaaaaagaggccggtagagcattctcctgcggagccagactcctcctcgggaaccggaaaggcgggccagcagcctgcgagaaagagattgaatttcggtcagactggagacgcagactccgtacctgacccccagcctctcggacagccaccagcagccccctctggtctgggaactaatacgatggctacaggcagtggcgcaccaatggcagacaataacgagggcgccgacggagtgggtaattcctcgggaaattggcattgcgattccacatggatgggcgacagagtcatcaccaccagcacccgaacctgggccctgcccacctacaacaaccacctctacaagcaaatctccagccaatctggagcctcaaacgacaaccactactttggctacagcaccccttgggggtattttgacttcaacagattccactgtcacttctccccacgtgactggcaaagactcatcagcaacaactggggattccgacccaagagactcaacttcaagctctttaacattcaagtcaaagaggtcacgcagaatgacggtacgacgacgattgccaataaccttaccagcacggttcaagtctttactgactcggagtaccagctcccgtacgtcctcggctcggcgcatcaaggatgcctcccgccgtttccagcagacgtcttcatggtgccacagtatggatacctcaccctgaacaacgggagtcaggcggtaggacgctcttccttttactgcctggagtactttccttctcagatgctgcgtaccggaaacaactttaccttcagctacacctttgaggacgttcctttccacagcagctacgctcacagccagagtttggaccggctgatgaatcctctgatcgaccagtatctgtattacttgagcaaaacaaacgctccaagcggaaccaccacgatgtccaggcttcagttttctcaggccggagcgagtgacattcgggaccagtctaggaactggcttcctggaccctgttaccgccagcagcgagtatcaaaaacagctgcggataacaacaacagtgattattcgtggactggagctaccaagtaccacctcaatggaagagactctctggtgaatccgggcccagctatggccagccacaaggacgatgaagaaaaatattttcctcagagcggggttctcatctttggaaaacaagactcgggaaaaactaatgtggacattgaaaaggtcatgattacagacgaagaggaaatcaggaccaccaatcccgtggctacggagcagtatggttctgtatctaccaacctccagagcggcaacacacaggcagccaccacagatgtcaacacacaaggcgttcttccaggcatggtctggcaggacagagacgtgtacctgcaaggacccatctgggcaaagattcctcacacggacggacactttcacccttctcccctcatgggaggatttggactcaaacaccctcctccgcaaatcctcatcaagaatacccccgtacctgcgaatccttcgaccacattcagcgcggcaaagtttgcttctttcatcacacagtactctacggggcaggtcagcgtggagattgagtgggagccgcagaaggagaacagcaaacgctggaaccccgaaatccagtacacttccaactacaacaagtctgttaatgtggactttactgtggacactaatggtgtgtattcagagcctcgccccattggcacaagatacctgactcgtaatctgtaa

SEQ ID NO: 3242 - DNA, 2208 bp, Artificial Sequence
  Description of Artificial Sequence: Synthetic polynucleotide
atggctgccgatggttatcttccagattggctcgaggacactctctctgaaggaataagacagtggtggaagctcaaacctggcccaccaccaccaaagcccgcagagcggcatcaggacgacagcaggggtcttgtgcttcctgggtacaagtacctcggacccttcaacggactcgacaagggagagccggtcaacgaggcagacgccgcggccctcgagcacgacaaggcctacgaccggcagctcgacagcggagacaacccgtacctcaagtacaaccacgccgacgcggagtttcaggagcgtcttaaagaagatacgtcttttgggggcaacctcggacgagcagtcttccaggcgaaaaagggggttcttgaacctctgggcctggttgaggaacctgttaagacggctccgggaaaaaagaggccggtagagcattctcctgcggagccagactcctcctcgggaaccggaaaggcgggccagcagcctgcgagaaagagattgaatttcggtcagactggagacgcagactccgtacctgacccccagcctctcggacagccaccagcagccccctctggtctgggaactaatacgatggctacaggcagtggcgcaccaatggcagacaataacgagggcgccgacggagtgggtaattcctcgggaaattggcattgcgattccacatggatgggcgacagagtcatcaccaccagcacccgaacctgggccctgcccacctacaacaaccacctctacaagcaaatctccagccaatctggagcctcaaacgacaaccactactttggctacagcaccccttgggggtattttgacttcaacagattccactgtcacttctccccacgtgactggcaaagactcatcaacaacaactggggattccgacccaagagactcaacttcaagctctttaacattcaagtcaaagaggtcacgcagaatgacggtacgacgacgattgccaataaccttaccagcacggttcaagtctttactgactcggagtaccagctcccgtacgtcctcggctcggcgcatcaaggatgcctcccgccgtttccagcagacgtcttcatggtgccacagtatggatacctcaccctgaacaacgggagtcaggcggtaggacgctcttccttttactgcctggagtactttccttctcagatgctgcgtaccggaaacaactttaccttcagctacacctttgaggacgttcctttccacagcagctacgctcacagccagagtttggaccggctgatgaatcctctgatcgaccagtatctgtattacttgagcaaaacaaacgctccaagcggaaccaccacgatgtccaggcttcagttttctcaggccggagcgagtgacattcgggaccagtctaggaactggcttcctggaccctgttaccgccagcagcgagtatcaaaaacagctgcggataacaacaacagtgattattcgtggactggagctaccaagtaccacctcaatggaagagactctctggtgaatccgggcccagctatggccagccacaaggacgatgaagaaaaatattttcctcagagcggggttctcatctttggaaaacaagactcgggaaaaactaatgtggacattgaaaaggtcatgattacagacgaagaggaaatcaggaccaccaatcccgtggctacggagcagtatggttctgtatctaccaacctccagagcggcaacacacaggcagccaccacagatgtcaacacacaaggcgttcttccaggcatggtctggcaggacagagacgtgtacctgcaaggacccatctgggcaaagattcctcacacggacggacactttcacccttctcccctcatgggaggatttggactcaaacaccctcctccgcaaatcctcatcaagaatacccccgtacctgcgaatccttcgaccacattcagcgcggcaaagtttgcttctttcatcacacagtactctacggggcaggtcagcgtggagattgagtgggagctgcagaaggagaacagcaaacgctggaaccccgaaatccagtacacttccaactacaacaagtctgttaatgtggactttactgtggacactaatggtgtgtattcagagcctcgccccattggcacaagatacctgactcgtaatctgtaa

SEQ ID NO: 3243 - DNA, 2208 bp, Artificial Sequence
  Description of Artificial Sequence: Synthetic polynucleotide
atggctgccgatggttatcttccagattggctcgaggacactctctctgaaggaataagacagtggtggaagctcaaacctggcccaccaccaccaaagcccgcagagcggcatcaggacgacagcaggggtcttgtgcttcctgggtacaagtacctcggacccttcaacggactcgacaagggagagccggtcaacgaggcagacgccgcggccctcgagcacgacaaggcctacgaccggcagctcgacagcggagacaacccgtacctcaagtacaaccacgccgacgcggagtttcaggagcgtcttaaagaagatacgtcttttgggggcaacctcggacgagcagtcttccaggcgaaaaagagggttcttgaacctctgggcctggttgaggaacctgttaagacggctccgggaaaaaagaggccggtagagcattctcctgcggagccagactcctcctcgggaaccggaaaggcgggccagcagcctgcgagaaagagattgaatttcggtcagactggagacgcggactccgtacctgacccccagcctctcggacagccaccagcagccccctctggtctgggaactaatacgatggctacaggcagtggcgcaccaatggcagacaataacgagggcgccgacggagtgggtaattcctcgggaaattggcattgcgattccacatggatgggcgacagagtcatcaccaccagcacccgaacctgggccctgcccacctacaacaaccacctctacaagcaaatctccagccaatctggagcctcaaacgacaaccactactttggctacagcaccccttgggggtattttgacttcaacagattccactgtcacttctccccacgtgactggcaaagactcatcaacaacaactggggattccgacccaagagactcaacttcaagctctttaacattcaagtcaaagaggtcacgcagaatgacggtacgacgacgattgccaataaccttaccagcacggttcaagtctttactgactcggagtaccagctcccgtacgtcctcggctcggcgcatcaaggatgcctcccgccgtttccagcagacgtcttcatggtgccacagtatggatacctcaccctgaacaacgggagtcaggcggtaggacgctcttccttttactgcctggagtactttccttctcagatgctgcgtaccggaaacaactttaccttcagctacacctttgaggacgttcctttccacagcagctacgctcacagccagagtttggaccggctgatgaatcctctgatcgaccagtatctgtattacttgagcagaacaaacgctccaagcggaaccaccacgatgtccaggcttcagttttctcaggccggagcgagtgacattcgggaccagtctaggaactggcttcctggaccctgttaccgccagcagcgagtatcaaaaacagctgcggataacaacaacagtgattattcgtggactggagctaccaagtaccacctcaatggaagagactctctggtgaatccgggcccagctatggccagccacaaggacgatgaagaaaaatattttcctcagagcggggttctcatctttggaaaacaagactcgggaaaaactaatgtggacattgaaaaggtcatgattacagacgaagaggaaatcaggaccaccaatcccgtggctacggagcagtatggttctgtatctaccaacctccagagcggcaacacacaggcagccaccacagatgtcaacacacaaggcgttcttccaggcatggtctggcaggacagagacgtgtacctgcaaggacccatctgggcaaagattcctcacacggacggacactttcacccttctcccctcatgggaggatttggactcaaacaccctcctccgcaaatcctcatcaagaatacccccgtacctgcgaatccttcgaccacattcagcgcggcaaagtttgcttctttcatcacacagtactctacggggcaggtcagcgtggagattgagtgggagctgcagaaggagaacagcaaacgctggaaccccgaaatccagtacacttccaactacaacaagtctgttaatgtggactttactgtggacactaatggtgtgtattcagagcctcgccccattggcacaagatacctgactcgtaatctgtaa

SEQ ID NO: 3244 - DNA, 2208 bp, Artificial Sequence
  Description of Artificial Sequence: Synthetic polynucleotide
atggctgccgatggttatcttccagattggctcgaggacactctctctgaaggaataagacagtggtggaagctcaaacctggcccaccaccaccaaagcccgcagagcggcatcaggacgacagcaggggtcttgtgcttcctgggtacaagtacctcggacccttcaacggactcgacaagggagagccggtcaacgaggcagacgccgcggccctcgagcacgacaaggcctacgaccggcagctcgacagcggagacaacccgtacctcaagtacaaccacgccgacgcggagtttcaggagcgtcttaaagaagatacgtcttttgggggcaacctcggacgagcagtcttccaggcgaaaaagagggttcttgaacctctgggcctggttgaggaacctgttaagacggctccgggaaaaaagaggccggtagagcattctcctgcggagccagactcctcctcgggaaccggaaaggcgggccagcagcctgcgagaaagagattgaatttcggtcagactggagacgcagactccgtacctgacccccagcctctcggacagccaccagcagccccctctggtctgggaactaatacgatggctacaggcagtggcgcaccaatggcagacaataacgagggcgccgacggagtgggtaattcctcgggaaattggcattgcgattccacatggatgggcgacagagtcatcaccaccagcacccgaacctgggccctgcccacctacaacaaccacctctacaagcaaatctccagccaatctggagcctcaaacgacaaccactactttggctacagcaccccttgggggtattttgacttcaacagattccactgtcacttctccccacgtgactggcaaagactcatcaacaacaactggggattccgacccaagagactcaacttcaagctctttaacattcaagtcaaagaggtcacgcagaatgacggtacgacgacgattgccaataaccttaccagcacggttcaagtctttactgactcggagtaccagctcccgtacgtcctcggctcggcgcatcaaggatgcctcccgccgtttccagcagacgtcttcatggtgccacagtatggatacctcaccctgaacaacgggagtcaggcggtaggacgctcttccttttactgcctggagtactttccttctcagatgctgcgtaccggaaacaactttaccttcagctacacctttgaggacgttcctttccacagcagctacgctcacagccagagtttggaccggctgatgaatcctctgatcgaccagtatctgtattacttgagcaaaacaaacgctccaagcggaaccaccacgatgtccaggcttcagttttctcaggccggagcgagtgacattcgggaccagtctaggaactggcttcctggaccctgttaccgccagcagcgagtatcaaaaacagctgcggataacaacaacagtgattattcgtggactggagctaccaagtaccacctcaatggaagagactctctggtgaatccgggcccagctatggccagccacaaggacgatgaagaaaaatattttcctcagagcggggttctcatctttggaaaacaagactcgggaaaaactaatgtggacattgaaaaggtcatgattacagacgaagaggaaatcaggaccaccaatcccgtggctacggagcagtatggttctgtatctaccaacctccagagcggcaacacacaggcagccaccacagatgtcaacacacaaggcgttcttccaggcatggtctggcaggacagagacgtgtacctgcaaggacccatctgggcaaagattcctcacacggacggacactttcacccttctcccctcatgggaggatttggactcaaacaccctcctccgcaaatcctcatcaagaatacccccgtacctgcgaatccttcgaccacattcagcgcggcaaagtttgcttctttcatcacacagtactctacggggcaggtcagcgtggagattgagtgggagctgcagaaggagaacagcaaacgctggaaccccgaaatccagtacacttccaactacaacaagtctgttaatgtggaccttactgtggacactaatggtgtgtattcagagcctcgccccattggcacaagatacctgactcgtaatctgtaa

SEQ ID NO: 3245 - DNA, 2208 bp, Artificial Sequence
  Description of Artificial Sequence: Synthetic polynucleotide
atggctgccgatggttatcttccagattggctcgaggacactctctctgaaggaataagacagtggtggaagctcaaacctggcccaccaccactaaagcccgcagagcggcatcaggacgacagcaggggtcttgtgcttcctgggtacaagtacctcggacccttcaacggactcgacaagggagagccggtcaacgaggcagacgccgcggccctcgagcacgacaaggcctacgaccggcagctcgacagcggagacaacccgtacctcaagtacaaccacgccgacgcggagtttcaggagcgtcttaaagaagatacgtcttttgggggcaacctcggacgagcagtcttccaggcgaaaaagagggttcttgaacctctgggcctggttgaggaacctgttaagacggctccgggaaaaaagaggccggtagagcattctcctgcggagccagactcctcctcgggaaccggaaaggcgggccagcagcctgcgagaaagagattgaatttcggtcagactggagacgcagactccgtacctgacccccagcctctcggacagccaccagcagccccctctggtctgggaactaatacgatggctgcaggcagtggcgcaccaatggcagacaataacgagggcgccgacggagtgggtaattcctcgggaaattggcattgcgattccacatggatgggcgacagagtcatcaccaccagcacccgaacctgggccctgcccacctacaacaaccacctctacaagcaaatctccagccaatctggagcctcaaacgacaaccactactttggctacagcaccccttgggggtattttgacttcaacagattccactgtcacttctccccacgtgactggcaaagactcatcaacaacaactggggattccgacccaagagactcaacttcaagctctttaacattcaagtcaaagaggtcacgcagaatgacggtacgacgacgattgccaataaccttaccagcacggttcaagtctttactgactcggagtaccagctcccgtacgtcctcggctcggcgcatcaaggatgcctcccgccgtttccagcagacgtcttcatggtgccacagtatggatacctcaccctgaacaacgggagtcaggcggtaggacgctcttccttttactgcctggagtactttccttctcagatgctgcgtaccggaaacaactttaccttcagctacacctttgaggacgttcctttccacagcagctacgctcacagccagagtttggaccggctgatgaatcctctgatcgaccagtatctgtattacttgagcaaaacaaacgctccaagcggaaccaccacgatgtccaggcttcagttttctcaggccggagcgagtgacattcgggaccagtctaggaactggcttcctggaccctgttaccgccagcagcgagtatcaaaaacagctgcggataacaacaacagtgattattcgtggactggagctaccaagtaccacctcaatggaagagactctctggtgaatccgggcccagctatggccagccacaaggacgatgaagaaaaatattttcctcagagcggggttctcatctttggaaaacaagactcgggaaaaactaatgtggacattgaaaaggtcatgattacagacgaagaggaaatcaggaccaccaatcccgtggctacggagcagtatggttctgtatctaccaacctccagagcggcaacacacaggcagccaccacagatgtcaacacacaaggcgttcttccaggcatggtctggcaggacagagacgtgtacctgcaaggacccatctgggcaaagattcctcacacggacggacactttcacccttctcccctcatgggaggatttggactcaaacaccctcctccgcaaatcctcatcaagaatacccccgtacctgcgaatccttcgaccacattcagcgcggcaaagtttgcttctttcatcacacagtactctacggggcaggtcagcgtggagattgagtgggagctgcagaaggagaacagcaaacgctggaaccccgaaatccagtacacttccaactacaacaagtctgttaatgtggactttactgtggacactaatggtgtgtattcagagcctcgccccattggcacaagatacctgactcgtaatctgtaa

SEQ ID NO: 3246 - DNA, 2208 bp, Artificial Sequence
  Description of Artificial Sequence: Synthetic polynucleotide
atggctgccgatggttatcttccagattggctcgaggacactctctctgaaggaataagacagtggtggaagctcaaacctggcccaccaccaccaaagcccgcagagcggcatcaggacgacagcaggggtcttgtgcttcctgggtacaagtacctcggacccttcaacggactcgacaagggagagccggtcaacgaggcagacgccgcggccctcgagcacgacaaggcctacgaccggcagctcgacagcggagacaacccgtacctcaagtacaaccacgccgacgcggagtttcaggagcgtcttaaagaagatacgtcttttgggggcaacctcggacgagcagtcttccaggcgaaaaagagggttcttgaacctctgggcctggttgaggaacctgttaagacggctccgggaaaaaagaggccggtagagcattctcctgcggagccagactcctcctcgggaaccggaaaggcgggccagcagcctgcgagaaagagattgaatttcggtcagactggagacgcagactccgtacctgacccccagcctctcggacagccaccagcagccccctctggtctgggaactaatacgatggctacaggcagtggcgcaccaatggcagacaataacgagggcgccgacggagtgggtaattcctcgggaaattggcattgcgattccacatggatgggcgacagagtcatcaccaccagcacccgaacctgggccctgcccacctacaacaaccacctctacaagcaaatctccagccaatctggagcctcaaacgacaaccactactttggctacagcaccccttgggggtattttgacttcaacagattccactgtcacttctccccacgtgactggcaaagactcatcaacaacaactggggattccgacccaagagactcaacttcaagctctttaacattcaagtcaaagaggtcacgcagaatgacggtacgacgacgattgccaataaccttaccagcacggttcaagtctttactgactcggagtaccagctcccgtacgtcctcggctcggcgcatcaaggatgcctcccgccgtttccagcagacgtcttcatggtgccacagtatggatacctcaccctgaacaacgggagtcaggcggtaggacgctcttccttttactgcctggagtactttccttctcagatgctgcgtaccggaaacaactttaccttcagctacacctttgaggacgttcctttccacagcagctacgctcacagccagagtttggaccggctgatgaatcctctgatcgaccagtatctgtattacttgagcaaaacaaacgctccaagcggaaccaccacgatgtccaggcttcagttttctcaggccggagcgagtgacattcgggaccagtctaggaactggcttcctggaccctgttaccgccagcagcgagtatcaaaaacagctgcggataacaacaacagtgattattcgtggactggagctaccaagtaccacctcaatggaagagactctctggtgaatccgggcccagctatggccagccacaaggacgatgaagaaaaatattttcctcagagcggggttctcatctttggaaaacaagactcgggaaaaactaatgtggacattgaaaaggtcatgattacagacgaagaggaaatcaggaccaccaatcccgtggctacggagcagtatggttctgtatctaccaacctccagagcggcgacacacaggcagccaccacagatgtcaacacacaaggcgttcttccaggcatggtctggcaggacagagacgtgtacctgcaaggacccatctgggcaaagattcctcacacggacggacactttcacccttctcccctcatgggaggatttggactcaaacaccctcctccgcaaatcctcatcaagaatacccccgtacctgcgaatccttcgaccacattcagcgcggcaaagtttgcttctttcatcacacagtactctacggggcaggtcagcgtggagattgagtgggagctgcagaaggagaacagcaaacgctggaaccccgaaatccagtacacttccaactacaacaagtctgttaatgtggactttactgtggacactaatggtgtgtattcagagcctcgccccattggcacaagatacctgactcgtaatctgtaa

SEQ ID NO: 3247 - DNA, 2208 bp, Artificial Sequence
  Description of Artificial Sequence: Synthetic polynucleotide
atggctgccgatggttatcttccagattggctcgaggacactctctctgaaggaataagacagtggtggaagctcaaacctggcccaccaccaccaaagcccgcagagcggcatcaggacgacagcaggggtcttgtgcttcctgggtacaagtacctcggacccttcaacggactcgacaagggagagccggtcaacgaggcagacgccgcggccctcgagcacgacaaggcctacgaccggcagctcgacagcggaggcaacccgtacctcaagtacaaccacgccgacgcggagtttcaggagcgtcttaaagaagatacgtcttttgggggcaacctcggacgagcagtcttccaggcgaaaaagagggttcttgaacctctgggcctggttgaggaacctgttaagacggctccgggaaaaaagaggccggtagagcattctcctgcggagccagactcctcctcgggaaccggaaaggcgggccagcagcctgcgagaaagagattgaatttcggtcagactggagacgcagactccgtacctgacccccagcctctcggacagccaccagcagccccctctggtctgggaactaatacgatggctacaggcagtggcgcaccaatggcagacaataacgagggcgccgacggagtgggtaattcctcgggaaattggcattgcgattccacatggatgggcgacagagtcatcaccaccagcacccgaacctgggccctgcccacctacaacaaccacctctacaagcaaatctccagccaatctggagcctcaaacgacaaccactactttggctacagcaccccttgggggtattttgacttcaacagattccactgtcacttctccccacgtgactggcaaagactcatcaacaacaactggggattccgacccaagagactcaacttcaagctctttaacattcaagtcaaagaggtcacgcagaatgacggtacgacgacgattgccaataaccttaccagcacggttcaagtctttactgactcggagtaccagctcccgtacgtcctcggctcggcgcatcaaggatgcctcccgccgtttccagcagacgtcttcatggtgccacagtatggatacctcaccctgaacaacgggagtcaggcggtaggacgctcttccttttactgcctggagtactttccttctcagatgctgcgtaccggaaacaactttaccttcagctacacctttgaggacgttcctttccacagcagctacgctcacagccagagtttggaccggctgatgaatcctctgatcgaccagtatctgtattacttgagcaaaacaaacgctccaagcggaaccaccacgatgtccaggcttcagttttctcaggccggagcgagtgacattcgggaccagtctaggaactggcttcctggaccctgttaccgccagcagcgagtatcaaaaacagctgcggataacaacaacagtgattattcgtggactggagctaccaagtaccacctcaatggaagagactctctggtgaatccgggcccagctatggccagccacaaggacgatgaagaaaaatattttcctcagagcggggttctcatctttggaaaacaagactcgggaaaaactaatgtggacattgaaaaggtcatgattacagacgaagaggaaatcaggaccaccaatcccgtggctacggagcagtatggttctgtatctaccaacctccagagcggcaacacacaggcagccaccacagatgtcaacacacaaggcgttcttccaggcatggtctggcaggacagagacgtgtacctgcaaggacccatctgggcaaagattcctcacacggacggacactttcacccttctcccctcatgggaggatttggactcaaacaccctcctccgcaaatcctcatcaagaatacccccgtacctgcgaatccttcgaccacattcagcgcggcaaagtttgcttctttcatcacacagtactctacggggcaggtcagcgtggagattgagtgggagctgcagaaggagaacagcaaacgctggaaccccgaaatccagtacacttccaactacaacaagtctgttaatgtggactttactgtggacactaatggtgtgtattcagagcctcgccccattggcacaagatacctgactcgtaatctgtaa

SEQ ID NO: 3248 - DNA, 2208 bp, Artificial Sequence
  Description of Artificial Sequence: Synthetic polynucleotide
atggctgccgatggttatcttccagattggctcgaggacactctctctgaaggaataagacagtggtggaagctcaaacctggcccaccaccaccaaagcccgcagagcggcatcaggacgacagcaggggtcttgtgcttcctgggtacaagtacctcggacccttcaacggactcgacaagggagagccggtcaacgaggcagacgccgcggccctcgagcacgacaaggcctacgaccggcagctcgacagcggagacaacccgtacctcaagtacaaccacgccgacgcggagtttcaggagcgtcttaaagaagatacgtcttttgggggcaacctcggacgagcagtcttccaggcgaaaaagagggttcttgaacctctgggcctggttgaggaacctgttaagacggctccgggaaaaaagaggccggtagagcattctcctgcggagccagactcctcctcgggaaccggaaaggcgggccagcagcctgcgagaaagagattgaatttcggtcagactggagacgcagactccgtacctgacccccagcctctcggacagccaccagcagccccctctggtctgggaactaatacgatggctacaggcagtggcgcaccaatggcagacaataacgagggcgccgacggagtgggtaattcctcgggaaattggcattgcgattccacatggatgggcgacagagtcatcaccaccagcacccgaacctgggccctgcccacctacaacaaccacctctacaagcaaatctccagccaatctggagcctcaaacgacaaccactactttggctacagcaccccttgggggtattttgacttcaacagattccactgtcacttctccccacgtgactggcaaagactcatcaacaacaactggggattccgacccaagagactcaacttcaagctctttaacattcaagtcaaagaggtcacgcagaatgacggtacgacgacgattgccaataaccttaccagcacggttcaagtctttactgactcggagtaccagctcccgtacgtcctcggctcggcgcatcaaggatgcctcccgccgtttccagcagacgtcttcatggtgccacagtatggatacctcaccctgaacaacgggagtcaggcggtaggacgctcttccttttactgcctggagtactttccttctcagatgctgcgtaccggaaacaactttaccttcagctacacctttgaggacgttcctttccacagcagctacgctcacagccagagtttggaccggctgatgaatcctctgatcgaccagtatctgtattacttgagcaaaacaaacgctccaagcggaaccaccacgatgtccaggcttcagttttctcaggccggagcgagtgacattcgggaccagtctaggaactggcttcctggaccctgttaccgccagcagcgagtatcaaaaacagctgcggataacaacaacagtgattattcgtggactggagctaccaagtaccacctcaatggaagagactctctggtgaatccgggcccagctatggccagccacaaggacgatgaagaaaaatattttcctcagagcggggttctcatctttggaaaacaagactcgggaaaaactaatgtggacattgaaaaggtcatgattacagacgaagaggaaatcaggaccaccaatcccgtggctacggagcagtatggttctgtatctaccaacctccagagcggcaacacacaggcagccaccacagatgtcaacacacaaggcgttcttccaggcatggtctggcaggacagagacgtgtacctgcaaggacccatctgggcaaagattcctcacacggacggacactttcacccttctcccctcatgggaggatttggactcaaacaccctcctccgcaaatcctcatcaagaatacccccgtacctgcgaatccttcgaccacattcagcgcggcaaagcttgcttctttcatcacacagtactctacggggcaggtcagcgtggagattgagtgggagctgcagaaggagaacagcaaacgctggaaccccgaaatccagtacacttccaactacaacaagtctgttaatgtggactttactgtggacactaatggtgtgtattcagagcctcgccccattggcacaagatacctgactcgtaatctgtaa

SEQ ID NO: 3249 - DNA, 2208 bp, Artificial Sequence
  Description of Artificial Sequence: Synthetic polynucleotide
atggctgccgatggttatcttccagattggctcgaggacactctctctgaaggaataagacagtggtggaagctcaaacctggcccaccaccaccaaagcccgcagagcggcatcaggacgacagcaggggtcttgtgcttcctgggtacaagtacctcggacccttcaacggactcgacaagggagagccggtcaacgaggcagacgccgcggccctcgagcacgacaaggcctacgaccggcagctcgacagcggagacaacccgtacctcaagtacaaccacgccgacgcggagtttcaggagcgtcttaaagaagatacgtcttttgggggcaacctcggacgagcagtcttccaggcgaaaaagagggttcttgaacctctaggcctggttgaggaacctgttaagacggctccgggaaaaaagaggccggtagagcattctcctgcggagccagactcctcctcgggaaccggaaaggcgggccagcagcctgcgagaaagagattgaatttcggtcagactggagacgcagactccgtacctgacccccagcctctcggacagccaccagcagccccctctggtctgggaactaatacgatggctacaggcagtggcgcaccaatggcagacaataacgagggcgccgacggagtgggtaattcctcgggaaattggcattgcgattccacatggatgggcgacagagtcatcaccaccagcacccgaacttgggccctgcccacctacaacaaccacctctacaagcaaatctccagccaatctggagcctcaaacgacaaccactactttggctacagcaccccttgggggtattttgacttcaacagattccactgtcacttctccccacgtgactggcaaagactcatcaacaacaactggggattccgacccaagagactcaacttcaagctctttaacattcaagtcaaagaggtcacgcagagtgacggtacgacgacgattgccaataaccttaccagcacggttcaagtctttactgactcggagtaccagctcccgtacgtcctcggctcggcgcatcaaggatgcctcccgccgtttccagcagacgtcttcatggtgccacagtatggatacctcaccctgaacaacgggagtcaggcggtaggacgctcttccttttactgcctggagtactttccttctcagatgctgcgtaccggaaacaactttaccttcagctacacctttgaggacgttcctttccacagcagctacgctcacagccagagtttggaccggctgatgaatcctctgatcgaccagtatctgtattacttgagcaaaacaaacgctccaagcggaaccaccacgatgtccaggcttcagttttctcaggccggagcgagtgacattcgggaccagtctaggaactggcttcctggaccctgttaccgccagcagcgagtatcaaaaacagctgcggataacaacaacagtgattattcgtggactggagctaccaagtaccacctcaatggaagagactctctggtgaatccgggcccagctatggccagccacaaggacgatgaagaaaaatattttcctcagagcgggattctcatctttggaaaacaagactcgggaaaaactaatgtggacattgaaaaggtcatgattacagacgaagaggaaatcaggaccaccaatcccgtggctacggagcagtatggttctgtatctaccaacctccagagcggcaacacacaggcagccaccacagatgtcaacacacaaggcgttcttccaggcatggtctggcaggacagagacgtgtacctgcaaggacccatctgggcaaagattcctcacacggacggacactttcacccttctcccctcatgggaggatttggactcaaacaccctcctccgcaaatcctcatcaagaatacccccgtacctgcgaatccttcgaccacattcagcgcggcaaagtttgcttctttcatcacacagtaccctacggggcaggtcagcgtggagattgagtgggagctgcagaaggagaacagcaaacgctggaaccccgaaatccagtacacttccaactacaacaagtctgttaatgtggactttactgtggacactaatggtgtgtattcagagcctcgccccattggcacaagatacctgactcgtaatctgtaa

SEQ ID NO: 3250 - DNA, 2208 bp, Artificial Sequence
  Description of Artificial Sequence: Synthetic polynucleotide
atggctgccgatggttatcttccagattggctcgaggacactctctctgaaggaataagacagtggtggaagctcaaacctggcccaccaccaccaaagcccgcagagcggcatcaggacgacagcaggggtcttgtgcttcctgggtacaagtacctcggacccttcaacggactcgacaagggagagccggtcaacgaggcagacgccgcggccctcgagcacgacaaggcctacgaccggcagctcgacagcggagacaacccgtacctcaagtacaaccacgccgacgcggagtttcaggagcgtcttaaagaagatacgtcttttgggggcaacctcggacgagcagtcttccaggcgaaaaagagggttcttgaacctctgggcctggttgaggaacctgttaagacggctccgggaaaaaagaggccggtagagcattctcctgcggagccagacgcctcctcgggaaccggaaaggcgggccagcagcctgcgagaaagagattgaatttcggtcagactggagacgcagactccgtacctgacccccagcctctcggacagccaccagcagccccctctggtctgggaactaatacgatggctacaggcagtggcgcaccaatggcagacaataacgagggcgccgacggagtgggtaattcctcgggaaattggcattgcgattccacatggatgggcgacagagtcatcaccaccagcacccgaacctgggccctgcccacctacaacaaccacctctacaagcaaatctccagccaatctggagcctcaaacgacaaccactactttggctacagcaccccttgggggtattttgacttcaacagattccactgtcacttctccccacgtgactggcaaagactcatcaacaacaactggggattccgacccaagagactcaacttcaagctctttaacattcaagtcaaagaggtcacgcagaatgacggtacgacgacgattgccaataaccttaccagcacggttcaagtctttactgactcggagtaccagctcccgtacgtcctcggctcggcgcatcaaggatgcctcccgccgtttccagcagacgtcttcatggtgccacagtatggatacctcaccctgaacaacgggagtcaggcggtaggacgctcttccttttactgcctggagtactttccttctcagatgctgcgtaccggaaacaactttaccttcagctacacctttgaggacgttcctttccacagcagctacgctcacagccagagtttggaccggctgatgaatcctctgatcgaccagtatctgtattacttgagcaaaacaaacgctccaagcggaaccaccacgatgtccaggcttcagttttctcaggccggagcgagtgacattcgggaccagtctaggaactggcttcctggaccctgttaccgccagcagcgagtatcaaaaacagctgcggataacaacaacagtgattattcgtggactggagctaccaagtaccacctcaatggaagagactctctggtgaatccgggcccagctatggccagccacaaggacgatgaagaaaaatattttcctcagagcggggttctcatctttggaaaacaagactcgggaaaaactaatgtggacattgaaaaggtcatgattacagacgaagaggaaatcaggaccaccaatcccgtggctacggagcagtatggttctgtatctaccaacctccagagcggcaacacacaggcagccaccacagatgtcaacacacaaggcgttcttccaggcatggtctggcaggacagagacgtgtacctgcaaggacccatctgggcaaagattcctcacacggacggacactttcacccttctcccctcatgggaggatttggactcaaacaccctcctccgcaaatcctcatcaagaatacccccgtacctgcgaatccttcgaccacattcagcgcggcaaagtttgcttctttcatcacacagtactctacggggcaggtcagcgtggagattgagtgggagctgcagaaggagaacagcaaacgctggaaccccgaaatccagtacacttccaactacaacaagtctgttaatgtggactttactgtggacactaatggtgtgtattcagagcctcgccccattggcacaagatacctgactcgtaatctgtaa

SEQ ID NO: 3251 - DNA, 2208 bp, Artificial Sequence
  Description of Artificial Sequence: Synthetic polynucleotide
atggctgccgatggttatcttccagattggctcgaggacactctctctgaaggaataagacagtggtggaagctcaaacctggcccaccaccaccaaagcccgcagagcggcatcaggacgacagcaggggtctcgtgcttcctgggtacaagtacctcggacccttcaacggactcgacaagggagggccggtcaacgaggcagacgccgcggccctcgagcacgacaaggcctacgaccggcagctcgacagcggagacaacccgtacctcaagtacaaccacgccgacgcggagtttcaggagcgtcttaaagaagatacgtcttttgggggcaacctcggacgagcagtcttccaggcgaaaaagagggttcttgaacctctgggcctggttgaggaacctgttaagacggctccgggaaaaaagaggccggtagagcattctcctgcggagccagactcctcctcgggaaccggaaaggcgggccagcagcctgcgagaaagagattgaatttcggtcagactggagacgcagactccgtacctgacccccagcctctcggacagccaccagcagccccctctggtctgggaactaatacgatggctacaggcagtggcgcaccaatggcagacaataacgagggcgccgacggagtgggtaattcctcgggaaattggcattgcgattccacatggatgggcgacagagtcatcaccaccagcacccgaacctgggccctgcccacctacaacaaccacctctacaagcaaatctccagccaatctggagcctcaaacgacaaccactactttggctacagcaccccttgggggtattttgacttcaacagattccactgtcacttctccccacgtgactggcaaagactcatcaacaacaactggggattccgacccaagagactcaacttcaagctctttaacattcaagtcaaagaggtcacgcagaatgacggtacgacgacgattgccaataaccttaccagcacggttcaagtctttactgactcggagtaccagctcccgtacgtcctcggctcggcgcatcaaggatgcctcccgccgtttccagcagacgtcttcatggtgccacagtatggatacctcaccctgaacaacgggagtcaggcggtaggacgctcttccttttactgcctggagtactttccttctcagatgctgcgtaccggaaacaactttaccttcagctacacctttgaggacgttcctttccacagcagctacgctcacagccagagtttggaccggctgatgaatcctctgatcgaccagtatctgtattacttgagcaaaacaaacgctccaagcggaaccaccacgatgtccaggcttcagttttctcaggccggagcgagtgacattcgggaccagtctaggaactggcttcctggaccctgttaccgccagcagcgagtatcaaaaacagctgcggataacaacaacagtgattattcgtggactggagctaccaagtaccacctcaatggaagagactctctggtgaatccgggcccagctatggccagccacaaggacgatgaagaaaaatattttcctcagagcggggttctcatctttggaaaacaagactcgggaaaaactaatgtggacattgaaaaggtcatgattacagacgaagaggaaatcaggaccaccaatcccgtggctacggagcagtatggttctgtatctaccaacctccagagcggcaacacacaggcagccaccacagatgtcaacacacaaggcgttcttccaggcatggtctggcaggacagagacgtgtacctgcaaggacccatctgggcaaagattcctcacacggacggacactttcacccttctcccctcatgggaggatttggactcaaacaccctcctccgcaaatcctcatcaagaatacccccgtacctgcgaatccttcgaccacattcagcgcggcaaagtttgcttctttcatcacacagtactctacggggcaggtcagcgtggagattgagtgggagctgcagaaggagaacagcaaacgctggaaccccgaaatccagtacacttccaactacaacaagtctgttaatgtggactttactgtggacactaatggtgtgtattcagagcctcgccccattggcacaagatacctgactcgtaatctgtaa

SEQ ID NO: 3252 - DNA, 2208 bp, Artificial Sequence
  Description of Artificial Sequence: Synthetic polynucleotide
atggctgccgatggttatcttccagattggctcgaggacactctctctgaaggaataagacagtggtggaagctcaaacctggcccaccaccaccaaagcccgcagagcggcatcaggacgacagcaggggtcttgtgcttcctgggtacaagtacctcggacccttcaacggactcgacaagggagagccggtcaacgaggcagacgccgcggccctcgagcacgacaaggcctacgaccggcagctcgacagcggagacaacccgtacctcaagcacaaccacgccgacgcggagtttcaggagcgtcttaaagaagatacgtcttttgggggcaacctcggacgagcagtcttccaggcgaaaaagagggttcttgaacctctgggcctggttgaggaacctgttaagacggctccgggaaaaaagaggccggtagagcattctcctgcggagccagactcctcctcgggaaccggaaaggcgggccagcagcctgcgagaaagagattgaatttcggtcagactggagacgcagactccgtacctgacccccagcctctcggacagccaccagcagccccctctggtctgggaactaatacgatggctacaggcagtggcgcaccaatggcagacaataacgagggcgccgacggagtgggtaattcctcgggaaattggcattgcgattccacatggatgggcgacagagtcatcaccaccagcacccgaacctgggccctgcccacctacaacaaccacctctacaagcaaatctccagccaatctggagcctcaaacgacaaccactactttggctacagcaccccttgggggtattttgacttcaacagattccactgtcacttctccccacgtgactggcaaagactcatcaacaacaactggggattccgacccaagagactcaacttcaagctctttaacattcaagtcaaagaggtcacgcagaatgacggtacgacgacgattgccaataaccttaccagcacggttcaagtctttactgactcggagtaccagctcccgtacgtcctcggctcggcgcatcaaggatgcctcccgccgtttccagcagacgtcttcatggtgccacagtatggatacctcaccctgaacaacgggagtcaggcggtaggacgctcttccttttactgcctggagtactttccttctcagatgctgcgtaccggaaacaactttaccttcagctacacctttgaggacgttcctttccacagcagctacgctcacagccagagtttggaccggctgatgaatcctctgatcgaccagtatctgtattacttgagcaaaacaaacgctccaagcggaaccaccacgatgtccaggcttcagttttctcaggccggagcgagtgacattcgggaccagtctaggaactggcttcctggaccctgttaccgccagcagcgagtatcaaaaacagctgcggataacaacaacagtgattattcgtggactggagctaccaagtaccacctcaatggaagagactctctggtgaatccgggcccagctatggccagccacaaggacgatgaagaaaaatattttcctcagagcggggttctcatctttggaaaacaagactcgggaaaaactaatgtggacattgaaaaggtcatgattacagacgaagaggaaatcaggaccaccaatcccgtggctacggagcagtatggttctgtatctaccaacctccagagcggcaacacacaggcagccaccacagatgtcaacacacaaggcgttcttccaggcatggtctggcaggacagagacgtgtacctgcaaggacccatctgggcaaagattcctcacacggacggacactttcacccttctcccctcatgggaggatttggactcaaacaccctcctccgcaaatcctcatcaagaatacccccgtacctgcgaatccttcgaccacattcagcgcggcaaagtttgcttctttcatcacacagtactctacggggcaggtcagcgtggagattgagtgggagctgcagaaggagaacagcaaacgctggaaccccgaaatccagtacacttccaactacaacaagtctgttaatgtggactttactgtggacactaatggtgtgtattcagagcctcgccccattggcacaagatacctgactcgtaatctgtaa

SEQ ID NO: 3253 - DNA, 2208 bp, Artificial Sequence
  Description of Artificial Sequence: Synthetic polynucleotide
atggctgccgatggttatcttccagattggctcgaggacactctctctgaaggaataagacagtggtggaagctcaaacctggcccaccaccaccaaagcccgcagagcggcatcaggacgacagcaggggtcttgtgcttcctgggtacaagtacctcggacccttcaacggactcgacaagggagagccggtcaacgaggcagacgccgcggccctcgagcacgacaaggcctacgaccggcagctcgacagcggagacaacccgtacctcaagtacaaccacgccgacgcggagtttcaggagcgtcttaaagaagatacgtcttttgggggcaacctcggacgagcagtcttccaggcgaaaaagagggttcttgaacctctgggcctggttgaggaacctgttaagacggctccgggaaaaaagaggccggtagagcattctcctgcggagccagactcctcctcgggaaccggaaaggcgggccagcagcctgcgagaaagagattgaatttcggtcagactggagacgcagactccgtacctgacccccagcctctcggacagccaccagcagccccctctggtctgggaactaatacgatggctacaggcagtggcgcaccaatggcagacaataacgagggcgccgacggagtgggtaattcctcgggaaattggcattgcgattccacatggatgggcgacagagtcatcaccaccagcacccgaacctgggccctgcccacctacaacaaccacctctacaagcaaatctccagccaatctggagcctcaaacgacaaccactactttggctacagcaccccttgggggtattttgacttcaacagattccactgtcacttctccccacgtgactggcaaagactcatcaacaacaactggggattccgacccaagagactcaacttcaagctctttaacattcaagtcaaagaggtcacgcagaatgacggtacgacgacgattgccaataaccttaccagcacggttcaagtctttactgactcggagtaccagctcccgtacgtcctcggctcggcgcatcaaggatgcctcccgccgtttccagcaggcgtcttcatggtgccacagtatggatacctcaccctgaacaacgggagtcaggcggtaggacgctcttccttttactgcctggagtactttccttctcagatgctgcgtaccggaaacaactttaccttcagctacacctttgaggacgttcctttccacagcagctacgctcacagccagagtttggaccggctgatgaatcctctgatcgaccagtatctgtattacttgagcaaaacaaacgctccaagcggaaccaccacgatgtccaggcttcagttttctcaggccggagcgagtgacattcgggaccagtctaggaactggcttcctggaccctgttaccgccagcagcgagtatcaaaaacagctgcggataacaacaacagtgattattcgtggactggagctaccaagtaccacctcaatggaagagactctctggtgaatccgggcccagctatggccagccacaaggacgatgaagaaaaatattttcctcagagcggggttctcatctttggaaaacaagactcgggaaaaactaatgtggacattgaaaaggtcatgattacagacgaagaggaaatcaggaccaccaatcccgtggctacggagcagtatggttctgtatctaccaacctccagagcggcaacacacaggcagccaccacagatgtcaacacacaaggcgttcttccaggcatggtctggcaggacagagacgtgtacctgcaaggacccatctgggcaaagattcctcacacggacggacactttcacccttctcccctcatgggaggatttggactcaaacaccctcctccgcaaatcctcatcaagaatacccccgtacctgcgaatccttcgaccacattcagcgcggcaaagtttgcttctttcatcacacagtactctacggggcaggtcagcgtggagattgagtgggagctgcagaaggagaacagcaaacgctggaaccccgaaatccagtacacttccaactacaacaagtctgttaatgtggactttactgtggacactaatggtgtgtattcagagcctcgccccattggcacaagatacctgactcgtaatctgtaa

SEQ ID NO: 3254 - DNA, 2208 bp, Artificial Sequence
  Description of Artificial Sequence: Synthetic polynucleotide
atggctgccgatggttatcttccagattggctcgaggacactctctctgaaggaataagacagtggtggaagctcaaacctggcccaccaccaccaaagcccgcagagcggcatcaggacgacagcaggggtcttgtgcttcctgggtacaagtacctcggacccttcaacggactcgacaagggagagccggtcaacgaggcagacgccgcggccctcgagcacgacaaggcctacgaccggcagctcgacagcggagacaacccgtacctcaagtacaaccacgccgacgcggagtttcaggagcgtcttaaagaagatacgtcttttgggggcaacctcggacgagcagtcttccaggcgaaaaagagggttcttgaacctctgggcctggttgaggaacctgttaagacggctccgggaaaaaagaggccggtagagcattctcctgcggagccagactcctcctcgggaaccggaaaggcgggccagcagcctgcgagaaagagattgaatttcggtcagactggagacgcagactccgtacctgacccccagcctctcggacagccaccagcagccccctctggtctgggaactaatacgacagctacaggcagtggcgcaccaatggcagacaataacgagggcgccgacggagtgggtaattcctcgggaaattggcattgcgattccacatggatgggcgacagagtcatcaccaccagcacccgaacctgggccctgcccacctacaacaaccacctctacaagcaaatctccagccaatctggagcctcaaacgacaaccactactttggctacagcaccccttgggggtattttgacttcaacagattccactgtcacttctccccacgtgactggcaaagactcatcaacaacaactggggattccgacccaagagactcaacttcaagctctttaacattcaagtcaaagaggtcacgcagaatgacggtacgacgacgattgccaataaccttaccagcacggttcaagtctttactgactcggagtaccagctcccgtacgtcctcggctcggcgcatcaaggatgcctcccgccgtttccagcagacgtcttcatggtgccacagtatggatacctcaccctgaacaacgggagtcaggcggtaggacgctcttccttttactgcctggagtactttccttctcagatgctgcgtaccggaaacaactttaccttcagctacacctttgaggacgttcctttccacagcagctacgctcacagccagagtttggaccggctgatgaatcctctgatcgaccagtatctgtattacttgagcaaaacaaacgctccaagcggaaccaccacgatgtccaggcttcagttttctcaggccggggcgagtgacattcgggaccagtctaggaactggcttcctggaccctgttaccgccagcagcgagtatcaaaaacagctgcggataacaacaacagtgattattcgtggactggagctaccaagtaccacctcaatggaagagactctctggtgaatccgggcccagctatggccagccacaaggacgatgaagaaaaatattttcctcagagcggggttctcatctttggaaaacaagactcgggaaaaactaatgtggacattgaaaaggtcatgattacagacgaagaggaaatcaggaccaccaatcccgtggctacggagcagtatggttctgtatctaccaacctccagagcggcaacacacaggcagccaccacagatgtcaacacacaaggcgttcttccaggcatggtctggcaggacagagacgtgtacctgcaaggacccatctgggcaaagattcctcacacggacggacactttcacccttctcccctcatgggaggatttggactcaaacaccctcctccgcaaatcctcatcaagaatacccccgtacctgcgaatccttcgaccacattcagcgcggcaaagtttgcttctttcatcacacagtactctacggggcaggtcagcgtggagattgagtgggagctgcagaaggagaacagcaaacgctggaaccccgaaatccagtacacttccaactacaacaagtctgttaatgtggactttactgtggacactaatggtgtgtattcagagcctcgccccattggcacaagatacctgactcgtaatctgtaa

SEQ ID NO: 3255 - DNA, 2208 bp, Artificial Sequence
  Description of Artificial Sequence: Synthetic polynucleotide
atggctgccgatggttatcttccagattggctcgaggacactctctctgaaggaataagacagtggtggaagctcaaacctggcccaccaccaccaaagcccgcagagcggcatcaggacgacagcaggggtcttgtgcttcctgggtacaagtacctcggacccttcaacggactcgacaagggagagccggtcaacgaggcagacgccgcggccctcgagcacgacaaggcctacgaccggcagctcgacagcggagacaacccgtacctcaagtacaaccacgccgacgcggagtttcaggagcgtcttaaagaagatacgtcttttgggggcaacctcggacgagcagtcttccaggcgaaaaagagggttcttgaacctctgggcctggttgaggaacctgttaagacggctccgggaaaaaagaggccggtagagcattctcctgcggagccagactcctcctcgggaaccggaaaggcgggccagcagcctgcgagaaagagattgaatttcggtcagaccggagacgcagactccgtacctgacccccagcctctcggacagccaccagcagccccctctggtctgggaactaatacgatggctacaggcagtggcgcaccaatggcagacaataacgagggcgccgacggagtgggtaattcctcgggaaattggcattgcgattccacatggatgggcgacagagtcatcaccaccagcacccgaacctgggccctgcccacctacaacaaccacctctacaagcaaatctccagccaatctggagcctcaaacgacaaccactactttggctacagcaccccttgggggtattttgacttcaacagattccactgtcacttctccccacgtgactggcaaagactcatcatcaacaactggggattccgacccaagagactcaacttcaagctctttaacattcaagtcaaagaggtcacgcagaatgacggtacgacgacgattgccaataaccttaccagcacggttcaagtctttactgactcggagtaccagctcccgtacgtcctcggctcggcgcatcaaggatgcctcccgccgtttccagcagacgtcttcatggtgccacagtatggatacctcaccctgaacaacgggagtcaggcggtaggacgctcttccttttactgcctggagtactttccttctcagatgctgcgtaccggaaacaactttaccttcagctacacctttgaggacgttcctttccacagcagctacgctcacagccagagtttggaccggctgatgaatcctctgatcgaccagtatctgtattacttgagcaaaacaaacgctccaagcggaaccaccacgatgtccaggcttcagttttctcaggccggagcgagtgacattcgggaccagtctaggaactggcttcctggaccctgttaccgccagcagcgagtatcaaaaacagctgcggataacaacaacagtgattattcgtggactggagctaccaagtaccacctcaatggaagagactctctggtgaatccgggcccagctatggccagccacaaggacgatgaagaaaaatattttcctcagagcggggttctcatctttggaaaacaagactcgggaaaaactaatgtggacattgaaaaggtcatgattacagacgaagaggaaatcaggaccaccaatcccgtggctacggagcagtatggttctgtatctaccaacctccagagcggcaacacacaggcagccaccacagatgtcaacacacaaggcgttcttccaggcatggtctggcaggacagagacgtgtacctgcaaggacccatctgggcaaagattcctcacacggacggacactttcacccttctcccctcatgggaggatttggactcaaacaccctcctccgcaaatcctcatcaagaatacccccgtacctgcgaatccttcgaccacattcagcgcggcaaagtttgcttctttcatcacacagtactctacggggcaggtcagcgtggagattgagtgggagctgcagaaggagaacagcaaacgctggaaccccgaaatccagtacacttccaactacaacaagtctgttaatgtggactttactgtggacactaatggtgtgtattcagagcctcgccccattggcacaagatacctgactcgtaatctgtaa

SEQ ID NO: 3256 - DNA, 2208 bp, Artificial Sequence
  Description of Artificial Sequence: Synthetic polynucleotide
atggctgccgatggttatcttccagattggctcgaggacactctctctgaaggaataagacagtggtggaagctcaaacctggcccaccaccaccaaagcccgcagagcggcatcaggacgacagcaggggtcttgtgcttcctgggtacaagtacctcggacccttcaacggactcgacaagggagagccggtcaacgaggcagacgccgcggccctcgagcacgacaaggcctacgaccggcagctcgacagcggagacaacccgtacctcaagtacaaccacgccgacgcggagtttcaggagcgtcttaaagaagatacgtcttttgggggcaacctcggacgagcagtcttccaggcgaaaaagagggttcttgaacctctgggcctggttgaggaacctgttaagacggctccgggaaaaaagaggccggtagagcattctcctgcggagccagactcctcctcgggaaccggaaaggcgggccagcagcctgcgagaaagagattgaatttcggtcagactggagacgcagactccgtacctgacccccagcctctcggacagccaccagcagccccctctggtctgggaactaatacgatggctacaggcagtggcgcaccaatggcagacaataacgagggcgccgacggagtgggtaattcctcgggaaattggcattgcgattccacatggatgggcgacagagtcatcaccaccagcacccgaacctgggccctgcccacctacaacaaccacctctacaagcaaatctccagccaatctggagcctcaaacgacaaccactactttggctacagcaccccttgggggtattttgacttcaacagattccactgtcacttctccccacgtgactggcaaagactcatcaacaacaactggggattccgacccaagagactcaacttcaagctctttaacattcaagtcaaagaggtcacgcagaatgacggtacgacgacgattgccaataaccttaccagcacggttcaagtctttactgactcggagtaccagctcccgtacgtcctcggctcggcgcatcaaggatgcctcccgccgtttccagcagacgtcttcatggtgccacagtatggatacctcaccctgaacaacgggagtcaggcggtaggacgctcttccttttactgcctggagtactttccttctcagatgctgcgtaccggaaacaactttaccttcagctacacctttgaggacgttcctttccacagcagctacgctcacagccagagtttggaccggctgatgaatcctctgatcgaccagtatctgtattacttgagcaaaacaaacgctccaagcggaaccaccacgatgtccaggcttcagttttctcaggccggagcgagtgacattcgggaccagtctaggaactggcttcctggaccctgttaccgccagcagcgagtatcaaaaacagctgcggataacaacaacagtgattattcgtggactggagctaccaagtaccacctcaatggaagagactctctggtgaatccgggcccagctatggccagccacaaggacgatgaagagaaatattttcctcagagcggggttctcatctttggaaaacaagactcgggaaaaactaatgtggacattgaaaaggtcatgattacagacgaagaggaaatcaggaccaccaatcccgtggctacggagcagtatggttctgtatctaccaacctccagagcggcaacacacaggcagccaccacagatgtcaacacacaaggcgttcttccaggcatggtctggcaggacagagacgtgtaccagcaaggacccatctgggcaaagattcctcacacggacggacactttcacccttctcccctcatgggaggatttggactcaaacaccctcctccgcaaatcctcatcaagaatacccccgtacctgcgaatccttcgaccacattcagcgcggcaaagcttgcttctttcatcacacagtactctacggggcaggtcagcgtggaggttgagtgggagctgcagaaggagaacagcaaacgctggaaccccgaaatccagtacacttccaactacaacaagtctgttaatgtggactttactgtggacactaatggtgtgtattcagagcctcgccccattggcacaagatacctgactcgtaatctgtaa

SEQ ID NO: 3257 - DNA, 2208 bp, Artificial Sequence
  Description of Artificial Sequence: Synthetic polynucleotide
atggctgccgatggttatcttccagattggctcgaggacactctctctgaaggaataagacagtggtggaagctcaaacctggcccaccaccaccaaagcccgcagagcggcatcaggacgacagcaggggtcttgtgcttcctgggtacaagtacctcggacccttcaacggactcgacaagggagagccggtcaacgaggcagacgccgcggccctcgagcacgacaaggcctacgaccggcagctcgacagcggagacaacccgtacctcaagtacaaccacgccgacgcggagtttcaggagcgtcttaaagaagatacgtcttttgggggcaacctcggacgagcagtcttccaggcgaaaaagagggttcttgaacctctgggcctggttgaggaacctgttaagacggctccgggaaaaaagaggccggtagagcattctcctgcggagccagactcctcctcgggaaccggaaaggcgggccagcagcctgcgagaaagagattgaatttcggtcagactggagacgcagactccgtacctgacccccagcctctcggacagccaccagcagccccctctggtctgggaactaatacgatggctacaggcagtggcgcaccaatggcagacagtaacgagggcgccgacggagtgggtaattcctcgggaaattggcattgcgattccacatggatgggcgacagagtcatcaccaccagcacccgaacctgggccctgcccacctacaacaaccacctctacaagcaaatctccagccaatctggagcctcaaacgacaaccactactttggctacagcaccccttgggggtattttgacttcaacagattccactgtcacttctccccacgtgactggcaaagactcatcaacaacaactggggattccgacccaagagactcaacttcaagctctttaacattcaagtcaaagaggtcacgcagaatgacggtacgacgacgattgccaataaccttaccagcacggttcaagtctttactgactcggagtaccagctcccgtacgtcctcggctcggcgcatcaaggatgcctcccgccgtttccagcagacgtcttcatggtgccacagtatggatacctcaccctgaacaacgggagtcaggcggtaggacgctcttccttttactgcctggagtactttccttctcagatgctgcgtaccggaaacaactttaccttcagctacacctttgaggacgttcctttccacagcagctacgctcacagccagagtttggaccggctgatgaatcctctgatcgaccagtatctgtattacttgagcaaaacaaacgctccaagcggaaccaccacgatgtccaggcttcagttttctcaggccggagcgagtgacattcgggaccagtctaggaactggcttcctggaccctgttaccgccagcagcgagtatcaaaaacagctgcggataacaacaacagtgattattcgtggactggagctaccaagtaccacctcaatggaagagactctctggtgaatccgggcccagctatggccagccacaaggacgatgaagaaaaatattttcctcagagcggggttctcatctttggaaaacaagactcgggaaaaactaatgtggacattgaaaaggtcatgattacagacgaagaggaaatcaggaccaccaatcccgtggctacggagcagtatggttctgtatctaccaacctccagagcggcaacacacaggcagccaccacagatgtcaacacacaaggcgttcttccaggcatggtctggcaggacagagacgtgtacctgcaaggacccatctgggcaaagattcctcacacggacggacactttcacccttctcccctcatgggaggatttggactcaaacaccctcctccgcaaatcctcatcaagaatacccccgtacctgcgaatccttcgaccacattcagcgcggcaaagtttgcttctttcatcacacagtactctacggggcaggtcagcgtggagattgagtgggagctgcagaaggagaacagcaaacgctggaaccccgaaatccagtacacttccaactacaacaagtctgttaatgtggactttactgtggacactaatggtgtgtattcagagcctcgccccattggcacaagatacctgactcgtaatctgtaa

SEQ ID NO: 3258 - DNA, 2208 bp, Artificial Sequence
  Description of Artificial Sequence: Synthetic polynucleotide
atggctgccgatggttatcttccagattggctcgaggacactctctctgaaggaataagacagtggtggaagctcaaacctggcccaccaccaccaaagcccgcagagcggcatcaggacgacagcaggggtcttgtgcttcctgggtacaagtacctcggacccttcaacggactcgacaagggagagccggtcaacgaggcagacgccgcggccctcgagcacgacaaggcctacgaccggcagctcgacagcggagacaacccgtacctcaagtacaaccacgccgacgcggagtttcaggagcgtcttaaagaagatacgtcttttgggggcaacctcggacgagcagtcttccaggcgaaaaagagggttcttgaacctctgggcctggttgaggaacctgttaagacggctccgggaaaaaagaggccggtagagcattctcctgcggagccagactcctcctcgggaaccggaaaggcgggccagcagcctgcgagaaagagattgaatttcggtcagactggagacgcagactccgtacctgacccccagcctctcggacagccaccagcagccccctctggtctgggaactaatacgatggctacaggcagtggcgcaccaatggcagacaataacgagggcgccgacggagtgggtaattcctcgggaaattggcattgcgattccacatggatgggcgacagagtcatcaccaccagcacccgaacctgggccctgcccacctacaacaaccacctctacaagcaaatctccagccaatctggagcctcaaacgacaaccactactttggctacagcaccccttgggggtattttgacttcaacagattccactgtcacttctccccacgtgactggcaaagactcatcaacaacaactggggattccgacccaagagactcaacttcaagctctttaacattcaagtcaaagaggtcacgcagaatgacggtacgacgacgattgccaataaccttaccagcacggttcaagtctttactgactcggagtaccagctcccgtacgtcctcggctcggcgcatcaaggatgcctcccgccgtttccagcagacgtctccatggtgccacagtatggatacctcaccctgaacaacgggagtcaggcggtaggacgctcttccttttactgcctggagtactttccttctcagatgctgcgtaccggaaacaactttaccttcagctacacctttgaggacgttcctttccacagcagctacgctcacagccagagtttggaccggctgatgaatcctctgatcgaccagtatctgtattacttgagcaaaacaaacgctccaagcggaaccaccacgatgtccaggcttcagttttctcaggccggagcgagtgacattcgggaccagtctaggaactggcttcctggaccctgttaccgccagcagcgagtatcaaaaacagctgcggataacaacaacagtgattattcgtggactggagctaccaagtaccacctcaatggaagagactctctggtgaatccgggcccagctatggccagccacaaggacgatgaagaaaaatattttcctcagagcggggttctcatctttggaaaacaagactcgggaaaaactaatgtggacattgaaaaggtcatgattacagacgaagaggaaatcaggaccaccaatcccgtggctacggagcagtatggttctgtatctaccaacctccagagcggcaacacacaggcagccaccacagatgtcaacacacaaggcgttcttccaggcatggtctggcaggacagagacgtgtacctgcaaggacccatctgggcaaagattcctcacacggacggacactttcacccttctcccctcatgggaggatttggactcaaacaccctcctccgcaaatcctcatcaagaatacccccgtacctgcgaatccttcgaccacattcagcgcggcaaagtttgcttctttcatcacacagtactctacggggcaggtcagcgtggagattgagtgggagctgcagaaggagaacagcaaacgctggaaccccgaaatccagtacacttccaactacaacaagtctgttaatgtggactttactgtggacactaatggtgtgtattcagagcctcgccccattggcacaagatacctgactcgtaatctgtaa

SEQ ID NO: 3259 - DNA, 2208 bp, Artificial Sequence
  Description of Artificial Sequence: Synthetic polynucleotide
atggctgccgatggttatcttccagattggctcgaggacactctctctgaaggaataagacagtggtggaagctcaaacctggcccaccaccaccaaagcccgcagagcggcatcaggacgacagcaggggtcttgtgcttcctgggtacaagtacctcggacccttcaacggactcgacaagggagagccggtcaacgaggcagacgtcgcggccctcgagcacgacaaggcctacgaccggcagctcgacagcggagacaacccgtacctcaagtacaaccacgccgacgcggagtttcaggagcgtcttaaagaagatacgtcttttgggggcaacctcggacgagcagtcttccaggcgaaaaagagggttcttgaacctctgggcctggttgaggaacctgttaagacggctccgggaaaaaagaggccggtagagcattctcctgcggagccagactcctcctcgggaaccggaaaggcgggccagcagcctgcgagaaagagattgaatttcggtcagactggagacgcagactccgtacctgacccccagcctctcggacagccaccagcagccccctctggtctgggaactaatacgatggctacaggcagtggcgcaccaatggcagacaataacgagggcgccgacggagtgggtaattcctcgggaaattggcattgcgattccacatggatgggcgacagagtcatcaccaccagcacccgaacctgggccctgcccacctacaacaaccacctctacaagcaaatctccagccaatctggagcctcaaacgacaaccactactttggctacagcaccccttgggggtattttgacttcaacagattccactgtcacttctccccacgtgactggcaaagactcatcaacaacaactggggattccgacccaagagactcaacttcaagctctttaacattcaagtcaaagaggtcacgcagaatgacggtacgacgacgattgccaataaccttaccagcacggttcaagtctttactgactcggagtaccagctcccgtacgtcctcggctcggcgcatcaaggatgcctcccgccgtttccagcagacgtcttcatggtgccacagtatggatacctcaccctgaacaacgggagtcaggcggtaggacgctcttccttttactgcctggagtactttccttctcagatgctgcgtaccggaaacaactttaccttcagctacacctttgaggacgttcctttccacagcagctacgctcacagccagagtttggaccggctgatgaatcctctgatcgaccagtatctgtattacttgagcaaaacaaacgctccaagcggaaccaccacgatgtccaggcttcagttttctcaggccggagcgagtgacattcgggaccagtctaggaactggcttcctggaccctgttaccgccagcagcgagtatcaaaaacagctgcggataacaacaacagtgattattcgtggactggagctaccaagtaccacctcaatggaagagactctctggtgaatccgggcccagctatggccagccacaaggacgatgaagaaaaatattttcctcagagcggggttctcatctttggaaaacaagactcgggaaaaactaatgtggacattgaaaaggtcatgattacagacgaagaggaaatcaggaccaccaatcccgtggctacggagcagtatggtcctgtatctaccaacctccagagcggcaacacacaggcagccaccacagatgtcaacacacaaggcgttcttccaggcatggtctggcagggcagagacgtgtacctgcaaggacccatctgggcaaagattcctcacacggacggacactttcacccttctcccctcatgggaggatttggactcaaacaccctcctccgcaaatcctcatcaagaatacccccgtacctgcgaatccttcgaccacattcagcgcggcaaagtttgcttctttcatcacacagtactctacggggcaggtcagcgtggagattgagtgggagctgcagaaggagaacagcaaacgctggaaccccgaaatccagtacacttccaactacaacaagtctgttaatgtggactttactgtggacactaatggtgtgtattcagagcctcgccccattggcacaagatacctgactcgtaatctgtaa

SEQ ID NO: 3260 - DNA, 2208 bp, Artificial Sequence
  Description of Artificial Sequence: Synthetic polynucleotide
atggctgccgatggttatcttccagattggctcgagggcactctctctgaaggaataagacagtggtggaagctcaaacctggcccaccaccaccaaagcccgcagagcggcatcaggacgacagcaggggtcttgtgcttcctgggtacaagtacctcggacccttcaacggactcgacaagggagagccggtcaacgaggcagacgccgcggccctcgagcacgacaaggcctacgaccggcagctcgacagcggagacaacccgtacctcaagtacaaccacgccgacgcggagtttcaggagcgtcttaaagaagatacgtcttttgggggcaacctcggacgagcagtcttccaggcgaaaaagagggttcttgaacctctgggcctggttgaggaacctgttaagacggctccgggaaaaaagaggccggtagagcattctcctgcggagccagactcctcctcgggaaccggaaaggcgggccagcagcctgcgagaaagagattgaatttcggtcagactggagacgcagactccgtacctgacccccagcctctcggacagccaccagcagccccctctggtctgggaactaatacgatggctacaggcagtggcgcaccaatggcagacaataacgagggcgccgacggagtgggtaattcctcgggaaattggcattgcgattccacatggatgggcgacagagtcatcaccaccagcacccgaacctgggccctgcccacctacaacaaccacctctacaagcaaatctccagccaatctggagcctcaagcgacaaccactactttggctacagcaccccttgggggtattttgacttcaacagattccactgtcacttctccccacgtgactggcaaagactcatcaacaacaactggggattccgacccaagagactcaacttcaagctctttaacattcaagtcaaagaggtcacgcagaatgacggtacgacgacgattgccaataaccttaccagcacggttcaagtctttactgactcggagtaccagctcccgtacgtcctcggctcggcgcatcaaggatgcctcccgccgtttccagcagacgtcttcatggtgccacagtatggatacctcaccctgaacaacgggagtcaggcggtaggacgctcttccttttactgcctggagtactttccttctcagatgctgcgtaccggaaacaactttaccttcagctacacctttgaggacgttcctttccacagcagctacgctcacagccagagtttggaccggctgatgaatcctctgatcgaccagtatctgtattacttgagcaaaacaaacgctccaagcggaaccaccacgatgtccaggcttcagttttctcaggccggagcgagtgacattcgggaccagtctaggaactggcttcctggaccctgttaccgccagcagcgagtatcaaaaacagctgcggataacaacaacagtgattattcgtggactggagctaccaagtaccacctcaatggaagagactctctggtgaatccgggcccagctatggccagccacaaggacgatgaagaaaaatattttcctcagagcggggttctcatctttggaaaacaagactcgggaaaaactaatgtggacattgaaaaggtcatgattacagacgaagaggaaatcaggaccaccaatcccgtggctacggagcagtatggttctgtatctaccaacctccagagcggcaacacacaggcagccaccacagatgtcaacacacaaggcgttcttccaggcatggtctggcaggacagagacgtgtacctgcaaggacccatctgggcaaagattcctcacacggacggacactttcacccttctcccctcatgggaggatttggactcaaacaccctcctccgcaaatcctcatcaagaatacccccgtacctgcgaatccttcgaccacattcagcgcggcaaagcttgcttctttcatcacacagtactctacggggcaggtcagcgtggagattgagtgggagctgcagaaggagaacagcaaacgctggaaccccgaaatccagtacacttccaactacaacaagtctgttaatgtggactttactgtggacactaatggtgtgtattcagagcctcgccccattggcacaagatacctgactcgtaatctgtaa

SEQ ID NO: 3261 - DNA, 2208 bp, Artificial Sequence
  Description of Artificial Sequence: Synthetic polynucleotide
atggctgccgatggttatcttccagattggctcgaggacactctctctgaaggaataagacagtggtggaagctcaaacctggcccaccaccaccaaagcccgcagagcggcatcaggacgacagcaggggtcttgtgcttcctgggtacaagtacctcggacccttcaacggactcgacaagggagagccggtcaacgaggcagacgtcgcggccctcgagcacgacaaggcctacgaccggcagctcgacagcggagacaacccgtacctcaagtacaaccacgccgacgcggagtttcaggagcgtcttaaagaagatacgtcttttgggggcaacctcggacgagcagtcttccaggcgaaaaagagggttcttgaacctctgggcctggttgaggaacctgttaagacggctccgggaaaaaagaggccggtagagcattctcctgcggagccagactcctcctcgggaaccggaaaggcgggccagcagcctgcgagaaagagattgaatttcggtcagactggagacgcagactccgtacctgacccccagcctctcggacagccaccagcagccccctctggtctgggaactaatacgatggctacaggcagtggcgcaccaatggcagacaataacgagggcgccgacggagtgggtaattcctcgggaaattggcattgcgattccacatggatgggcgacagagtcatcaccaccagcacccgaacctgggccctgcccacctacaacaaccacctctacaagcaaatctccagccaatctggagcctcaaacgacaaccactactttggctacagcaccccttgggggtattttgacttcaacagattccactgtcacttctccccacgtgactggcaaagactcatcaacaacaactggggattccgacccaagagacccaacttcaagctctttaacattcaagtcaaagaggtcacgcagaatgacggtacgacgacgattgccaataaccttaccagcacggttcaagtctttactgactcggagtaccagctcccgtacgtcctcggctcggcgcatcaaggatgcctcccgccgtttccagcagacgtcttcatggtgccacagtatggatacctcaccctgaacaacgggagtcaggcggtaggacgctcttccttttactgcctggagtactttccttctcagatgctgcgtaccggaaacaactttaccttcagctacacctttgaggacgttcctttccacagcagctacgctcacagccagagtttggaccggctgatgaatcctctgatcgaccagtatctgtattacttgagcaaaacaaacgctccaagcggaaccaccacgatgtccaggcttcagttttctcaggccggagcgagtgacattcgggaccagtctaggaactggcttcctggaccctgttaccgccagcagcgagtatcaaaaacagctgcggataacaacaacagtgattattcgtggactggagctaccaagtaccacctcaatggaagagactctctggtgaatccgggcccagctatggccagccacaaggacgatgaagaaaaatattttcctcagagcggggttctcatctttggaaaacaagactcgggaaaaactaatgtggacattgaaaaggtcatgattacagacgaagaggaaatcaggaccaccaatcccgtggctacggagcagtatggttctgtatctaccaacctccagagcggcaacacacaggcagccaccacagatgtcaacacacaaggcgttcttccaggcatggtctggcaggacagagacgtgtacctgcaaggacccatctgggcaaagattcctcacacggacggacactttcacccttctcccctcatgggaggatttggactcaaacaccctcctccgcaaatcctcatcaagaatacccccgtacctgcgaatccttcgaccacattcagcgcggcaaagtttgcttctttcatcacacagtactctacggggcaggtcagcgtggagattgagtgggagctgcagaaggagaacagcaaacgctggaaccccgaaatccagtacacttccaactacaacaagtctgttaatgtggactttactgtggacactaatggtgtgtattcagagcctcgccccattggcacaagatacctgactcgtaatctgtaa

SEQ ID NO: 3262 - DNA, 2208 bp, Artificial Sequence
  Description of Artificial Sequence: Synthetic polynucleotide
atggctgccgatggttatcttccagattggctcgaggacactctctctgaaggaataagacagtggtggaagctcaaacctggcccaccaccaccaaagcccgcagagcggcatcaggacgacagcaggggtcttgagcttcctgggtacaagtacctcggacccttcaacggactcgacaagggagagccggtcaacgaggcagacgccgcggccctcgagcacgacaaggcctacgaccggcagctcgacagcggagacaacccgtacctcaagtacaaccacgccgacgcggagtttcaggagcgtcttaaagaagatacgtcttttgggggcaacctcggacgagcagtcttccaggcgaaaaagagggttcttgaacctctgggcctggttgaggaacctgttaagacggctccgggaaaaaagaggccggtagagcattctcctgcggagccagactcctcctcgggaaccggaaaggcgggccagcagcctgcgagaaagagattgaatttcggtcagactggagacgcagactccgtacctgacccccagcctctcggacagccaccagcagccccctctggtctgggaactaatacgatggctacaggcagtggcgcaccaatggcagacaataacgagggcgccgacggagtgggtaattcctcgggaaattggcattgcgattccacatggatgggcgacagagtcatcaccaccagcacccgaacctgggccctgcccacctacaacaaccacctctacaagcaaatctccagccaatctggagcctcaaacgacaaccactactttggctacagcaccccttgggggtattttgacttcaacagattccactgtcacttctccccacgtgactggcaaagactcatcaacaacaactggggattccgacccaagagactcaacttcaagctctttaacattcaagtcaaagaggtcacgcagaatgacggtacgacgacgattgccaataaccttaccagcacggttcaagtctttactgactcggagtaccagctcccgtacgtcctcggctcggcgcatcaaggatgcctcccgccgtttccagcagacgtcttcatggtgccacagtatggatacctcaccctgaacaacgggagtcaggcggtaggacgctcttccttttactgcctggagtactttccttctcagatgctgcgtaccggaaacaactttaccttcagctacacctttgaggacgttcctttccacagcagctacgctcacagccagagtttggaccggctgatgaatcctctgatcgaccagtatctgtattacttgagcaaaacaaacgctccaagcggaaccaccacgatgtccaggcttcagttttctcaggccggagcgagtgacattcgggaccagtctaggaactggcttcctggaccctgttaccgccagcagcgagtatcaaaaacagctgcggataacaacaacagtgattattcgtggactggagctaccaagtaccacctcaatggaagagactctctggtgaatccgggcccagctatggccagccacaaggacgatgaagaaaaatattttcctcagagcggggttctcatctttggaaaacaagactcgggaaaaactaatgtggacattgaaaaggtcatgattacagacgaagaggaaatcaggaccaccaatcccgtggctacggagcagtatggttctgtatctaccaacctccagagcggcaacacacaggcagccaccacagatgtcaacacacaaggcgttcttccaggcatggtctggcaggacagagacgtgtacctgcaaggacccatctgggcaaagattcctcacacggacggacactttcacccttctcccctcatgggaggatttggactcaaacaccctcctccgcaaatcctcatcaagaatacccccgtacctgcgaatccttcgaccacattcagcgcggcaaagtttgcttctttcatcacacagtactctacggggcaggtcagcgtggagattgagtgggagctgcagaaggagaacagcaaacgctggaaccccgaaatccagtacacttccaactacaacaagtctgttaatgtggactttactgtggacactaatggtgtgtattcagagcctcgccccattggcacaagatacctgactcgtaatctgtaa

SEQ ID NO: 3263 - DNA, 2208 bp, Artificial Sequence
  Description of Artificial Sequence: Synthetic polynucleotide
atggctgccgatggttatcttccagattggctcgaggacaccctctctgagggaataagacagtggtggaagctcaaacctggcccaccaccaccaaagcccgcagagcggcatcaggacgacagcaggggtcttgtgcttcctgggtacaagtacctcggacccttcaacggactcgacaagggagagccggtcaacgaggcagacgccgcggccctcgagcacgacaaggcctacgaccggcagctcgacagcggagacaacccgtacctcaagtacaaccacgccgacgcggagtttcaggagcgtcttaaagaagatacgtcttttgggggcaacctcggacgagcagtcttccaggcgaaaaagagggttcttgaacctctgggcctggttgaggaacctgttaagacggctccgggaaaaaagaggccggtagagcattctcctgcggagccagactcctcctcgggaaccggaaaggcgggccagcagcctgcgagaaagagattgaatttcggtcagactggagacgcagactccgtacctgacccccagcctctcggacagccaccagcagccccctctggtctgggaactaatacgatggctacaggcagtggcgcaccaatggcagacaataacgagggcgccgacggagtgggtaattcctcgggaaattggcattgcgattccacatggatgggcgacagagtcatcaccaccagcacccgaacctgggccctgcccacctacaacaaccacctctacaagcaaatctccagccaatctggagcctcaaacgacaaccactactttggctacagcaccccttgggggtattttgacttcaacagattccactgtcacttctccccacgtgactggcaaagactcatcaacaacaactggggattccgacccaagagactcaacttcaagctctttaacattcaagtcaaagaggtcacgcagaatgacggtatgacgacgattgccaataaccttaccagcacggttcaagtctttactgactcggagtaccagctcccgtacgtcctcggctcggcgcatcaaggatgcctcccgccgtttccagcagacgtcttcatggtgccacagtatggatacctcaccctgaacaacgggagtcaggcggtaggacgctcttccttttactgcctggagtactttccttctcagatgctgcgtaccggaaacaactttaccttcagctacacctttgaggacgttcctttccacagcagctacgctcacagccagagtttggaccggctgatgaatcctctgatcgaccagtatctgtattacttgagcaaaacaaacgctccaagcggaaccaccacgatgtccaggcttcagttttctcaggccggagcgagtgacattcgggaccagtctaggaactggcttcctggaccctgttaccgccagcagcgagtatcaaaaacagctgcggataacaacaacagtgattattcgtggactggagctaccaagtaccacctcaatggaagagactctctggtgaatccgggcccagctatggccagccacaaggacgatgaagaaaaatattttcctcagagcggggttctcatctttggaaaacaagactcgggaaaaactaatgtggacattgaaaaggtcatgattacagacgaagaggaaatcaggaccaccaatcccgtggctacggagcagtatggttctgtatctaccaacctccagagcggcaacacacaggcagccaccacagatgtcaacacacaaggcgttcttccaggcatggtctggcaggacagagacgtgtacctgcaaggacccatctgggcaaagattcctcacacggacggacactttcacccttctcccctcatgggaggatttggactcaaacaccctcctccgcaaatcctcatcaagaatacccccgtacctgcgaatccttcgaccacattcagcgcggcaaagtttgcttctttcatcacacagtactctacggggcaggtcagcgtggagattgagtgggagctgcagaaggagaacagcaaacgctggaaccccgaaatccagtacacttccaactacaacaagtctgttaatgtggactttactgtggacactaatggtgtgtattcagagcctcgccccattggcacaagatacctgactcgtaatctgtaa

SEQ ID NO: 3264 - DNA, 2208 bp, Artificial Sequence
  Description of Artificial Sequence: Synthetic polynucleotide
atggctgccgatggttatcttccagattggctcgaggacactctctctgaaggaataagacagtggtggaagctcaaacctggcccaccaccactaaagcccgcagagcggcatcaggacgacagcaggggtcttgtgcttcctgggtacaagtacctcggacccttcaacggactcgacaagggagagccggtcaacgaggcagacgccgcggccctcgagcacgacaaggcctacgaccggcagctcgacagcggagacaacccgtacctcaagtacaaccacgccgacgcggagtttcaggagcgtcttaaagaagatacgtcttttgggggcaacctcggacgagcagtcttccaggcgaaaaagagggttcttgaacctctgggcctggttgaggaacctgttaagacggctccgggaaaaaagaggccggtagagcattctcctgcggagccagactcctcctcgggaaccggaaaggcgggccagcagcctgcgagaaagagattgaatttcggtcagactggagacgcagactccgtacctgacccccagcctctcggacagccaccagcagccccctctggtctgggaactaatacgatggctacaggcagtggcgcaccaatggcagacaataacgagggcgccgacggagtgggtaattcctcgggaaattggcattgcgattccacatggatgggcgacagagtcatcaccaccagcacccgaacctgggccctgcccacctacaacaaccacctctacaagcaaatctccagccaatctggagcctcaaacgacaaccactactttggctacagcaccccttgggggtattttgacttcaacagattccactgtcacttctccccacgtgactggcaaagactcatcaacaacaactggggattccgacccaagagactcaacttcaagctctttaacattcaagtcaaagaggtcacgcagaatgacggtacgacgacgattgccaataaccttaccagcacggttcaagtctttactgactcggagtaccagctcccgtacgtcctcggctcggcgcatcaaggatgcctcccgccgtttccagcagacgtcttcatggtgccacagtatggatacctcaccctgaacaacgggagtcaggcggtaggacgctcttccttttactgcctggagtactttccttctcagatgctgcgtaccggaaacaactttaccttcagctacacctttgaggacgttcctttccacagcagctacgctcacagccagagtttggaccggctgatgaatcctctgatcgaccagtatctgtattacttgagcaaaacaaacgctccaagcggaaccaccacgatgtccaggcttcagttttctcaggccggagcgagtgacattcgggaccagtctaggaactggcttcctggaccctgttaccgccagcagcgagtatcaaaaacagctgcggataacaacaacagtgattattcgtggactggagctaccaagtaccacctcaatggaagagactctctggtgaatccgggcccagctatggccagccacaaggacgatgaagaaaaatattttcctcagagcggggttctcatctttggaaaacaagactcgggaaaaactaatgtggacattgaaaaggtcatgattacagacgaagaggaaatcaggaccaccaatcccgtggctacggagcagtatggttctgtatctaccaacctccagagcggcaacacacaggcagccaccacagatgtcaacacacaaggcgttcctccaggcatggtctggcaggacagagacgtgtacctgcaaggacccatctgggcaaagattcctcacacggacggacactttcacccttctcccctcatgggaggatttggactcaaacaccctcctccgcaaatcctcatcaagaatacccccgtacctgcgaatccttcgaccacattcagcgcggcaaagtttgcttctttcatcacacagtactctacggggcaggtcagcgtggagattgagtgggagctgcagaaggagaacagcaaacgctggaaccccgaaatccagtacacttccaactacaacaagtctgttaatgtggactttactgtggacactaatggtgtgtattcagagcctcgccccattggcacaagatacctgactcgtaatctgtaa

SEQ ID NO: 3265 - DNA, 2208 bp, Artificial Sequence
  Description of Artificial Sequence: Synthetic polynucleotide
atggctgccgatggttatcttccagattggctcgaggacactctctctgaaggaataagacagtggtggaagctcaaacctggcccaccaccaccaaagcccgcagagcggcatcaggacgacagcaggggtcttgtgcttcctgggtacaagtacctcggacccttcaacggactcgacaagggagagccggtcaacgaggcagacgccgcggccctcgagcacgacaaggcctacgaccggcagctcgacagcggagacaacccgtacctcaagtacaaccacgccgacgcggagtttcaggagcgtcttaaagaagatacgtcttttgggggcaacctcggacgagcagtcttccaggcgaaaaagagggttcttgaacctctgggcctggttgaggaacctgttaagacggctccgggaaaaaagaggccggtagagcattctcctgcggagccagactcctcctcgggaaccggaaaggcgggccagcagcctgcgagaaagagattgaatttcggtcagactggagacgcagactccgtacctgacccccagcctctcggacagccaccagcagccccctctggtctgggaactaatacgatggctacaggcagtggcgcaccaatggcagacaataacgagggcgccgacggagtgggtaattcctcgggaaattggcattgcgattccacatggatgggcgacagagtcatcaccaccagcacccgaacctgggccctgcccacctacaacaaccacctctacaagcaaatctccagccaatctggagcctcaaacgacaaccactactttggctacagcaccccttgggggtattttgacttcaacagattccactgtcacttctccccacgtgactggcaaagactcatcaacaacaactggggattccgacccaagagactcaacttcaagctctttaacattcaagtcaaagaggtcacgcagaatgacggtacgacgacgattgccaataaccttaccagcacggttcaagtctttactgactcggagtaccagctcccgtacgtcctcggctcggcgcatcaaggatgcctcccgccgtttccagcagacgtcttcatggtgccacagtatggatacctcaccctgaacaacgggagtcaggcggtaggacgctcttccttttactgcctggagtactttccttctcagatgctgcgtaccggaaacaactttaccttcagctacacctttgaggacgttcctttccacagcagctacgctcacagccagagtttggaccggctgatgaatcctctgatcgaccagtatctgtattacttgagcaaaacaaacgctccaagcggaaccaccacgatgtccaggcttcagttttctcaggccggagcgagtgacattcgggaccagtctaggaactggcttcctggaccctgttaccgccagcagcgagtatcaaaaacagctgcggataacaacaacagtgattattcgtggactggagctaccaagtaccacctcaatggaagagactctctggtgaatccgggcccagctatggccagccacaaggacgatgaagaaaaatattttcctcagagcggggttctcatctttggaaaacaagactcgggaaaaaccaatgtggacattgaaaaggtcatgattacagacgaagaggaaatcaggaccaccaatcccgtggctacggagcagtatggttctgtatctaccaacctccagagcggcaacacacaggcagccaccacagatgtcaacacacaaggcgttcttccaggcatggcctggcaggacagagacgtgtacctgcaaggacccatctgggcaaagattcctcacacggacggacactttcacccttctcccctcatgggaggatttggactcaaacaccctcctccgcaaatcctcatcaagaatacccccgtacctgcgaatccttcgaccacactcagcgcggcaaagtttgcttctttcatcacacagtactctacggggcaggtcagcgtggagattgagtgggagctgcagaaggagaacagcaaacgctggaaccccgaaatccagtacacttccaactacaacaagtctgttaatgtggactttactgtggacactaatggtgtgtattcagagcctcgccccattggcacaagatacctgactcgtaatctgtaa

SEQ ID NO: 3266 - DNA, 2208 bp, Artificial Sequence
  Description of Artificial Sequence: Synthetic polynucleotide
atggctgccgatggttatcttccagattggctcgaggacactctctctgaaggaataagacagtggtggaagctcaaacctggcccaccaccaccaaagcccgcagagcggcatcaggacgacagcaggggtcttgtgcttcctgggtacaagtacctcggacccttcaacggactcgacaagggagagccggtcaacgaggcagacgccgcggccctcgagcacgacaaggcccacgaccggcagctcgacagcggagacaacccgtacctcaagtacaaccacgccgacgcggagtttcaggagcgtcttaaagaagatacgtcttttgggggcaacctcggacgagcagtcttccaggcgaaaaagagggttcttgaacctctgggcctggttgaggaacctgttaagacggctccgggaaaaaagaggccggtagagcattctcctgcggagccagactcctcctcgggaaccggaaaggcgggccagcagcctgcgagaaagagattgaatttcggtcagactggagacgcagactccgtacctgacccccagcctctcggacagccaccagcagccccctctggtctgggaactaatacgatggctacaggcagtggcgcaccaatggcagacaataacgagggcgccgacggagtgggtaattcctcgggaaattggcattgcgattccacatggatgggcgacagagtcatcaccaccagcacccgaacctgggccctgcccacctacaacaaccacctctacaagcaaatctccagccaatctggagcctcaaacgacaaccactactttggctacagcaccccttgggggtattttgacttcaacagattccactgtcacttctccccacgtgactggcaaagactcatcaacaacaactggggattccgacccaagagactcaacttcaagctctttaacattcaagtcaaagaggtcacgcagaatgacggtacgacgacgattgccaataaccttaccagcacggttcaagtctttactgactcggagtaccagctcccgtacgtcctcggctcggcgcatcaaggatgcctcccgccgtttccagcagacgtcttcatggtgccacagtatggatacctcaccctgaacaacgggagtcaggcggtaggacgctcttccttttactgcctggagtactttccttctcagatgctgcgtaccggaaacaactttaccttcagctacacctttgaggacgttcctttccacagcagctacgctcacagccagagtttggaccggctgatgaatcctctgatcgaccagtatctgtattacttgagcaaaacaaacgctccaagcggaaccaccacgatgtccaggcttcagttttctcaggccggagcgagtgacattcgggaccagtctaggaactggcttcctggaccctgttaccgccagcagcgagtatcaaaaacagctgcggataacaacaacagtgattattcgtggactggagctaccaagtaccacctcaatggaagagactctctggtgagtccgggcccagctatggccagccacaaggacgatgaagaaaaatattttcctcagagcggggttctcatctttggaaaacaagactcgggaaaaactaatgtggacattgaaaaggtcatgattacagacgaagaggaaatcaggaccaccaatcccgtggctacggagcagtatggttctgtatctaccaacctccagagcggcaacacacaggcagccaccacagatgtcaacacacaaggcgttcttccaggcatggtctggcaggacagagacgtgtacctgcaaggacccatctgggcaaagattcctcacacggacggacactttcacccttctcccctcatgggaggatttggactcaaacaccctcctccgcaaatcctcatcaagaatacccccgtacctgcgaatccttcgaccacattcagcgcggcaaagtttgcttctttcatcacacagtactctacggggcaggtcagcgtggagattgagtgggagctgcagaaggagaacagcaaacgctggaaccccgaaatccagtacacttccaactacaacaagtctgttaatgtggactttactgtggacactaatggtgtgtattcagagcctcgccccattggcacaagatacctgactcgtaatctgtaa

SEQ ID NO: 3267 - DNA, 2208 bp, Artificial Sequence
  Description of Artificial Sequence: Synthetic polynucleotide
atggctgccgatggttatcttccagattggctcgaggacactctctctgaaggaataagacagtggtggaagctcaaacctggcccaccaccactaaagcccgcagagcggcatcaggacgacagcaggggtcttgtgcttcctgggtacaagtacctcggacccttcaacggactcgacaagggagagccggtcaacgaggcagacgccgcggccctcgagcacgacaaggcctacgaccggcagctcgacagcggagacaacccgtacctcaagtacaaccacgccgacgcggagtttcaggagcgtcttaaagaagatacgtcttttgggggcaacctcggacgagcagtcttccaggcgaaaaagagggttcttgaacctctgggcctggttgaggaacctgttaagacggctccgggaaaaaagaggccggtagagcattctcctgcggagccagactcctcctcgggaaccggaaaggcgggccagcagcctgcgagaaagagattgaatttcggtcagactggagacgcagactccgtacctgacccccagcctctcggacagccaccagcagccccctctggtctgggaactaatacgatggctacaggcagtggcgcaccaatggcagacaataacgagggcgccgacggagtgggtaattcctcgggaaattggcattgcgattccacatggatgggcgacagagtcatcaccaccagcacccgaacctgggccctgcccacctacaacaaccacctctacaagcaaatctccagccaatctggagcctcaaacgacaaccactactttggctacagcaccccttgggggtattttgacttcaacagattccactgtcacttctccccacgtgactggcaaagactcatcaacaacaactggggattccgacccaagagactcaacttcaagctctttaacattcaagtcaaagaggtcacgcagaatgacggtacgacgacgattgccaataaccttaccagcacggttcaagtctttactgactcggagtaccagctcccgtacgtcctcggctcggcgcatcaaggatgcctcccgccgtttccagcagacgtcttcatggtgccacagtatggatacctcaccctgaacaacgggagtcaggcggtaggacgctcttccttttactgcctggagtactttccttctcagatgctgcgtaccggaaacaactttaccttcagctacacctttgaggacgttcctttccacagcagctacgctcacagccagagtttggaccggctgatgaatcctctgatcgaccagtatctgtattacttgagcaaaacaaacgctccaagcggaaccaccacgatgtccaggcttcagttttctcaggccggagcgagtgacattcgggaccagtctaggaactggcttcctggaccctgttaccgccagcagcgagtatcaaaaacagctgcggataacaacaacagtgattattcgtggactggagctaccaagtaccacctcaatggaagagactctctggtgaatccgggcccagctatggccagccacaaggacgatgaagaaaaatattttcctcagagcggggttctcatctttggaaaacaagactcgggaaaaactaatgtggacattgaaaaggtcatgattacagacgaagaggaaatcaggaccaccaatcccgtggctacggagcagtatggttctgtatctaccaacctccagagcggcaacacacaggcagccaccacagatgtcaacacacaaggcgttcttccaggcatggtctggcaggacagagacgtgtacctgcaaggacccatctgggcaaagattcctcacacggacggacactttcacccttctcccctcatgggaggatttggactcaaacaccctcctccgcaaatcctcatcaagaatacccccgtacctgcgaatccttcgaccacattcagcgcggcaaagtttgcttctttcatcacacagtactctacggggcaggtcagcgtggggattgagtgggagctgcagaaggagaacagcaaacgctggaaccccgaaatccagtacacttccaactacaacaagtctgttaatgtggactttactgtggacactaatggtgtgtattcagagcctcgccccattggcacaagatacctgactcgtaatctgtaa

SEQ ID NO: 3268 - DNA, 2208 bp, Artificial Sequence
  Description of Artificial Sequence: Synthetic polynucleotide
atggctgccgatggttatcttccagattggctcgaggacactctctctgaaggaataagacagtggtggaagctcaaacctggcccaccaccaccaaagcccgcagagcggcatcaggacgacagcaggggtcttgtgcttcctgggtacaagtacctcggacccttcaacggactcgacaagggagagccggtcaacgaggcagacgccgcggccctcgagcacgacaaggcctacgaccggcagctcgacagcggagacaacccgtacctcaagtacaaccacgccgacgcggagtttcaggagcgtcttaaagaagatacgtcttttgggggcaacctcggacgagcagtcttccaggcgaaaaagagggttcttgaacctctgggcctggttgaggaacctgttaagacggctccgggaaaaaagaggccggtagagcattctcctgcggagccagactcctcctcgggaaccggaaaggcgggccagcagcctgcgagaaagagattgaatttcggtcagactggagacgcagactccgtacctgacccccagcctctcggacagccaccagcagccccctctggtctgggaactaatacgatggctacaggcagtggcgcaccaatggcagacaataacgagggcgccgacggagtgggtaattcctcgggaaattggcattgcgactccacatggatgggcgacagagtcatcaccaccagcacccgaacctgggccctgcccacctacaacaaccacctctacaagcaaatctccagccaatctggagcctcaaacgacaaccactactttggctacagcaccccttgggggtattttgacttcaacagattccactgtcacttctccccacgtgactggcaaagactcatcaacaacaactggggattccgacccaagagactcaacttcaagctctttaacattcaagtcaaagaggtcacgcagaatgacggtacgacgacgattgccaataaccttaccagcacggttcaagtctttactgactcggagtaccagctcccgtacgtcctcggctcggcgcatcaaggatgcctcccgccgtttccagcagacgtcttcatggtgccacagtatggatacctcaccctgaacaacgggagtcaggcggtaggacgctcttccttttactgcctggagtactttccttctcagatgctgcgtaccggaaacaactttaccttcagctacacctttgaggacgttcctttccacagcagctacgctcacagccagagtttggaccggctgatgaatcctctgatcgaccagtatctgtattacttgagcaaaacaaacgctccaagcggaaccaccacgatgtccaggcttcagttttctcaggccggagcgagtgacattcgggaccagtctaggaactggcttcctggaccctgttaccgccagcagcgagtatcaaaaacagctgcggataacaacaacagtgattattcgtggactggagctaccaagtaccacctcaatggaagagactctctggtgaatccgggcccagctatggccagccacaaggacgatgaagaaaaatattttcctcagagcggggttctcatctttggaaaacaagactcgggaaaaactaatgtggacattgaaaaggtcatgattacagacgaagaggaaatcaggaccaccaatcccgtggctacggagcagtatggttctgtatctaccaacctccagagcggcaacacacaggcagccaccacagatgtcaacacacaaggcgttcttccaggcatggtctggcaggacagagacgtgtgcctgcaaggacccatttgggcaaagattcctcacacggacggacactttcacccttctcccctcatgggaggatttggactcaaacaccctcctccgcaaatcctcatcaagaatacccccgtacctgcgaatccttcgaccacattcagcgcggcaaagtttgcttctttcatcacacagtactctacggggcaggtcagcgtggagattgagtgggagctgcagaaggagaacagcaaacgttggaaccccgaaatccagtacacttccaactacaacaagtctgttaatgtggactttactgtggacactaatggtgtgtattcagagcctcgccccattggcacaagatacctgactcgtaatctgtaa

SEQ ID NO: 3269 - DNA, 2208 bp, Artificial Sequence
  Description of Artificial Sequence: Synthetic polynucleotide
atggctgccgatggttatcttccagattggctcgaggacactctctctgaaggaataagacagtggtggaagctcaaacctggcccaccaccaccaaagcccgcagagcggcatcaggacgacagcaggggtcttgtgcttcctgggtacaagtacctcggacccttcaacggactcgacaagggagagccggtcaacgaggcagacgccgcggccctcgagcacgacaaggcctacgaccggcagctcgacagcggagacaacccgtacctcaagtacaaccacgccgacgcggagtttcaggagcgtcttaaagaagatacgtcttttgggggcaacctcggacgagcagtcttccaggcgaaaaagagggttcttgaacctctgggcctggttgaggaacctgttaagacggctccgggaaaaaagaggccggtagagcattctcctgcggagccagactcctcctcgggaaccggaaaggcgggccagcagcctgcgagaaagagattgaatttcggtcagactggagacgcagactccgtacctgacccccagcctctcggacagccaccagcagccccctctggtctgggaactaatacgatggctacaggcagtggcgcaccaatggcagacaataacgagggcgccgacggagtgggtaattcctcgggaaattggcattgcgattccacatggatgggcgacagagtcatcaccaccagcacccgaacctgggccctgcccacctacaacaaccacctctacaagcaaatctccagccaatctggagcctcaaacgacaaccactactttggctacagcaccccttgggggtattttgacttcaacagattccactgtcacttctccccacgtgactggcaaagactcatcaacaacaactggggattccgacccaagagactcaacttcaagctctttaacattcaagtcaaagaggtcgcgcagaatgacggtacgacgacgattgccaataaccttaccagcacggttcaagtctttactgactcggagtaccagctcccgtacgtcctcggctcggcgcatcaaggatgcctcccgccgtttccagcagacgtcttcatggtgccacagtatggatacctcaccctgaacaacgggagtcaggcggtaggacgctcttccttttactgcctggagtactttccttctcagatgctgcgtaccggaaacaactttaccttcagctacacctttgaggacgttcctttccacagcagctacgctcacagccagagtttggaccggctgatgaatcctctgatcgaccagtatctgtattacttgagcaaaacaaacgctccaagcggaaccaccacgatgtccaggcttcagttttctcaggccggagcgagtgacattcgggaccagtctaggaactggcttcctggaccctgttaccgccagcagcgagtatcaaaaacagctgcggataacaacaacagtgattattcgtggactggagctaccaagtaccacctcaatggaagagactctctggtgaatccgggcccagctatggccagccacaaggacgatgaagaaaaatattttcctcagagcggggttctcatctttggaaaacaagactcgggaaaaactaatgtggacattgaaaaggtcatgattacagacgaagaggaaatcaggaccaccaatcccgtggctacggagcagtatggttctgtatctaccaacctccagagcggcaacacacaggcagccaccacagatgtcaacacacaaggcgttcttccaggcatggtctggcaggacagagacgtgtacctgcaaggacccatctgggcaaagattcctcacacggacggacactttcacccttctcccctcatgggaggatttggactcaaacaccctcctccgcaaatcctcatcaagaatacccccgtacctgcgaatccttcgaccacattcagcgcggcaaagtttgcttctttcatcacacagtactctacggggcaggtcagcgtggagattgagtgggagctgcagaaggagaacagcaaacgctggaaccccgaaatccagtacacttccaactacaacaagtctgttaatgtggactttactgtggacactaatggtgtgtattcagagcctcgccccattggcacaagatacctgactcgtaatctgtaa

SEQ ID NO: 3270 - DNA, 2208 bp, Artificial Sequence
  Description of Artificial Sequence: Synthetic polynucleotide
atggctgccgatggttatcttccagattggctcgaggacactctctctgaaggaataagacagtggtggaagctcaaacctggcccaccaccgccaaagcccgcagagcggcataaggacgacagcaggggtcttgtgcttcctgggtacaagtacctcggacccttcaacggactcgacaaaggagagccggtcaacgaggcagacgccgcggccctcgagcacgacaaggcctacgaccggcagctcgacagcggagacaacccgtacctcaagtacaaccacgccgacgcggagtttcaggagcgccttaaagaagatacgtcttttgggggcaacctcgcaagagcagtattccaggcgaaaaagagggttcttgaacctctgggcctggttgaggagcctgttaagacggctccgggaaaaaagaggccggtagagcactctcctgcggagccagattcctcctccggaactggaaagtcgggccaacagcctgcaagaaagagattgaattttggtcagactggagacgcagactccgtacctgacccccagcctctcggacagccaccagcagccccctctggtctgggaactaatacgatggcttcaggcagtggcgcaccaatggcagacaataacgagggcgccgacggagtgggtaattcctcgggaaattggcattgcgattccacatggatgggcgacagagtcatcaccaccagcacccgcacctgggctctgcccacctacaacaaccatctgtacaagcaaatttccagccagtctggagccagcaacgacaaccactactttggctacagcaccccttgggggtattttgacttcaacagattccactgccacttctccccacgtgactggcaaagactcatcaacaacaattggggattccggcccaaaagactcaacttcaagctctttaacattcaagtcaaggaggtcacgcagaatgacggtacgacgacgattgccaataaccttaccagcacggttcaggtgtttactgactcggagtaccagctcccgtacgtcctcggctcggcgcatcaaggatgcctcccgccgttcccagcagacgtcttcatggtgccacagtatggatacctcaccctgaacaacgggagtcaggcggtaggacgctcttcattttactgcccggagtaccttccttctcagatgctgcgtaccggaaacaactttaccttcagctacacctttgaggacgttccttttcacagcagctacgctcacagccagagtttggaccgtctcatgaatcctctcatcgaccagtacctgtattacttgagcagaacaaacactccaagcggaaccactacgcagtccaggcttcagttttctcaagccggagcgagtgacattcgggaccagtctaggaactggcttcctggaccctgttaccgccagcagcgagtatcaaagacagctgcggacaacaacaacagtgattactcgtggactggagctaccaagtatcacctcaatggaagagactctctggtgaatccgggcacagccatggccagccacaaggacgatgaagaaaagtattttcctcagagcggggttctcatcttcggaaaacaagactcgggaaaaactaatgtggacattgaaaaggtcatgattacagacgaagaggaaaccaggaccaccaatcccgtggctacggagcagtatggttctgtatctaccaatctccagagcggcaacacacaagcagctacctcagatgtcaacacacaaggcgttcttccaggcatggtctggcaggacagagacgtgtacctgcagggacccatctgggcaaagattccacacacggacggacattttcacccttctcctcttatgggaggatttggactgaagcaccctcccccgcagattctcatcaagaataccccggtacctgcgaatccttctaccgccttcagcgcggcaaagtttgcttccttcatcacacagtactccacggggcaggtcagcgtggagatcgagtgggagctgcagaaagagaacagcgaacgctggaaccccgagatccagtatacctccaactacaacaagtctgttaatgtggactttactgtggacactaatggcgtgtattcagagcctcgccccattggcacaaggtacctgactcgtaatctgtaa

SEQ ID NO: 3271 - DNA, 2208 bp, Artificial Sequence
  Description of Artificial Sequence: Synthetic polynucleotide
atggctgccgatggttatcttccagattggctcgaggacactctctctgaaggaataagacagtggtggaagctcaaacctggcccaccaccgccaaagcccgcagagcggcataaggacgacagcaggggtcttgtgcttcctgggtacaagtacctcggacccttcaacggactcgacaaaggagagccggtcaacgaggcagacgccgcggccctcgagcacgacaaggcctacgaccggcagctcgacagcggagacaacccgtacctcaagtacaaccacgccgacgcggagtttcaggagcgccttaaagaagatacgtcttttgggggcaacctcgcaagagcagtattccaggcgaaaaagagggttcttgaacctctgggcctggttgaggagcctgttaagacggctccgggaaaaaagaggccggtagagcactctcctgcggagccagattcctcctccggaactggaaagtcgggccaacagcctgcaagaaagagattgaattttggtcagactggagacgcagactccgtacctgacccccagcctctcggacagccaccagcagccccctctggtctgggaactaatacgatggcttcaggcagtggcgcaccaatggcagacaataacgagggcgccgacggagtgggtaattcctcgggaaattggcattgcgattccacatggatgggcgacagagtcatcaccaccagcacccgcacctgggctctgcccacctacaacaaccatctgtacaagcaaatttccagccagtctggagccagcaacgacaaccactactttggctacagcaccccttgggggtattttgacttcaacagattccactgccacttctccccacgtgactggcaaagactcatcaacaacaattggggattccggcccaaaagactcaacttcaagctctttaacattcaagtcaaggaggtcacgcagaatgacggtacgacgacgattgccaataaccttaccagcacggttcaggtgtttactgactcggagtaccagctcccgtacgtcctcggctcggcgcatcaaggatgcctcccgccgttcccagcagacgtcctcatggtgccacagtatggatacctcaccctgaacaacgggagtcaggcggtaggacgctcttcattttactgcccggagtaccttccttctcagatgctgcgtaccggaaacaactttaccttcagctacacctttgaggacgttccttttcacagcagctacgctcacagccagagtttggaccgtctcatgaatcctctcatcgaccagtacctgtattacttgagcagaacaaacactccaagcggaaccactacgcagtccaggcttcagttttctcaagccggagcgagtgacattcgggaccagtctaggaactggcttcctggaccctgttaccgccagcagcgagtatcaaagacagctgcggacaacaacaacagtgattactcgtggactggagctaccaagtatcacctcaatggaagagactctctggtgaatccgggcacagccatggccagccacaaggacgatgaagaaaagtattttcctcagagcggggttctcatcttcggaaaacaagactcgggaaaaactaatgtggacattgaaaaggtcatgattacagacgaagaggaaatcaggaccaccaatcccgtggctacggagcagtatggttctgtatctaccaatctccagagcggcaacacacaagcagctacctcagatgtcaacacacaaggcgttcttccaggcatggtctggcaggacagagacgtgtacctgcagggacccatctgggcaaagattccacacacggacggacattttcacccttctcctcttatgggaggatttggactgaagcaccctcccccgcagattctcatcaagaataccccggtacctgcgaatccttctaccgccttcagcgcggcaaagtttgcttccttcatcacacagtactccacggggcaggtcagcgtggagatcgagtgggagctgcagaaagagaacagcgaacgctggaaccccgagatccagtatacctccaactacaacaagtctgttaatgtggactttactgcggacactaatggcgtgtattcagagcctcgccccattggcacaaggtacctgactcgtaatctgtaa

SEQ ID NO: 3272 - DNA, 2208 bp, Artificial Sequence
  Description of Artificial Sequence: Synthetic polynucleotide
atggctgccgatggttatcttccagattggctcgaggacactctctctgaaggaataagacagtggtggaagctcaaacctggcccaccaccgccaaagcccgcagagcggcataaggacgacagcaggggtcttgtgcttcctgggtacaagtacctcggacccttcaacggactcgacaaaggagagccggtcaacgaggcagacgccgcggccctcgagcacgacaaggcctacgaccggcagctcgacagcggagacaacccgtacctcaagtacaaccacgccgacgcggagtttcaggagcgccttaaagaagatacgtcttttgggggcaacctcgcaagagcagtattccaggcgaaaaagagggttcttgaacctctgggcctggttgaggagcctgttaagacggctccgggaaaaaagaggccggtagagcactctcctgcggagccagattcctcctccggaactggaaagtcgggccaacagcctgcaagaaagagattgaattttggtcagactggagacgcagactccgtacctgacccccagcctctcggacagccaccagcagccccctctggtctgggaactaatacgatggcttcaggcagtggcgcaccaatggcagacaataacgagggcgccgacggagtgggtaattcctcgggaaattggcattgcgattccacatggatgggcgacagagtcatcaccaccagcacccgcgcctgggctctgcccacctacaacaaccatctgtacaagcaaatttccagccagtctggagccagcaacgacaaccactactttggctacagcaccccttgggggtattttgacttcaacagattccactgccacttctccccacgtgactggcaaagactcatcaacaacaattggggattccggcccaaaagactcaacttcaagctctttaacattcaagtcaaggaggtcacgcagaatgacggtacgacgacgattgccaataaccttaccagcacggttcaggtgtttactgactcggagtaccagctcccgtacgtcctcggctcggcgcatcaaggatgcctcccgccgttcccagcagacgtcctcatggtgccacagtatggatacctcaccctgaacaacgggagtcaggcggtaggacgctcttcattttactgcccggagtaccttccttctcagatgctgcgtaccggaaacaactttaccttcagctacacctttgaggacgttccttttcacagcagctacgctcacagccagagtttggaccgtctcatgaatcctctcatcgaccagtacctgtattacttgagcagaacaaacactccaagcggaaccactacgcagtccaggcttcagttttctcaagccggagcgagtgacattcgggaccagtctaggaactggcttcctggaccctgttaccgccagcagcgagtatcaaagacagctgcggacaacaacaacagtgattactcgtggactggagctaccaagtatcacctcaatggaagagactctctggtgaatccgggcacagccatggccagccacaaggacgatgaagaaaagtattttcctcagagcggggttctcatcttcggaaaacaagactcgggaaaaactaatgtggacattgaaaaggtcatgattacagacgaagaggaaatcaggaccaccaatcccgtggctacggagcagtatggttctgtatctaccaatctccagagcggcaacacacaagcagctacctcagatgtcaacacacaaggcgttcttccaggcatggtctggcaggacagagacgtgtacctgcagggacccatctgggcaaagattccacacacggacggacattttcacccttctcctcttatgggaggatttggactgaagcaccctcccccgcagattctcatcaagaataccccggtacctgcgaatccttctaccgccttcagcgcggcaaagtttgcttccttcatcacacagtactccacggggcaggtcagcgtggagatcgagtgggagctgcagaaagagaacagcgaacgctggaaccccgagatccagtatacctccaactacaacaagtctgttaatgtggactttactgtggacactaatggcgtgtattcagagcctcgccccattggcacaaggtacctgactcgtaatctgtaa

SEQ ID NO: 3273 - DNA, 2208 bp, Artificial Sequence
  Description of Artificial Sequence: Synthetic polynucleotide
atggctgccgatggttatcttccagattggctcgaggacactctctctgaaggaataagacagtggtggaagctcaaacctggcccaccaccgccaaagcccgcagagcggcataaggacgacagcaggggtcttgtgcttcctgggtacaagtacctcggacccttcaacggactcgacaaaggagagccggtcaacgaggcagacgccgcggccctcgagcacgacaaggcctacgaccggcagctcgacagcggagacaacccgtacctcaagtacaaccacgccgacgcggagtttcaggagcgccttaaagaagatacgtcttttgggggcaacctcgcaagagcagtattccaggcgaaaaagagggttcttgaacctctgggcctggttgaggagcctgttaagacggctccgggaaaaaagaggccggtagagcactctcctgcggagccagattcctcctccggaactggaaagtcgggccaacagcctgcaagaaagagattgaattttggtcagactggagacgcagactccgtacctgacccccagcctctcggacagccaccagcagccccctctggtctgggaactaatacgatggcttcaggcagtggcgcaccaatggcagacaataacgagggcgccgacggagtgggtaattcctcgggaaattggcattgcgattccacatggatgggcgacagagtcatcaccaccagcacccgcacctgggctctgcccacctacaacaaccatctgtacaagcaaatttccagccagtctggagccagcaacgacaaccactactttggctacagcaccccttgggggtattttgacttcaacagattccactgccacttctccccacgtgactggcaaagactcatcaacaacaattggggattccggcccaaaagactcaacttcaagctctttaacattcaagtcaaggaggtcacgcagaatgacggtacgacgacgattgccaataaccttaccagcacggttcaggtgtttactgactcggagtaccagctcccgtacgtcctcggctcggcgcatcaaggatgcctcccgccgttcccagcagacgtcttcatggtgccacagtatggatacctcaccctgaacaacgggagtcaggcggtaggacgctcttcattttactgcccggagtaccttccttctcagatgctgcgtaccggaaacaactttaccttcagctacacctttgaggacgttccttttcacagcagctacgctcacagccagagtttggaccgtctcatgaatcctctcatcgaccagtacctgtattacttgagcagaacaaacactccaagcggaaccactacgcagtccaggcttcagttttctcaagccggagcgagtgacattcgggaccagtctaggaactggcttcctggaccctgttaccgccagcagcgagtatcaaagacagctgcggacaacaacaacagtgattactcgtggactggagctaccaagtatcacctcaatggaagagactctctggtgaatccgggcacagccacggccagccacaaggacgatgaagaaaagtattttcctcagagcggggttctcatcttcggaaaacaagactcgggaaaaactaatgtggacattgaaaaggtcatgattacagacgaagaggaaatcaggaccaccaatcccgtggctacggagcagtatggttctgtatctaccaatctccagagcggcaacacacaagcagctacctcagatgtcaacacacaaggcgttcttccaggcatggtctggcaggacagagacgtgtacctgcagggacccatctgggcaaagattccacacacggacggacattttcacccttctcctcttatgggaggatttggactgaagcaccctcccccgcagattctcatcaagaataccccggtacctgcgaatccttctaccgccttcagcgcggcaaagtttgcttccttcatcacacagtactccacggggcaggtcagcgtggagatcgagtgggagctgcagaaagagaacagcgaacgctggaaccccgagatccagtatacctccaactacaacaagtctgttaatgtggactttactgtggacactaatggcgtgtattcagagcctcgccccattggcacaaggtacctgactcgtaatctgtaa

SEQ ID NO: 3274 - DNA, 2205 bp, Artificial Sequence
  Description of Artificial Sequence: Synthetic polynucleotide
atggctgccgatggttatcttccagattggctcgaggacactctctctgaaggaataagacagtggtggaagctcaaacctggcccaccaccgccaaagcccgcagagcggcataaggacgacagcaggggtcttgtgcttcctgggtacaagtacctcggacccttcaacggactcgacaaaggagagccggtcaacgaggcagacgccgcggccctcgagcacgacaaggcctacgaccggcagctcgacagcggagacaacccgtacctcaagtacaaccacgccgacgcggagtttcaggagcgccttaaagaagatacgtcttttgggggcaacctcgcaagagcagtattccaggcgaaaaagagggttcttgaacctctgggcctggttgaggagcctgttaagacggctccgggaaaaaagaggccggtagagcactctcctgcggagccagattcctcctccggaactggaaagtcgggccaacagcctgcaagaaagagattgaattttggtcagactggagacgcagactccgtacctgacccccagcctctcggacagccaccagcagccccctctggtctgggaactaatacgatggcttcaggcagtggcgcaccaatggcagacaataacgagggcgccgacggagtgggtaattcctcgggaaattggcattgcgattccacatggatgggcgacagagtcatcaccaccagcacccgcacctgggctctgcccacctacaacaaccatctgtacaagcaaatttccagccagtctggagccagcaacgacaaccactactttggctacagcaccccttgggggtattttgacttcaacagattccactgccacttctccccacgtgactggcaaagactcatcaacaacaattggggattccggcccaaaagactcaacttcaagctctttaacattcaagtcaaggaggtcacgcagaatgacggtacgacgacgattgccaataaccttaccagcacggttcaggtgtttactgactcggagtaccagctcccgtacgtcctcggctcggcgcatcaaggatgcctcccgccgttcccagcagacgtcttcatggtgccacagtatggatacctcaccctgaacaacgggagtcaggcggtaggacgctcttcattttactgcccggagtaccttccttctcagatgctgcgtaccggaaacaactttaccttcagctacacctttgaggacgttccttttcacagcagctacgctcacagccagagtttggaccgtctcatgaatcctctcatcgaccagtacctgtattacttgagcagaacaaacactccaagcggaaccactacgcagtccaggcttcagttttctcaagccggagcgagtgacattcgggaccagtctaggaactggcttcctggaccctgttaccgccagcagcgagtatcaaagacagctgcggacaacaacagtgattactcgtggactggagctaccaagtatcacctcaatggaagagactctctggtgaatccgggcacagccatggccagccacaaggacgatgaagaaaagtattttcctcagagcggggttctcatcttcggaaaacaagactcgggaaaaactaatgtggacattgaaaaggtcatgattacagacgaagaggaaatcaggaccaccaatcccgtggctacggagcagtatggttctgtatctaccaatctccagagcggcaacacacaagcagctacctcagatgtcaacacacaaggcgttcttccaggcatggtctggcaggacagagacgtgtacctgcagggacccatctgggcaaagattccacacacggacggacattttcacccttctcctcttatgggaggatttggactgaagcaccctcccccgcagattctcatcaagaataccccggtacctgcgaatccttctaccgccttcagcgcggcaaagtttgcttccttcatcacacagtactccacggggcaggtcagcgtggagatcgagtgggagctgcagaaagagaacagcgaacgctggaaccccgagatccagtatacctccaactacaacaagtctgttaatgtggactttactgtggacactaatggcgtgtattcagagcctcgccccattggcacaaggtacctgactcgtaatctgtaa

SEQ ID NO: 3275 - DNA, 2208 bp, Artificial Sequence
  Description of Artificial Sequence: Synthetic polynucleotide
atggctgccgatggttatcttccagattggctcgaggacactctctctgaaggaataagacagtggtggaagctcaaacctggcccaccaccgccaaagcccgcagagcggcataaggacgacagcaggggtcttgtgcttcctgggtacaagtacctcggacccttcaacggactcgacaaaggagagccggtcaacgaggcagacgccgcggccctcgagcacgacaaggcctacgaccggcagctcgacagcggagacaacccgtacctcaagtacaaccacgccgacgcggagtttcaggagcgccttaaagaagatacgtcttttgggggcaacctcgcaagagcagtattccaggcgaaaaagagggttcttgaccctctgggcctggttgaggagcctgttaagacggctccgggaaaaaagaggccggtagagcactctcctgcggagccagattcctcctccggaactggaaagtcgggccaacagcctgcaagaaagagattgaattttggtcagactggagacgcagactccgtacctgacccccagcctctcggacagccaccagcagccccctctggtctgggaactaatacgatggcttcaggcagtggcgcaccaatggcagacaataacgagggcgccgacggagtgggtaattcctcgggaaattggcattgcgattccacatggatgggcgacagagtcatcaccaccagcacccgcacctgggctctgcccacctacaacaaccatctgtacaagcaaatttccagccagtctggagccagcaacgacaaccactactttggctacagcaccccttgggggtattttgacttcaacagattccactgccacttctccccacgtgactggcaaagactcatcaacaacaattggggattccggcccaaaagactcaacttcaagctctttaacattcaagtcaaggaggtcacgcagaatgacggtacgacgacgattgccaataaccttaccagcacggttcaggtgtttactgactcggagtaccagctcccgtacgtcctcggctcggcgcatcaaggatgcctcccgccgttcccagcagacgtcttcatggtgccacagtatggatacctcaccctgaacaacgggagtcaggcggtaggacgctcttcattttactgcccggagtaccttccttctcagatgctgcgtaccggaaacaactttaccttcagctacacctttgaggacgttccttttcacagcagctacgctcacagccagagtttggaccgtctcatgaatcctctcatcgaccagtacctgtattacttgagcagaacaaacactccaagcggaaccactacgcagtccaggcttcagttttctcaagccggagcgagtgacattcgggaccagtctaggaactggcttcctggaccctgttaccgccagcagcgagtatcaaagacagctgcggacaacaacaacagtgattactcgtggactggagctaccaagtatcacctcaatggaagagactctctggtgaatccgggcacagccatggccagccacaaggacgatgaagaaaagtattttcctcagagcggggttctcatcttcggaaaacaagactcgggaaaaactaatgtggacattgaaaaggtcatgattacagacgaagaggaaatcaggaccaccaatcccgtggctacggagcagtatggttctgtatctaccaatctccagagcggcaacacacaagcagctacctcagatgtcaacacacaaggcgttcttccaggcatggtctggcaggacagagacgtgtacctgcagggacccatctgggcaaagattccacacacggacggacattttcacccttctcctcttatgggaggatttggactgaagcaccctcccccgcagattctcatcaagaataccccggtacctgcgaatccttctaccgccttcagcgcggcaaagtttgcttccttcatcacacagtactccacggggcaggtcagcgtggagatcgagtgggagctgcagaaagagaacagcgaacgctggaaccccgagatccagtatacctccaactacaacaagtctgttaatgtggactttactgtggacactaatggcgtgtattcagagcctcgccccattggcacaaggtacctgactcgtaatctgtaa

SEQ ID NO: 3276 - DNA, 2208 bp, Artificial Sequence
  Description of Artificial Sequence: Synthetic polynucleotide
atggctgccgatggttatcttccagattggctcgaggacactctctctgaaggaataagacagtggtggaagctcaaacctggcccaccaccgccaaagcccgcagagcggcataaggacgacagcaggggtcttgtgcttcctgggtacaagtacctcggacccttcaacggactcgacaaaggagagccggtcaacgaggcagacgccgcggccctcgagcacgacaaggcctacgaccggcagctcgacagcggagacaacccgtacctcaagtacaaccacgccgacgcggagtttcaggagcgccttaaagaagatacgtcttttgggggcaacctcgcaagagcagtattccaggcgaaaaagagggttcttgaacctctgggcctggttgaggagcctgttaagacggctccgggaaaaaagaggccggtagagcactctcctgcggagccagattcctcctccggaactggaaagtcgggccaacagcctgcaagaaagagattgaattttggtcagactggagacgcagactccgtacctgacccccagcctctcggacagccaccagcagccccctctggtctgggaactaatacgatggcttcaggcagtggcgcaccaatggcagacaataacgagggcgccgacggagtgggtaattcctcgggaaattggcattgcgattccacatggatgggcgacagagtcatcaccaccagcacccgcacctgggctctgcccacctacaacaaccatctgtacaagcaaatttccagccagtctggagccagcaacgacaaccactactttggctacagcaccccttgggggtattttgacttcaacagattccactgccacttctccccacgtgactggcaaagactcatcaacaacaattggggattccggcccaaaagactcaacttcaagctctttaacattcaagtcaaggaggtcacgcagaatgacggtacgacgacgattgccaataaccttaccagcacggttcaggtgtttactgactcggagtaccagctcccgtacgtcctcggctcggcgcatcaaggatgcctcccgccgttcccagcagacgtcttcatggtgccacagtatggatacctcaccctgaacaacgggagtcaggcggtaggacgctcttcattttactgcccggagtaccttccttctcagatgctgcgtaccggaaacaactttaccttcagctacacctttgaggacgttccttttcacagcagctacgctcacagccagagtttggaccgtctcatgaatcctctcatcgaccagtacctgtattacttgagcagaacaaacactccaagcggaaccactacgcagtccaggcttcagttttctcaagccggagcgagtgacattcgggaccagtctaggaactggcttcctggaccctgttaccgccagcagcgagtatcaaagacagctgcggacaacaacaacagtgattactcgtggactggagctaccaagtatcacctcaatggaagagactctctggtgaatccgggcacagccatggccagccacaaggacgatgaagaaaagtattttcctcagagcggggttctcatctttcggaaacaagactcgggaaaaactaatgtggacattgaaaaggtcatgattacagacgaagaggaaatcaggaccaccaatcccgtggctacggagcagtatggttctgtatctaccaatctccagagcggcaacacacaagcagctacctcagatgtcaacacacaaggcgttcttccaggcatggtctggcaggacagagacgtgtacctgcagggacccatctgggcaaagattccacacacggacggacattttcacccttctcctcttatgggaggatttggactgaagcaccctcccccgcagattctcatcaagaataccccggtacctgcgaatccttctaccgccttcagcgcggcaaagtttgcttccttcatcacacagtactccacggggcaggtcagcgtggagatcgagtgggagctgcagaaagagaacagcgaacgctggaaccccgagatccagtatacctccaactacaacaagtctgttaatgtggactttactgtggacactaatggcgtgtattcagagcctcgccccattggcacaaggtacctgactcgtaatctgtaa

SEQ ID NO: 3277 - DNA, 2208 bp, Artificial Sequence
  Description of Artificial Sequence: Synthetic polynucleotide
atggctgccgatggttatcttccagattggctcgaggacactctctctgaaggaataagacagtggtggaagctcaaacctggcccaccaccgccaaagcccgcagagcggcataaggacgacagcaggggtcttgtgcttcctgggtacaagtacctcggacccttcaacggactcgacaaaggagagccggtcaacgaggcagacgccgcggccctcgagcacgacaaggcctacgaccggcagctcgacagcggagacaacccgtacctcaagtacaaccacgccgacgcggagtttcaggagcgccttaaagaagatacgtcttttgggggcaacctcgcaagagcagtattccaggcgaaaaagagggttcttgaacctctgggcctggttgaggagcctgttaagacggctccgggaaaaaagaggccggtagagcactctcctgcggagccagattcctcctccggaactggaaagtcgggccaacagcctgcaagaaagagattgaattttggtcagactggagacgcagactccgtacctgacccccagcctctcggacagccaccagcagccccctctggtctgggaactaatacgatggcttcaggcagtggcgcaccaatggcagacaataacgagggcgccgacggagtgggtaattcctcgggaaattggcattgcgattccacatggatgggcgacagagtcatcaccaccagcacccgcacctgggctctgcccacctacaacaaccatctgtacaagcaaatttccagccagtctggagccagcaacgacaaccactactttggctacagcaccccttgggggtattttgacttcaacagattccactgccacttctccccacgtgactggcaaagactcatcaacaacaattggggattccggcccaaaagactcaacttcaagctctttaacattcaagtcaaggaggtcacgcagaatgacggtacgacgacgattgccaataaccttaccagcacggttcaggtgtttactgactcggagtaccagctcccgtacgtcctcggctcggcgcatcaaggatgcctcccgccgttcccagcagacgtcctcatggtgccacagtatggatacctcaccctgaacaacgggagtcaggcggtaggacgctcttcattttactgcccggagtaccttccttctcagatgctgcgtaccggaaacaactttaccttcagctacacctttgaggacgttccttttcacagcagctacgctcacagccagagtttggaccgtctcatgaatcctctcatcgaccagtacctgtattacttgagcagaacaaacactccaagcggaaccactacgcagtccaggcttcagttttctcaagccggagcgagtgacattcgggaccagtctaggaactggcttcctggaccctgttaccgccagcagcgagtatcaaagacagctgcggacaacaacaacagtgattactcgtggactggagctaccaagtatcacctcaatggaagagactctctggtgaatccgggcacagccatggccagccacaaggacgatgaagaaaagtattttcctcagagcggggttctcatcttccggaaacaagactcgggaaaaactaatgtggacattgaaaaggtcatgattacagacgaagaggaaatcaggaccaccaatcccgtggctacggagcagtatggttctgtatctaccaatctccagagcggcaacacacaagcagctacctcagatgtcaacacacaaggcgttcttccaggcatggtctggcaggacagagacgtgtacctgcagggacccatctgggcaaagattccacacacggacggacattttcacccttctcctcttatgggaggatttggactgaagcaccctcccccgcagattctcatcaagaataccccggtacctgcgaatccttctaccgccttcagcgcggcaaagtttgcttccttcatcacacagtactccacggggcaggtcagcgtggagatcgagtgggagctgcagaaagagaacagcgaacgctggaaccccgagatccagtatacctccaactacaacaagtctgttaatgtggactttactgtggacactaatggcgtgtattcagagcctcgccccattggcacaaggtacctgactcgtaatctgtaa

SEQ ID NO: 3278 - DNA, 2208 bp, Artificial Sequence
  Description of Artificial Sequence: Synthetic polynucleotide
atggctgccgatggttatcttccagattggctcgaggacactctctctgaaggaataagacagtggtggaagctcaaacctggcccaccaccgccaaagcccgcagagcggcataaggacgacagcaggggtcttgtgcttcctgggtacaagtacctcggacccttcaacggactcgacaaaggagagccggtcaacgaggcagacgccgcggccctcgagcacgacaaggcctacgaccggcagctcgacagcggagacaacccgtacctcaagtacaaccacgccgacgcggagtttcaggagcgccttaaagaagatacgtcttttgggggcaacctcgcaagagcagtattccaggcgaaaaagagggttcttgaacctctgggcctggttgaggagcctgttaagacggctccgggaaaaaagaggccggtagagcactctcctgcggagccagattcctcctccggaactggaaagtcgggccaacagcctgcaagaaagagattgaattttggtcagactggagacgcagactccgtacctgacccccagcctctcggacagccaccagcagccccctctggtctgggaactaatacgatggcttcaggcagtggcgcaccaatggcagacaataacgagggcgccgacggagtgggtaattcctcgggaaattggcattgcgattccacatggatgggcgacagagtcatcaccaccagcacccgcacctgggctctgcccacctacaacaaccatctgtacaagcaaatttccagccagtctggagccagcaacgacaaccactactttggctacagcaccccttgggggtattttgacttcaacagattccactgccacttctccccacgtgactggcaaagactcatcaacaacaattggggattccggcccaaaagactcaacttcaagctctttaacattcaagtcaaggaggtcacgcagaatgacggtacgacgacgattgccaataaccttaccagcacggttcaggtgtttactgactcggagtaccagctcccgtacgtcctcggctcggcgcatcaaggatgcctcccgccgttcccagcagacgtcctcatggtgccacagtatggatacctcaccctgaacaacgggagtcaggcggtaggacgctcttcattttactgcccggagtaccttccttctcagatgctgcgtaccggaaacaactttaccttcagctacacctttgaggacgttccttttcacagcagctacgctcacagccagagtttggaccgtctcatgaatcctctcatcgaccagtacctgtattacttgagcagaacaaacactccaagcggaaccactacgcagtccaggcttcagttttctcaagccggagcgagtgacattcgggaccagtctaggaactggcttcctggaccctgttaccgccagcagcgagtatcaaagacagctgcggacaacaacaacagtgattactcgtggactggagctaccaagtatcacctcaatggaagagactctctggtgaatccgggcacagccatggccagccacaaggacgatgaagaaaagtattttcctcagagcggggttctcatcttcggaaaacaagactcgggaaaaactaatgtggacattgaaaaggtcatgattacagacgaagaggaaatcaggaccaccaatcccgtggctacggagcagtatggttctgtatctaccaatctccagagcggcaacacacaagcagctacctcagatgtcaacacacaaggcgttcttccaggcatggtctggcaggacagagacgtgtacctgcagggacccatctgggcaaagattccacacacggacggacattttcacccttctcctcttatgggaggatttggactgaagcaccctcccccgcagattctcatcaagaataccccggtacctgcgaatccttctaccgccttcagcgcggcaaagtttgcttccttcatcacacagtactccacggggcaggtcagcgtggagatcgagtgggagctgcagaaagagaacagcgaacgctggaaccccgagatccagtatacctccaactacaacaagtctgttaatgtggactttactgtggacactaatggcgtgtattcagagcctcgccccattggcacaaggtacctgactcgtaatctgtaa

SEQ ID NO: 3279 - DNA, 2208 bp, Artificial Sequence
  Description of Artificial Sequence: Synthetic polynucleotide
atggctgccgatggttatcttccagattggctcgaggacactctctctgaaggaataagacagtggtggaagctcaaacctggcccaccaccgccaaagcccgcagagcggcataaggacgacagcaggggtcttgtgcttcctgggtacaagtacctcggacccttcaacggactcgacaaaggagagccggtcaacgaggcagacgccgcggccctcgagcacgacaaggcctacgaccggcagctcgacagcggagacaacccgtacctcaagtacaaccacgccgacgcggagtttcaggagcgccttaaagaagatacgtcttttgggggcaacctcgcaagagcagtattccaggcgaaaaagagggttcttgaacctctgggcctggttgaggagcctgttaagacggctccgggaaaaaagaggccggtagagcactctcctgcggagccagattcctcctccggaactggaaagtcgggccaacagcctgcaagaaagagattgaattttggtcagactggagacgcagactccgtacctgacccccagcctctcggacagccaccagcagccccctctggtctgggaactaatacgatggcttcaggcagtggcgcaccaatggcagacaataacgagggcgccgacggagtgggtaattcctcgggaaattggcattgcgattccacatggatgggcgacagagtcatcaccaccagcacccgcacctgggctctgcccacctacaacaaccatctgtacaagcaaatttccagccagtctggagccagcaacgacaaccactactttggctacagcaccccttgggggtattttgacttcaacagattccactgccacttctccccacgtgactggcaaagactcatcaacaacaattggggattccggcccaaaagactcaacttcaagctctttaacattcaagtcaaggaggtcacgcagaatgacggtacgacgacgattgccaataaccttaccagcacggttcaggtgtttactgactcggagtaccagctcccgtacgtcctcggctcggcgcatcaaggatgcctcccgccgttcccagcagacgtcttcatggtgccacagtatggatacctcaccctgaacaacgggagtcaggcggtaggacgctcttcattttactgcccggagtaccttccttctcagatgctgcgtaccggaaacaactttaccttcagctacacctttgaggacgttccttttcacagcagctacgctcacagccagagtttggaccgtctcatgaatcctctcatcgaccagtacctgtattacttgagcagaacaaacactccaagcggaaccactacgcagtccaggcttcagttttctcaagccggagcgagtgacattcgggaccagtctaggaactggcttcctggaccctgttaccgccagcagcgagtatcaaagacagctgcggacaacaacaacagtgattactcgtggactggagctaccaagtatcacctcaatggaagagactctctggtgaatccgggcacagccatggccagccacaaggacgatgaagaaaagtattttcctcagagcggggttctcatcttcggaaaacaagactcgggaaaaactaatgtggacattgaaaaggtcatgattacagacgaagaggaaatcaggaccaccaatcccgtggctacggagcagtatggttctgtatctaccaatctccagagcggcaacacacaagcagctacctcagatgtcaacacacaaggcgttcttccaggcatggtctggcaggacagagacgtgtacctgcagggacccatctgggcaaagattccacacacggacggacattttcacccttctcctcttatgggaggatttggactgaagcaccctcccccgcagattctcatcaagaataccccggtacctgcgaatccttctaccgccttcagcgcggcaaagtttgcttccttcatcacacagtactccacggggcaggtcagcgtggagatcgagtgggagctgcagaaagagaacagcgaacgctggaaccccgagatccagtatacctccaactacaacaagtctgttaatgtggactttactgtggacactaatggcgtgtattcagagcctcgccccattggcacaaggtacctgactcgtaatctgtaa

SEQ ID NO: 3280 - DNA, 2208 bp, Artificial Sequence
  Description of Artificial Sequence: Synthetic polynucleotide
atggctgccgatggttatcttccagattggctcgaggacactctctctgaaggaataagacagtggtggaagctcaaacctggcccaccaccgccaaagcccgcagagcggcataaggacgacagcaggggtcttgtgcttcctgggtacaagtacctcggacccttcaacggactcgacaaaggagagccggtcaacgaggcagacgccgcggccctcgagcacgacaaggcctacgaccggcagctcgacagcggagacaacccgtacctcaagtacaaccacgccgacgcggagtttcaggagcgccttaaagaagatacgtcttttgggggcaacctcgcaagagcagtattccaggcgaaaaagagggttcttgaacctctgggcctggttgaggagcctgttaagacggctccgggaaaaaagaggccggtagagcactctcctgcggagccagattcctcctccggaactggaaagtcgggccaacagcctgcaagaaagagattgaattttggtcagactggagacgcagactccgtacctgacccccagcctctcggacagccaccagcagccccctctggtctgggaactaatacgatggcttcaggcagtggcgcaccaatggcagacaataacgagggcgccgacggagtgggtaattcctcgggaaattggcattgcgattccacatggatgggcgacagagtcatcaccaccagcacccgcacctgggctctgcccacctacaacaaccatctgtacaagcaaatttccagccagtctggagccagcaacgacaaccactactttggctacagcaccccttgggggtattttgacttcaacagattccactgccacttctccccacgtgactggcaaagactcatcaacaacaattggggattccggcccaaaagactcaacttcaagctctttaacattcaagtcaaggaggtcacgcagaatgacggtacgacgacgattgccaataaccttaccagcacggttcaggtgtttactgactcggagtaccagctcccgtacgtcctcggctcggcgcatcaaggatgcctcccgccgttcccagcagacgtcctcatggtgccacagtatggatacctcaccctgaacaacgggagtcaggcggtaggacgctcttcattttactgcccggagtaccttccttctcagatgctgcgtaccggaaacaactttaccttcagctacacctttgaggacgttccttttcacagcagctacgctcacagccagagtttggaccgtctcatgaatcctctcatcgaccagtacctgtattacttgagcagaacaaacactccaagcggaaccactacgcagtccaggcttcagttttctcaagccggagcgagtgacattcgggaccagtctaggaactggcttcctggaccctgttaccgccagcagcgagtatcaaagacagctgcggacaacaacaacagtgattactcgtggactggagctaccaagtatcacctcaatggaagagactctctggtgaatccgggcacagccacggccagccacaaggacgatgaagaaaagtattttcctcagagcggggttctcatcttcggaaaacaagactcgggaaaaactaatgtggacattgaaaaggtcatgattacagacgaagaggaaatcaggaccaccaatcccgtggctacggagcagtatggttctgtatctaccaatctccagagcggcaacacacaagcagctacctcagatgtcaacacacaaggcgttcttccaggcatggtctggcaggacagagacgtgtacctgcagggacccatctgggcaaagattccacacacggacggacattttcacccttctcctcttatgggaggatttggactgaagcaccctcccccgcagattctcatcaagaataccccggtacctgcgaatccttctaccgccttcagcgcggcaaagtttgcttccttcatcacacagtactccacggggcaggtcagcgtggagatcgagtgggagctgcagaaagagaacagcgaacgctggaaccccgagatccagtatacctccaactacaacaagtctgttaatgtggactttactgtggacactaatggcgtgtattcagagcctcgccccattggcacaaggtacctgactcgtaatctgtaa

SEQ ID NO: 3281 - DNA, 2208 bp, Artificial Sequence
  Description of Artificial Sequence: Synthetic polynucleotide
atggctgccgatggttatcttccagattggctcgaggacactctctctgaaggaataagacagtggtggaagctcaaacctggcccaccaccgccaaagcccgcagagcggcataaggacgacagcaggggtcttgtgcttcctgggtacaagtacctcggacccttcaacggactcgacaaaggagagccggtcaacgaggcagacgccgcggccctcgagcacgacaaggcctacgaccggcagctcgacagcggagacaacccgtacctcaagtacaaccacgccgacgcggagtttcaggagcgccttaaagaagatacgtcttttgggggcaacctcgcaagagcagtattccaggcgaaaaagagggttcttgaacctctgggcctggttgaggagcctgttaagacggctccgggaaaaaagaggccggtagagcactctcctgcggagccagattcctcctccggaactggaaagtcgggccaacagcctgcaagaaagagattgaattttggtcagactggagacgcagactccgtacctgacccccagcctctcggacagccaccagcagccccctctggtctgggaactaatacgatggcttcaggcagtggcgcaccaatggcagacaataacgagggcgccgacggagtgggtaattcctcgggaaattggcattgcgattccacatggatgggcgacagagtcatcaccaccagcacccgcacctgggctctgcccacctacaacaaccatctgtacaagcaaatttccagccagtctggagccagcaacgacaaccactactttggctacagcaccccttgggggtattttgacttcaacagattccactgccacttctccccacgtgactggcaaagactcatcaacaacaattggggattccggcccaaaagactcaacttcaagctctttaacattcaagtcaaggaggtcacgcagaatgacggtacgacgacgattgccaataaccttaccagcacggttcaggtgtttactgactcggagtaccagctcccgtacgtcctcggctcggcgcatcaaggatgcctcccgccgttcccagcagacgtcttcatggtgccacagtatggatacctcaccctgaacaacgggagtcaggcggtaggacgctcttcattttactgcccggagtaccttccttctcagatgctgcgtaccggaaacaactttaccttcagctacacctttgaggacgttccttttcacagcagctacgctcacagccagagtttggaccgtctcatgaatcctctcatcgaccagtacctgtattacttgagcagaacaaacactccaagcggaaccactacgcagtccaggcttcagttttctcaagccggagcgagtgacattcgggaccagtctaggaactggcttcctggaccctgttaccgccagcagcgagtatcaaagacagctgcggacaacaacaacagtgattactcgtggactggagctaccaagtatcacctcaatggaagagactctctggtgaatccgggcacagccatggccagccacaaggacgatggagaaaagtattttcctcagagcggggttctcatcttcggaaaacaagactcgggaaaaactaatgtggacattgaaaaggtcatgattacagacgaagaggaaatcaggaccaccaatcccgtggctacggagcagtatggttctgtatctaccaatctccagagcggcaacacacaagcagctacctcagatgtcaacacacaaggcgttcttccaggcatggtctggcaggacagagacgtgtacctgcagggacccatctgggcaaagattccacacacggacggacattttcacccttctcctcttatgggaggatttggactgaagcaccctcccccgcagattctcatcaagaataccccggtacctgcgaatccttctaccgccttcagcgcggcaaagtttgcttccttcatcacacagtactccacggggcaggtcagcgtggagatcgagtgggagctgcagaaagagaacagcgaacgctggaaccccgagatccagtatacctccaactacaacaagtctgttaatgtggaccttactgtggacactaatggcgtgtattcagagcctcgccccattggcacaaggtacctgactcgtaatctgtaa

SEQ ID NO: 3282 - DNA, 2208 bp, Artificial Sequence
  Description of Artificial Sequence: Synthetic polynucleotide
atggctgccgatggttatcttccagattggctcgaggacactctctctgaaggaataagacagtggtggaagctcaaacctggcccaccaccgccaaagcccgcagagcggcataaggacgacagcaggggtcttgtgcttcctgggtacaagtacctcggacccttcaacggactcgacaaaggagagccggtcaacgaggcagacgccgcggccctcgagcacgacaaggcctacgaccggcagctcgacagcggagacaacccgtacctcaagtacaaccacgccgacgcggagtttcaggagcgccttaaagaagatacgtcttttgggggcaacctcgcaagagcagtattccaggcgaaaaagagggttcttgaacctctgggcctggttgaggagcctgttaagacggctccgggaaaaaaggggccggtagagcactctcctgcggagccagattcctcctccggaactggaaagtcgggccaacagcctgcaagaaagagattgaattttggtcagactggagacgcagactccgtacctgacccccagcctctcggacagccaccagcagccccctctggtctgggaactaatacgatggcttcaggcagtggcgcaccaatggcagacaataacgagggcgccgacggagtgggtaattcctcgggaaattggcattgcgattccacatggatgggcgacagagtcatcaccaccagcacccgcacctgggctctgcccacctacaacaaccatctgtacaagcaaatttccagccagtctggagccagcaacgacaaccactactttggctacagcaccccttgggggtattttgacttcaacagattccactgccacttctccccacgtgactggcaaagactcatcaacaacaattggggattccggcccaaaagactcaacttcaagctctttaacattcaagtcaaggaggtcacgcagaatgacggtacgacgacgattgccaataaccttaccagcacggttcaggtgtttactgactcggagtaccagctcccgtacgtcctcggctcggcgcatcaaggatgcctcccgccgttcccagcagacgtcttcatggtgccacagtatggatacctcaccctgaacaacgggagtcaggcggtaggacgctcttcattttactgcctggagtactttccttctcagatgctgcgtaccggaaacaactttaccttcagctacacctttgaggacgttccttttcacagcagctacgctcacagccagagtttggaccgtctcatgaatcctctcatcgaccagtacctgtattacttgagcagaacaaacactccaagcggaaccactacgcagtccaggcttcggttttctcaagccggagcgagtgacattcgggaccagtctaggaactggcttcctggaccctgttaccgccagcagcgagtatcaaagacagctgcggacaacaacaacagtgattactcgtggactggagctaccaagtatcacctcaatggaagagactctctggtgaatccgggcacagccatggccagccacaaggacgatgaagaaaagtattttcctcagagcggggttctcatcttcggaaaacaagactcgggaaaaactaatgtggacattgaaagggtcatgattacagacgaagaggaaatcaggaccaccaatcccgtggctacggagcagtatggttctgtatctaccaatctccagagcggcaacacacaagcagctacctcagatgtcaacacacaaggcgttcttccaggcatggtctggcaggacagagacgtgtacctgcagggacccatctgggcaaagattccacacacggacggacattttcacccttctcctcttatgggaggatttggactgaagcaccctcccccgcagattctcatcaagaataccccggtacctgcgaatccttctaccaccttcagcgcggcaaagtttgcttccttcatcacacagtactccacggggcaggtcagcgtggagatcgagtgggagctgcagaaagagaacagcaaacgctggaaccccgagatccagtatacctccaactacaacaagtctgttaatgtggactttactgtggacactaatggcgtgtattcagagcctcgccccattggcacaagatacctgactcgtaatctgtaa

SEQ ID NO: 3283 - DNA, 2208 bp, Artificial Sequence
  Description of Artificial Sequence: Synthetic polynucleotide
atggctgccgatggttatcttccagattggctcgaggacactctctctgaaggaataagacagtggtggaagctcaaacctggcccaccaccgccaaagcccgcagagcggcataaggacgacagcaggggtcttgtgcttcctgggtacaagtacctcggacccttcaacggactcgacaaaggagagccggtcaacgaggcagacgccgcggccctcgagcacgacaaggcctacgaccggcagctcgacagcggagacaacccgtacctcaagtacaaccacgccgacgcggagtttcaggagcgccttaaagaagatacgtcttttgggggcaacctcgcaagagcagtattccaggcgaaaaagagggttcttgaacctctgggcctggttgaggagcctgttaagacggctccgggaaaaaagaggccggtagagcactctcctgcggggccagattcctcctccggaactggaaagtcgggccaacagcctgcaagaaagagattgaattttggtcagactggagacgcagactccgtacctgacccccagcctctcggacagccaccagcagccccctctggtctgggaactaatacgatggcttcaggcagtggcgcaccaatggcagacaataacgagggcgccgacggagtgggtaattcctcgggaaattggcattgcgattccacatggatgggcgacagagtcatcaccaccagcacccgcacctgggctctgcccacctacaacaaccatctgtacaagcaaatttccagccagtctggagccagcaacgacaaccactactttggctacagcaccccttgggggtattttgacttcaacagattccactgccacttctccccacgtgactggcaaagactcatcaacaacaattggggattccggcccaaaagactcaacttcgagctctttaacattcaagtcaaggaggtcacgcagaatgacggtacgacgacgattgccaataaccttaccagcacggttcaggtgtttactgactcggagtaccagctcccgtacgtcctcggctcggcgcatcaaggatgcctcccgccgttcccagcagacgtcttcatggtgccacagtatggatacctcaccctgaacaacgggagtcaggcggtaggacgctcttcattttactgcctggagtactttccttctcagatgctgcgtaccggaaacaactttaccttcagctacacctttgaggacgttccttttcacagcagctacgctcacagccagagtttggaccgtctcatgaatcctctcatcgaccagtacctgtattacttgagcagaacaaacactccaagcggaaccactacgcagtccaggcttcagttttctcaagccggagcgagtgacattcgggaccagtctaggaactggcttcctggaccctgttaccgccagcagcgagtatcaaagacagctgcggacaacaacaacagtgattactcgtggactggagctaccaagtatcacctcaatggaagagactctctggtgaatccgggcacagccatggccagccacaaggacgatgaagaaaagtattttcctcagagcggggttctcatcttcggaaaacaagactcgggaaaaactaatgtggacattgaaaaggtcatgattacagacgaagaggaaatcaggaccaccaatcccgtggctacggagcagtatggttctgtatctaccaatctccagagcggcaacacacaagcagctacctcagatgtcaacacacaaggcgttcttccaggcatggtctggcaggacagagacgtgtacctgcagggacccatctgggcaaagattccacacacggacggacactttcacccttctcctcttatgggaggatttggactgaagcaccctcccccgcagattctcatcaagagtaccccggtacctgcgaatccttctaccaccttcagcgcggcaaagtttgcttccttcatcacacagtactccacggggcaggtcagcgtggagatcgagtgggagctgcagaaagagaacagcaaacgctggaaccccgagatccagtatacctccaactacaacaagtctgttaatgtggactttactgtggacactaatggcgtgtattcagatcctcgccccattggcacaagatacctgactcgtaatctgtaa

SEQ ID NO: 3284 - DNA, 2208 bp, Artificial Sequence
  Description of Artificial Sequence: Synthetic polynucleotide
atggctgccgatggttatcttccagattggctcgaggacactctctctgaaggaataagacagtggtggaagctcaaacctggcccaccaccaccaaggcccgcagagcggcatcaggacgacagcaggggtcttgtgcttcctgggtacaagtacctcggacccttcaacggactcgacaaaggagagccggtcaacgaggcagacgctgcggccctcgagcacgacaaggcctacgaccggcagctcgacagcggagacaacccgtacctcaagtacaaccacgccgacgcggagtttcaggagcgtcttaaagaagatacgtcttttgggggcaacctcggacgagcagtcttccaggcgaaaaagagggttcttgaacctctgggcctggttgaggaacctgttaagacggctccgggaaaaaagaggccggtagagcactctcctgcggagccagactcctcctcgggaaccggaaaagcgggccagcagcctgcaagaaagagattgaatttcggtcagactggagacgcagactccgtacctgacccccagcctctcggacagccaccagcagcccccacaagtttgggatctactacaatggctacaggcagtggcgcaccaatggcagacaataacgagggtgccgatggagtgggtaattcctcaggaaattggcattgcgattcccaatggctgggcgacagagtcatcaccaccagcacccgaacctgggccctgcccacctacaacaaccacctctacaagcaaatctccagccaatcaggagcatcgaacgacaaccactactttggctacagcaccccttgggggtattttgacttcaacagattccactgtcacttctccccacgtgactggcaaagactcatcaacaacaactggggattccgacccaagagactcaacttcaagctctttaacattcaagtcaaagaggtcacgcagaatgacggtacgacgacgattgccaataaccttaccagcacggttcaggtgtttactgactcggagtaccagctcccgtacgtcctcggctcggcgcatcaaggatgcctcccgccgtttccagcggacgtcttcatggtcccacagtatggatacctcaccctgaacaacgggagtcaggcggtaggacgctcttcattttactgcctggagtactttccttctcagatgctgcgtaccggaaacaactttaccttcagctacacctttgaggacgttccttttcacagcagctacgctcacagccagagtttggaccgtctcatgaatcctctcatcgaccagtacctgtattacttgagcagaacaaacactccaagcggaaccactacgcagtccaggcttcggttttctcaagccggagcgagtgacattcgggaccagtctaggaactggcttcctggaccctgttaccgccagcagcgagtatcaaagacagctgcggacaacaacaacagtgattactcgtggactggagctaccaagtatcacctcaatggaagagactctctggtgaatccgggcacagccatggccagccacaaggacgatgaagaaaagtattttcctcagagcggggttctcatcttcggaaaacaagactcgggaaaaactaatgtggacattgaaagggtcatgattacagacgaagaggaaatcaggaccaccaatcccgtggctacggagcagtatggttctgtatctaccaatctccagagcggcaacacacaagcagctacctcagatgtcaacacacaaggcgttcttccaggcatggtctggcaggacagagacgtgtacctgcagggacccatctgggcaaagattccacacacggacggacattttcacccttctcctcttatgggaggatttggactgaagcaccctcccccgcagattctcatcaagaataccccggtacctgcgaatccttctaccaccttcagcgcggcaaagtttgcttccttcatcacacagtactccacggggcaggtcagcgtggagatcgagtgggagctgcagaaagagaacagcaaacgctggaaccccgagatccagtatacctccaactacaacaagtctgttaatgtggactttactgtggacactaatggcgtgtattcagagcctcgccccattggcacaagatacctgactcgtaatctgtaa

SEQ ID NO: 3285 - DNA, 2208 bp, Artificial Sequence
  Description of Artificial Sequence: Synthetic polynucleotide
atggctgccgatggttatcttccagattggctcgaggacactctctctgaaggaataagacagtggtggaagctcaaacctggcccaccaccaccaaggcccgcagagcggcatcaggacgacagcaggggtcttgtgcttcctgggtacaagtacctcggacccttcaacggactcgacaaaggagagccggtcaacgaggcagacgctgcggccctcgagcacgacaaggcctacgaccggcagctcgacagcggagacaacccgtacctcaagtacaaccacgccgacgcggagtttcaggagcgtcttaaagaagatacgtcttttgggggcaacctcggacgagcagtcttccaggcgaaaaagagggttcttgaacctctgggcctggttgaggaacctgttaagacggctccgggaaaaaagaggccggtagagcactctcctgcggagccagactcctcctcgggaaccggaaaagcgggccagcagcctgcaagaaagagattgaatttcggtcagactggagacgcagactccgtacctgacccccagcctctcggacagccaccagcagccccctctggtctgggaactaatacgatggcttcaggcagtggcgcaccaatggcagacaataacgagggcgccgacggagtgggtaattcctcgggaaattggcattgcgattccacatggatgggcgacagagtcatcaccaccagcacccgcacctgggctctgcccacctacaacaaccatctgtacaagcaaatttccagccagtctggagccagcaacgacaaccactactttggctacagcaccccttgggggtattttgacttcaacagattccactgccacttctccccacgtgactggcaaagactcatcaacaacaattggggattccggcccaaaagactcaacttcaagctctttaacattcaagtcaaggaggtcacgcagaatgacggtacgacgacgattgccaataaccttaccagcacggttcaggtgtttactgactcggagtaccagctcccgtacgtcctcggctcggcgcatcaaggatgcctcccgccgttcccagcagacgtcttcatggtgccacagtatggatacctcaccctgaacaacgggagtcaggcggtaggacgctcttcattttactgcctggagtactttccttctcagatgctgcgtaccggaaacaactttaccttcagctacacctttgaggacgttccttttcacagcagctacgctcacagccagagtttggaccgtctcatgaatcctctcatcgaccagtacctgtattacttgagcagaacaaacactccaagcggaaccactacgcagtccaggcttcggttttctcaagccggagcgagtgacattcgggaccagtctaggaactggcttcctggaccctgttaccgccagcagcgagtatcaaagacagctgcggacaacaacaacagtgattactcgtggactggagctaccaagtatcacctcaatggaagagactctctggtgaatccgggcacagccatggccagccacaaggacgatgaagaaaagtattttcctcagagcggggttctcatcttcggaaaacaagactcgggaaaaactaatgtggacattgaaagggtcatgattacagacgaagaggaaatcaggaccaccaatcccgtggctacggagcagtatggttctgtatctaccaatctccagagcggcaacacacaagcagctacctcagatgtcaacacacaaggcgttcttccaggcatggtctggcaggacagagacgtgtacctgcagggacccatctgggcaaagattccacacacggacggacattttcacccttctcctcttatgggaggatttggactgaagcaccctcccccgcagattctcatcaagaataccccggtacctgcgaatccttctaccaccttcagcgcggcaaagtttgcttccttcatcacacagtactccacggggcaggtcagcgtggagatcgagtgggagctgcagaaagagaacagcaaacgctggaaccccgagatccagtatacctccaactacaacaagtctgttaatgtggactttactgtggacactaatggcgtgtattcagagcctcgccccattggcacaagatacctgactcgtaatctgtaa

SEQ ID NO: 3286 - DNA, 2208 bp, Artificial Sequence
  Description of Artificial Sequence: Synthetic polynucleotide
atggctgccgatggttatcttccagattggctcgaggacactctctctgaaggaataagacagtggtggaagctcaaacctggcccaccaccgccaaagcccgcagagcggcataaggacgacagcaggggtcttgtgcttcctgggtacaagtacctcggacccttcaacggactcgacaaaggagagccggtcaacgaggcagacgccgcggccctcgagcacgacaaggcctacgaccggcagctcgacagcggagacaacccgtacctcaagtacaaccacgccgacgcggagtttcaggagcgccttaaagaagatacgtcttttgggggcaacctcgcaagagcagtattccaggcgaaaaagagggttcttgaacctctgggcctggttgaggagcctgttaagacggctccgggaaaaaagaggccggtagagcactctcctgcggggccagattcctcctccggaactggaaagtcgggccaacagcctgcaagaaagagattgaattttggtcagactggagacgcagactccgtacctgacccccagcctctcggacagccaccagcagccccctctggtctgggaactaatacgatggcttcaggcagtggcgcaccaatggcagacaataacgagggcgccgacggagtgggtaattcctcgggaaattggcattgcgattccacatggatgggcgacagagtcatcaccaccagcacccgcacctgggctctgcccacctacaacaaccatctgtacaagcaaatttccagccagtctggagccagcaacgacaaccactactttggctacagcaccccttgggggtattttgacttcaacagattccactgccacttctccccacgtgactggcaaagactcatcaacaacaattggggattccggcccaaaagactcaacttcgagctctttaacattcaagtcaaggaggtcacgcagaatgacggtacgacgacgattgccaataaccttaccagcacggttcaggtgtttactgactcggagtaccagctcccgtacgtcctcggctcggcgcatcaaggatgcctcccgccgttcccagcagacgtcttcatggtgccacagtatggatacctcaccctgaacaacgggagtcaggcggtaggacgctcttcattttactgcctggagtactttccttctcagatgctgcgtaccggaaacaactttaccttcagctacacctttgaggacgttccttttcacagcagctacgctcacagccagagtttggaccgtctcatgaatcctctcatcgaccagtacctgtattacttgagcagaacaaacactccaagcggaaccactacgcagtccaggcttcagtttcctcaagccggagcgagtgacattcgggaccagtctaggaactggcttcctggaccctgttaccgccagcagcgagtatcaaagacagctgcggacaacaacaacagtgattactcgtggactggagctaccaagtatcacctcaatggaagagactctctggtgaatccgggcacagccatggccagccacaaggacgatgaagaaaagtattttcctcagagcggggttctcatcttcggaaaacaagactcgggaaaaactaatgtggacattgaaaaggtcatgattacagacgaagaggaaatcaggaccaccaatcccgtggctacggagcagtatggttctgtatctaccaatctccagagcggcaacacacaagcagctacctcagatgtcaacacacaaggcgttcttccaggcatggtctggcaggacagagacgtgtacctgcagggacccatctgggcaaagattccacacacggacggacactttcacccttctcctcttatgggaggatttggactgaagcaccctcccccgcagattctcatcaagagtaccccggtacctgcgaatccttctaccaccttcagcgcggcaaagtttgcttccttcatcacacagtactccacggggcaggtcagcgtggagatcgagtgggagctgcagaaagagaacagcaaacgctggaaccccgagatccagtatacctccaactacaacaagtctgttaatgtggactttactgtggacactaatggcgtgtattcagagcctcgccccattggcacaagatacctgactcgtaatctgtaa

SEQ ID NO: 3287 - DNA, 2208 bp, Artificial Sequence
  Description of Artificial Sequence: Synthetic polynucleotide
atggctgccgatggttatcttccagattggctcgaggacactctctctgaaggaataagacagtggtggaagctcaaacctggcccaccaccaccaaggcccgcagagcggcatcaggacgacagcaggggtcttgtgcttcctgggtacaagtacctcggacccttcaacggactcgacaaaggagagccggtcaacgaggcagacgctgcggccctcgagcacgacaaggcctacgaccggcagctcgacagcggagacaacccgtacctcaagtacaaccacgccgacgcggagtttcaggagcgtcttaaagaagatacgtcttttgggggcaacctcggacgagcagtcttccaggcgaaaaagagggttcttgaacctctgggcctggttgaggaacctgttaagacggctccgggaaaaaagaggccggtagagcactctcctgcggagccagattcctcctccggaactggaaagtcgggccaacagcctgcaagaaagagattgaattttggtcagactggagacgcagactccgtacctgacccccagcctctcggacagccaccagcagccccctctggtctgggaactaatacgatggcttcaggcagtggcgcaccaatggcagacaataacgagggcgccgacggagtgggtaattcctcgggaaattggcattgcgattccacatggatgggcgacagagtcatcaccaccagcacccgcacctgggctctgcccacctacaacaaccatctgtacaagcaaatttccagccagtctggagccagcaacgacaaccactactttggctacagcaccccttgggggtattttgacttcaacagattccactgccacttctccccacgtgactggcaaagactcatcaacaacaattggggattccggcccaaaagactcaacttcaagctctttaacattcaagtcaaggaggtcacgcagaatgacggtacgacgacgattgccaataaccttaccagcacggttcaggtgtttactgactcggagtaccagctcccgtacgtcctcggctcggcgcatcaaggatgcctcccgccgttcccagcagacgtcttcatggtgccacagtatggatacctcaccctgaacaacgggagtcaggcggtaggacgctcttcattttactgcctggagtactttccttctcagatgctgcgtaccggaaacaactttaccttcagctacacctttgaggacgttccttttcacagcagctacgctcacagccagagtttggaccgtctcatgaatcctctcatcgaccagtacctgtattacttgagcagaacaaacactccaagcggaaccactacgcagtccaggcttcggttttctcaagccggagcgagtgacattcgggaccagtctaggaactggcttcctggaccctgttaccgccagcagcgagtatcaaagacagctgcggacaacaacaacagtgattactcgtggactggagctaccaagtatcacctcaatggaagagactctctggtgaatccgggcacagccatggccagccacaaggacgatgaagaaaagtattttcctcagagcggggttctcatcttcggaaaacaagactcgggaaaaactaatgtggacattgaaagggtcatgattacagacgaagaggaaatcaggaccaccaatcccgtggctacggagcagtatggttctgtatctaccaatctccagagcggcaacacacaagcagctacctcagatgtcaacacacaaggcgttcttccaggcatggtctggcaggacagagacgtgtacctgcagggacccatctgggcaaagattccacacacggacggacattttcacccttctcctcttatgggaggatttggactgaagcaccctcccccgcagattctcatcaagaataccccggtacctgcgaatccttctaccaccttcagcgcggcaaagtttgcttccttcatcacacagtactccacggggcaggtcagcgtggagatcgagtgggagctgcagaaagagaacagcaaacgctggaaccccgagatccagtatacctccaactacaacaagtctgttaatgtggactttactgtggacactaatggcgtgtattcagagcctcgccccattggcacaagatacctgactcgtaatctgtaa

SEQ ID NO: 3288 - DNA, 2208 bp, Artificial Sequence
  Description of Artificial Sequence: Synthetic polynucleotide
atggctgccgatggttatcttccagattggctcgaggacactctctctgaaggaataagacagtggtggaagctcaaacctggcccaccaccgccaaagcccgcagagcggcataaggacgacagcaggggtcttgtgcttcctgggtacaagtacctcggacccttcaacggactcgacaaaggagagccggtcaacgaggcagacgccgcggccctcgagcacgacaaggcctacgaccggcagctcgacagcggagacaacccgtacctcaagtacaaccacgccgacgcggagtttcaggagcgccttaaagaagatacgtcttttgggggcaacctcgcaagagcagtattccaggcgaaaaagagggttcttgaacctctgggcctggttgaggagcctgttaagacggctccgggaaaaaagaggccggtagagcactctcctgcggagccagattcctcctccggaactggaaagtcgggccaacagcctgcaagaaagagattgaattttggtcagactggagacgcagactccgtacctgacccccagcctctcggacagccaccagcagccccctctggtctgggaactaatacgatggcttcaggcagtggcgcaccaatggcagacaataacgagggcgccgacggagtgggtaattcctcgggaaattggcattgcgattccacatggatgggcgacagagtcatcaccaccagcacccgcacctgggctctgcccacctacaacaaccatctgtacaagcaaatttccagccagtctggagccagcaacgacaaccactactttggctacagcaccccttgggggtattttgacttcaacagattccactgccacttctccccacgtgactggcaaagactcatcaacaacaattggggattccggcccaaaagactcaacttcaagctctttaacattcaagtcaaggaggtcacgcagaatgacggtacgacgacgattgccaataaccttaccagcacggttcaggtgtttactgactcggagtaccagctcccgtacgtcctcggctcggcgcatcaaggatgcctcccgccgttcccagcagacgtcttcatggtgccacagtatggatacctcaccctgaacaacgggagtcaggcggtaggacgctcttcattttactgcctggagtactttccttctcagatgctgcgtaccggaaacaactttaccttcagctacacctttgaggacgttccttttcacagcagctacgctcacagccagagtttggaccgtctcatgaatcctctcatcgaccagtacctgtattacttgagcagaacaaacactccaagcggaaccactacgcagtccaggcttcggttttctcaagccggagcgagtgacattcgggaccagtctaggaactggcttcctggaccctgttaccgccagcagcgagtatcaaagacagctgcggacaacaacaacagtgattactcgtggactggagctaccaagtatcacctcaatggaagagactctctggtgaatccgggcacagccatggccagccacaaggacgatgaagaaaagtattttcctcagagcggggttctcatcttcggaaaacaagactcgggaaaaactaatgtggacattgaaagggtcatgattacagacgaagaggaaatcaggaccaccaatcccgtggctacggagcagtatggttctgtatctaccaatctccagagcggcaacacacaagcagctacctcagatgtcaacacacaaggcgttcttccaggcatggtctggcaggacagagacgtgtacctgcagggacccatctgggcaaagattccacacacggacggacattttcacccttctcctcttatgggaggatttggactgaagcaccctcccccgcagattctcatcaagaataccccggtacctgcgaatccttctaccaccttcagcgcggcaaagtttgcttccttcatcacacagtactccacggggcaggtcagcgtggagatcgagtgggagctgcagaaagagaacagcaaacgctggaaccccgagatccagtatacctccaactacaacaagtctgttaatgtggactttactgtggacactaatggcgtgtattcagagcctcgccccattggcacaagatacctgactcgtaatctgtaa

SEQ ID NO: 3289 - DNA, 2208 bp, Artificial Sequence
  Description of Artificial Sequence: Synthetic polynucleotide
atggctgccgatggttatcttccagattggctcgaggacactctctctgaaggaataagacagtggtggaagctcaaacctggcccaccaccgccaaagcccgcagagcggcataaggacgacagcaggggtcttgtgcttcctgggtacaagtacctcggacccttcaacggactcgacaaaggagagccggtcaacgaggcagacgccgcggccctcgagcacgacaaggcctacgaccggcagctcgacagcggagacaacccgtacctcaagtacaaccacgccgacgcggagtttcaggagcgccttaaagaagatacgtcttttgggggcaacctcgcaagagcagtattccaggcgaaaaagagggttcttgaacctctgggcctggttgaggagcctgttaagacggctccgggaaaaaagaggccggtagagcactctcctgcggagccagattcctcctccggaactggaaagtcgggccaacagcctgcaagaaagagattgaattttggtcagactggagacgcagactccgtacctgacccccagcctctcggacagccaccagcagccccctctggtctgggaactaatacgatggcttcaggcagtggcgcaccaatggcagacaataacgagggcgccgacggagtgggtaattcctcgggaaattggcattgcgattccacatggatgggcgacagagtcatcaccaccagcacccgcacctgggctctgcccacctacaacaaccatctgtacaagcaaatttccagccagtctggagccagcaacgacaaccactactttggctacagcaccccttgggggtattttgacttcaacagattccactgccacttctccccacgtgactggcaaagactcatcaacaacaattggggattccggcccaaaagactcaacttcaagctctttaacattcaagtcaaggaggtcacgcagaatgacggtacgacgacgattgccaataaccttaccagcacggttcaggtgtttactgactcggagtaccagctcccgtacgtcctcggctcggcgcatcaaggatgcctcccgccgttcccagcagacgtcttcatggtgccacagtatggatacctcaccctgaacaacgggagtcagacggtaggacgctcttcattttactgcctggagtactttccttctcagatgctgcgtaccggaaacaactttaccttcagctacacctttgaggacgttccttttcacagcagctacgctcacagccagagtttggaccgtctcatgaatcctctcatcgaccagtacctgtattacttgagcagaacaaacactccaagcggaaccactacgcagtccaggcttcggttttctcaagccggagcgagtgacattcgggaccagtctaggaactggcttcctggaccctgttaccgccagcagcgagtatcaaagacagctgcggacaacaacaacagtgattactcgtggactggagctaccaagtatcacctcaatggaagagactctctggtgaatccgggcacagccatggccagccacaaggacgatgaagaaaagtattttcctcagagcggggttctcatcttcggaaaacaagactcgggaaaaactaatgtggacattgaaagggtcatgattacagacgaagaggaaatcaggaccaccaatcccgtggctacggagcagtatggttctgtatctaccaatctccagagcggcaacacacaagcagctacctcagatgtcaacacacaaggcgttcttccaggcatggtctggcaggacagagacgtgtacctgcagggacccatctgggcaaagattccacacacggacggacattttcacccttctcctcttatgggaggatttggactgaagcaccctcccccgcagattctcatcaagaataccccggtacctgcgaatccttctaccaccttcagcgcggcaaagtttgcttccttcatcacacagtactccacggggcaggtcagcgtggagatcgagtgggagctgcagaaagagaacagcaaacgctggaaccccgagatccagtatacctccaactacaacaagtctgttaatgtggactttactgtggacactaatggcgtgtattcagagcctcgccccattggcacaagatacctgactcgtaatctgtaa

SEQ ID NO: 3290 - DNA, 2208 bp, Artificial Sequence
  Description of Artificial Sequence: Synthetic polynucleotide
atggctgccgatggttatcttccagattggctcgaggacactctctctgaaggaataagacagtggtggaagctcaaacctggcccaccaccgccaaagcccgcagagcggcataaggacgacagcaggggtcttgtgcttcctgggtacaagtacctcggacccttcaacggactcgacaaaggagagccggtcaacgaggcagacgccgcggccctcgagcacgacaaggcctacgaccggcagctcgacagcggagacaacccgtacctcaagtacaaccacgccgacgcggagtttcaggagcgccttaaagaagatacgtcttttgggggcaacctcgcaagagcagtattccaggcgaaaaagagggttcttgaacctctgggcctggttgaggagcctgttaagacggctccgggaaaaaagaggccggtagagcactctcctgcggagccagattcctcctccggaactggaaagtcgggccaacagcctgcaagaaagagattgaattttggtcagactggagacgcagactccgtacctgacccccagcctctcggacagccaccagcagccccctctggtctgggaactaatacgatggcttcaggcagtggcgcaccaatggcagacaataacgagggcgccgacggagtgggtaattcctcgggaaattggcattgcgattccacatggatgggcgacagagtcatccccaccagcacccgcacctgggctctgcccacctacaacaaccatctgtacaagcaaatttccagccagtctggagccagcaacgacaaccactactttggctacagcaccccttgggggtattttgacttcaacagattccactgccacttctccccacgtgactggcaaagactcatcaacaacaattggggattccggcccaaaagactcaacttcaagctctttaacattcaagtcaaggaggtcacgcagaatgacggtacgacgacgattgccaataaccttaccagcacggttcaggtgtttactgactcggggtaccagctcccgtacgtcctcggctcggcgcatcaaggatgcctcccgccgttcccagcagacgtcttcatggtgccacagtatggatacctcaccctgaacaacgggagtcaggcggtaggacgctcttcattttactgcctggagtactttccttctcagatgctgcgtaccggaaacaactttaccttcagctacacctttgaggacgttccttttcacagcagctacgctcacagccagagtttggaccgtctcatgaatcctctcatcgaccagtacctgtattacttgagcagaacaaacactccaagcggaaccactacgcagtccaggcttcggttttctcaagccggagcgagtgacattcgggaccagtctaggaactggcttcctggaccctgttaccgccagcagcgagtatcaaagacagctgcggacaacaacaacagtgattactcgtggactggagctaccaagtatcacctcaatggaagagactctctggtgaatccgggcacagccatggccagccacaaggacgatgaagaaaagtattttcctcagagcggggttctcatcttcggaaaacaagactcgggaaaaactaatgtggacattgaaagggtcatgattacagacgaagaggaaatcaggaccaccaatcccgtggctacggagcagtatggttctgtatctaccaatctccagagcggcaacacacaagcagctacctcagatgtcaacacacaaggcgttcttccaggcatggtctggcaggacagagacgtgtacctgcagggacccatctgggcaaagattccacacacggacggacattttcacccttctcctcttatgggaggatttggactgaagcaccctcccccgcagattctcatcaagaataccccggtacctgcgaatccttctaccaccttcagcgcggcaaagtttgcttccttcatcacacagtactccacggggcaggtcagcgtggagatcgagtgggagctgcagaaagagaacagcaaacgctggaaccccgagatccagtatacctccaactacaacaagtctgttaatgtggactttactgtggacactaatggcgtgtattcagagcctcgccccattggcacaagatacctgactcgtaatctgtaa

SEQ ID NO: 3291 - DNA, 2208 bp, Artificial Sequence
  Description of Artificial Sequence: Synthetic polynucleotide
atggctgccgatggttatcttccagattggctcgaggacactctctctgaaggaataagacagtggtggaagctcaaacctggcccaccaccgccaaagcccgcagagcggcataaggacgacagcaggggtcttgtgcttcctgggtacaagtacctcggacccttcaacggactcgacaaaggagagccggtcaacgaggcagacgccgcggccctcgagcacgacaaggcctacgaccggcagctcgacagcggagacaacccgtacctcaagtacaaccacgccgacgcggagtttcaggagcgccttaaagaagatacgtcttttgggggcaacctcgcaagagcagtattccaggcgaaaaagagggttcttgaacctctgggcctggttgaggagcctgttaagacggctccgggaaaaaagaggccggtagagcactctcctgcggagccagattcctcctccggaactggaaagtcgggccaacagcctgcaagaaagagattgaattttggtcagactggagacgcagactccgtacctgacccccagcctctcggacagccaccagcagccccctctggtctgggaactaatacgatggcttcaggcagtggcgcaccaatggcagacaataacgagggcgccgacggagtgggtaattcctcgggaaattggcattgcgattccacatggatgggcgacagagtcatcaccaccagcacccgcacctgggctctgcccacctacaacaaccatctgtacaagcaaatttccagccagtctggagccagcaacgacaaccactactttggctacagcaccccttgggggtattttgacttcaacagattccactgccacttctccccacgtgactggcaaagactcatcaacaacaattggggattccggcccaaaagactcaacttcaagctctttaacattcaagtcaaggaggtcacgcagaatgacggtacgacgacgattgccaataaccttaccagcacggttcaggtgtttactgactcggagtaccagctcccgtacgtcctcggctcggcgcatcaaggatgcctcccgccgttcccagcagacgtcttcatggtgccacagtatggatacctcaccctgaacaacgggagtcaggcggtaggacgctcttcattttactgcctggagtactttccttctcagatgctgcgtaccggaaacaactttaccttcagctacacctttgaggacgttccttttcacagcagctacgctcacagccagagtttggaccgtctcatgaatcctctcatcgaccagtacctgtattacttgagcagaacaaacactccaagcggaaccactacgcagtccaggcttcggttttctcaagccggagcgagtgacattcgggaccagtctaggaactggcttcctggaccctgttaccgccagcagcgagtatcaaagacagctgcggacaacaacaacagtgattactcgtggactggagctaccaagtatcacctcaatggaagagactctctggtgaatccgggcacagccatggccagccacaaggacgatgaagaaaagtattttcctcagagcggggttctcatcttcggaaaacaagactcgggaaaaactaatgtggacattgaaagggtcatgattacagacgaagaggaaatcaggaccaccaatcccgtggctacggagcagtatggttctgtatctaccaatctccagagcggcgacacacaagcagctacctcagatgtcaacacacaaggcgttcttccaggcatggtctggcaggacagagacgtgtacctgcagggacccatctgggcaaagattccacacacggacggacattttcacccttctcctcttatgggaggatttggactgaagcaccctcccccgcagattctcatcaagaataccccggtacctgcgaatccttctaccaccttcagcgcggcaaagtttgcttccttcatcacacagtactccacggggcaggtcagcgtggagatcgagtgggagctgcagaaagagaacagcaaacgctggaaccccgagatccagtatacctccaactacaacaagtctgttaatgtggactttactgtggacactaatggcgtgtattcagagcctcgccccattggcacaagatacctgactcgtaatctgtaa

SEQ ID NO: 3292 - DNA, 2205 bp, Artificial Sequence
  Description of Artificial Sequence: Synthetic polynucleotide
atggctgccgatggttatcttccagattggctcgaggacactctctctgaaggaataagacagtggtggaagctcaaacctggcccaccaccgccaaagcccgcagagcggcataaggacgacagcaggggtcttgtgcttcctgggtacaagtacctcggacccttcaacggactcgacaaaggagagccggtcaacgaggcagacgccgcggccctcgagcacgacaaggcctacgaccggcagctcgacagcggagacaacccgtacctcaagtacaaccacgccgacgcggagtttcaggagcgccttaaagaagatacgtcttttgggggcaacctcgcaagagcagtattccaggcgaaaaagagggttcttgaacctctgggcctggttgaggagcctgttaagacggctccgggaaaaaagaggccggtagagcactctcctgcggagccagattcctcctccggaactggaaagtcgggccaacagcctgcaagaaagagattgaattttggtcagactggagacgcagactccgtacctgacccccagcctctcggacagccaccagcagccccctctggtctgggaactaatacgatggcttcaggcagtggcgcaccaatggcagacaataacgagggcgccgacggagtgggtaattcctcgggaaattggcattgcgattccacatggatgggcgacagagtcatcaccaccagcacccgcacctgggctctgcccacctacaacaaccatctgtacaagcaaatttccagccagtctggagccagcaacgacaaccactactttggctacagcaccccttgggggtattttgacttcaacagattccactgccacttctccccacgtgactggcaaagactcatcaacaacaattggggattccggcccaaaagactcaacttcaagctctttaacattcaagtcaaggaggtcacgcagaatgacggtacgacgacgattgccaataaccttaccagcacggttcaggtgtttactgactcggagtaccagctcccgtacgtcctcggctcggcgcatcaaggatgcctcccgccgttcccagcagacgtcttcatggtgccacagtatggatacctcaccctgaacaacgggagtcaggcggtaggacgctcttcattttactgcctggagtactttccttctcagatgctgcgtaccggaaacaactttaccttcagctacacctttgaggacgttccttttcacagcagctacgctcacagccagagtttggaccgtctcatgaatcctctcatcgaccagtacctgtattacttgagcagaacaaacactccaagcggaaccactacgcagtccaggcttcggttttctcaagccggagcgagtgacattcgggaccagtctaggaactggcttcctggaccctgttaccgccagcagcgagtatcaaagacagctgcggacaacaacagtgattactcgtggactggagctaccaagtatcacctcaatggaagagactctctggtgaatccgggcacagccatggccagccacaaggacgatgaagaaaagtattttcctcagagcggggttctcatcttcggaaaacaagactcgggaaaaactaatgtggacattgaaagggtcatgattacagacgaagaggaaatcaggaccaccaatcccgtggctacggagcagtatggttctgtatctaccaatctccagagcggcaacacacaagcagctacctcagatgtcaacacacaaggcgttcttccaggcatggtctggcaggacagagacgtgtacctgcagggacccatctgggcaaagattccacacacggacggacattttcacccttctcctcttatgggaggatttggactgaagcaccctcccccgcagattctcatcaagaataccccggtacctgcgaatccttctaccaccttcagcgcggcaaagtttgcttccttcatcacacagtactccacggggcaggtcagcgtggagatcgagtgggagctgcagaaagagaacagcaaacgctggaaccccgagatccagtatacctccaactacaacaagtctgttaatgtggactttactgtggacactaatggcgtgtattcagagcctcgccccattggcacaagatacctgactcgtaatctgtaa

SEQ ID NO: 3293 - DNA, 2208 bp, Artificial Sequence
  Description of Artificial Sequence: Synthetic polynucleotide
atggctgccgatggttatcttccagattggctcgaggacactctctctgaaggaataagacagtggtggaagctcaaacctggcccaccaccgccaaagcccgcagagcggcataaggacgacagcaggggtcttgtgcttcctgggtacaagtacctcggacccttcaacggactcgacaaaggagagccggtcaacgaggcagacgccgcggccctcgagcacgacaaggcctacgaccggcagctcgacagcggagacaacccgtacctcaagtacaaccacgccgacgcggagtttcaggagcgccttaaagaagatacgtcttttgggggcaacctcgcaagagcagtattccaggcgaaaaagagggttcttgaacctctgggcctggttgaggagcctgttaagacggctccgggaaaaaagaggccggtagagcactctcctgcggagccagattcctcctccggaactggaaagtcgggccaacagcctgcaagaaagagattgaattttggtcagactggagacgcagactccgtacctgacccccagcctctcggacagccaccagcagccccctctggtctgggaactaatacgatggcttcaggcagtggcgcaccaatggcagacaataacgagggcgccgacggagtgggtaattcctcgggaaattggcattgcgattccacatggatgggcgacagagtcatcaccaccagcacccgcacctgggctctgcccacctacaacaaccatctgtacaagcaaatttccagccagtctggagccagcaacgacaaccactactttggctacagcaccccttgggggtattttgacttcaacagattccactgccacttctccccacgtgactggcaaagactcatcaacaacaattggggattccggcccaaaagactcaacttcaagctctttaacattcaagtcaaggaggtcacgcagaatgacggtacgacgacgattgccaataaccttaccagcacggttcaggtgtttactgactcggagtaccagctcccgtacgtcctcggctcggcgcatcaaggatgcctcccgccgttcccagcagacgtcttcatggtgccacagtatggatacctcaccctgaacaacgggagtcaggcggtaggacgctcttcattttactgcctggagtactttccttctcagatgctgcgtaccggaaacaactttaccttcagctacacctttgaggacgttccttttcacagtagctacgctcacagccagagttcggaccgtctcatgaatcctctcatcgaccagtacctgtattacttgagcagaacaaacactccaagcggaaccactacgcagtccaggcttcggttttctcaagccggagcgagtgacattcgggaccagtctaggaactggcttcctgggccctgttaccgccagcagcgagtatcaaagacagctgcggacaacaacaacagtgattactcgtggactggagctaccaagtatcacctcaatggaagagactctctggtgaatccgggcacagccatggccagccacaaggacgatgaagaaaagtattttcctcagagcggggttctcatcttcggaaaacaagactcgggaaaaactaatgtggacattgaaagggtcatgattacagacgaagaggaaatcaggaccaccaatcccgtggctacggagcagtatggttctgtatctaccaatctccagagcggcaacacacaagcagctacctcagatgtcaacacacaaggcgttcttccaggcatggtctggcaggacagagacgtgtacctgcagggacccatctgggcaaagattccacacacggacggacattttcgcccttctcctcttatgggaggatttggactgaagcaccctcccccgcagattctcatcaagaataccccggtacctgcgaatccttctaccaccttcagcgcggcaaagtttgcttccttcatcacacagtactccacggggcaggtcagcgtggagatcgagtgggagctgcagaaagagaacagcaaacgctggaaccccgagatccagtatacctccaactacaacaagtctgttaatgtggactttactgtggacactaatggcgtgtattcagagcctcgccccattggcacaagatacctgactcgtaatctgtaa

SEQ ID NO: 3294 - DNA, 2208 bp, Artificial Sequence
  Description of Artificial Sequence: Synthetic polynucleotide
atggctgccgatggttatcttccagattggctcgaggacactctctctgaaggaataagacagtggtggaagctcaaacctggcccaccaccgccaaagcccgcagagcggcataaggacgacagcaggggtcttgtgcttcctgggtacaagtacctcggacccttcaacggactcgacaaaggagagccggtcaacgaggcagacgccgcggccctcgagcacgacaaggcctacgaccggcagctcgacagcggagacaacccgtacctcaagtacaaccacgccgacgcggagtttcaggagcgccttaaagaagatacgtcttttgggggcaacctcgcaagagcagtattccaggcgaaaaagagggttcttgaacctctgggcctggttgaggagcctgttaagacggctccgggaaaaaagaggccggtagagcactctcctgcggggccagattcctcctccggaactggaaagtcgggccaacagcctgcaagaaagagattgaattttggtcagactggagacgcagactccgtacctgacccccagcctctcggacagccaccagcagccccctctggtctgggaactaatacgatggcttcaggcagtggcgcaccaatggcagacaataacgagggcgccgacggagtgggtaattcctcgggaaattggcattgcgattccacatggatgggcgacagagtcatcaccaccagcacccgcacctgggctctgcccacctacaacaaccatctgtacaagcaaatttccagccagtctggagccagcaacgacaaccactactttggctacagcaccccttgggggtattttgacttcaacagattccactgccacttctccccacgtgactggcaaagactcatcaacaacaattggggtttccggcccaaaagactcaacttcgagctctttaacattcaagtcaaggaggtcacgcagaatgacggtacgacgacgattgccaataaccttaccagcacggttcaggtgtttactgactcggagtaccagctcccgtacgtcctcggctcggcgcatcaaggatgcctcccgccgttcccagcagacgtcttcatggtgccacagtatggatacctcaccctgaacaacgggagtcaggcggtaggacgctcttcattttactgcctggagtactttccttctcagatgctgcgtaccggaaacaactttaccttcagctacacctttgaggacgttccttttcacagcagctacgctcacagccagagtttggaccgtctcatgaatcctctcatcgaccagtacctgtattacttgagcagaacaaacactccaagcggaaccactacgcagtccaggcttcagttttctcaagccggagcgagtgacattcgggaccagtctaggaactggcttcctggaccctgttaccgccagcagcgagtatcaaagacagctgcggacaacaacaacagtgattactcgtggactggagctaccaagtatcacctcaatggaagagactctctggtgaatccgggcacagccatggccagccacaaggacgatgaagaaaagtattttcctcagagcggggttctcatcttcggaaaacaagactcgggaaaaactaatgtggacattgaaaaggtcatgattacagacgaagaggaaatcaggaccaccaatcccgtggctacggagcagtatggttctgtatctaccaatctccagagcggcaacacacaagcagctacctcagatgtcaacacacaaggcgttcttccaggcatggtctggcaggacagaggcgtgtacctgcagggacccatctgggcaaagattccacacacggacggacactttcacccttctcctcttatgggaggatttggactgaagcaccctcccccgcagattctcatcaagagtaccccggtacctgcgaatccttctaccaccttcagcgcggcaaagtttgcttccttcatcacacagtactccacggggcaggtcagcgtggagatcgagtgggagctgcagaaagagaacagcaaacgctggaaccccgagatccagtatacctccaactacaacaagtctgttaatgtggactttactgtggacactaatggcgtgtattcagatcctcgccccattggcacaagatacctgactcgtaatctgtaa

SEQ ID NO: 3295 - DNA, 2208 bp, Artificial Sequence
  Description of Artificial Sequence: Synthetic polynucleotide
atggctgccgatggttatcttccagattggctcgaggacactctctctgaaggaataagacagtggtggaagctcaaacctggcccaccaccgccaaagcccgcagagcggcataaggacgacagcaggggtcttgtgcttcctgggtacaagtacctcggacccttcaacggactcgacaaaggagagccggtcaacgaggcagacgccgcggccctcgagcacgacaaggcctacgaccggcagctcgacagcggagacaacccgtacctcaagtacaaccacgccgacgcggagtttcaggagcgccttaaagaagatacgtcttttgggggcaacctcgcaagagcagtattccaggcgaaaaagagggttcttgaacctctgggcctggttgaggagcctgttaagacggctccgggaaaaaagaggccggtagagcactctcctgcggagccagattcctcctccggaactggaaagtcgggccaacagcctgcaagaaagagattgaattttggtcagactggagacgcagactccgtacctgacccccagcctctcggacagccaccagcagccccctctggtctgggaactaatacgatggcttcaggcagtggcgcaccaatggcagacaataacgagggcgccgacggagtgggtaattcctcgggaaattggcattgcgattccacatggatgggcgacagagtcatcaccaccagcacccgcacctgggctctgcccacctacaacaaccatctgtacaagcaaatttccagccagtctggagccagcaacgacaaccactactttggctacagcaccccttgggggtattttgacttcaacagattccactgccacttctccccacgtggctggcaaagactcatcaacaacaattggggattccggcccaaaagactcaacttcaagctctttaacattcaagtcaaggaggtcacgcagaatgacggtacgacgacgattgccaataaccttaccagcacggttcaggtgtttactgactcggagtaccagctcccgtacgtcctcggctcggcgcatcaaggatgcctcccgccgttcccagcagacgtcttcatggtgccacagtatggatacctcaccctgaacaacgggagtcaggcggtaggacgctcttcattttactgcctggagtactttccttctcagatgctgcgtaccggaagcaactttaccttcagctacacctttgaggacgttccttttcacagcagctacgctcacagccagagtttggaccgtctcatgaatcctctcatcgaccagtacctgtattacttgagcagaacaaacactccaagcggaaccactacgcagtccaggcttcggttttctcaagccggagcgagtgacattcgggaccagtctaggaactggcttcctgggccctgttaccgccagcagcgagtatcaaagacagctgcggacaacaacaacagtgattactcgtggactggagctaccaagtatcacctcaatggaagagactctctggtgaatccgggcacagccatggccagccacaaggacgatgaagaaaagtattttcctcagagcggggttctcatcttcggaaaacaagactcgggaaaaactaatgtggacattgaaagggtcatgattacagacgaagaggaaatcaggaccaccaatcccgtggctacggagcagtatggttctgtatctaccaatctccagagcggcaacacacaagcagctacctcagatgtcaacacacaaggcgttcttccaggcatggtctggcaggacagagacgtgtacctgcagggacccatctgggcaaagattccacacacggacggacattttcacccttctcctcttatgggaggatttggactgaagcaccctcccccgcagattctcatcaagaataccccggtacctgcgaatccttctaccaccttcagcgcggcaaagtttgcttccttcatcacacagtactccacggggcaggtcagcgtggagatcgagtgggagctgcagaaagagaacagcaaacgctggaaccccgagatccagtatacctccaactacaacaagtctgttaatgtggactttactgtggacactaatggcgtgtattcagagcctcgccccattggcacaagatacctgactcgtaatctgtaa

SEQ ID NO: 3296 - DNA, 2208 bp, Artificial Sequence
  Description of Artificial Sequence: Synthetic polynucleotide
atggctgccgatggttatcttccagattggctcgaggacactctctctgaaggaataagacagtggtggaagctcaaacctggcccaccaccaccaaggcccgcagagcggcatcaggacgacagcaggggtcttgtgcttcctgggtacaagtacctcggacccttcaacggactcgacaaaggagagccggtcaacgaggcagacgctgcggccctcgagcacgacaaggcctacgaccggcagctcgacagcggagacaacccgtacctcaagtacaaccacgccgacgcggagtttcaggagcgtcttaaagaagatacgtcttttgggggcaacctcgcaagagcagtattccaggcgaaaaagagggttcttgaacctctgggcctggttgaggagcctgttaagacggctccgggaaaaaagaggccggtagagcactctcctgcggagccagattcctcctccggaactggaaagtcgggccaacagcctgcaagaaagagattgaattttggtcagactggagacgcagactccgtacctgacccccagcctctcggacagccaccagcagccccctctggtctgggaactaatacgatggcttcaggcagtggcgcaccaatggcagacaataacgagggcgccgacggagtgggtaattcctcgggaaattggcattgcgattccacatggatgggcgacagagtcatcaccaccagcacccgcacctgggctctgcccacctacaacaaccatctgtacaagcaaatttccagccagtctggagccagcaacgacaaccactactttggctacagcaccccttgggggtattttgacttcaacagattccactgccacttctccccacgtgactggcaaagactcatcaacaacaattggggattccggcccaaaagactcaacttcaagctctttaacattcaagtcaaggaggtcacgcagaatgacggtacgacgacgattgccaataaccttaccagcacggttcaggtgtttactgactcggagtaccagctcccgtacgtcctcggctcggcgcatcaaggatgcctcccgccgttcccagcagacgtcttcatggtgccacagtatggatacctcaccctgaacaacgggagtcaggcggtaggacgctcttcattttactgcctggagtactttccttctcagatgctgcgtaccggaaacaactttaccttcagctacacctttgaggacgttccttttcacagcagctacgctcacagccagagtttggaccgtctcatgaatcctctcatcgaccagtacctgtattacttgagcagaacaaacactccaagcggaaccactacgcagtccaggcttcggttttctcaagccggagcgagtgacattcgggaccagtctaggaactggcttcctggaccctgttaccgccagcagcgagtatcaaagacagctgcggacaacaacaacagtgattactcgtggactggagctaccaagtatcacctcaatggaagagactctctggtgaatccgggcacagccatggccagccacaaggacgatgaagaaaagtattttcctcagagcggggttctcatcttcggaaaacaagactcgggaaaaactaatgtggacattgaaagggtcatgattacagacgaagaggaaatcaggaccaccaatcccgtggctacggagcagtatggttctgtatctaccaatctccagagcggcaacacacaagcagctacctcagatgtcaacacacaaggcgttcttccaggcatggtctggcaggacagagacgtgtacctgcagggacccatctgggcaaagattccacacacggacggacattttcacccttctcctcttatgggaggatttggactgaagcaccctcccccgcagattctcatcaagaataccccggtacctgcgaatccttctaccaccttcagcgcggcaaagtttgcttccttcatcacacagtactccacggggcaggtcagcgtggagatcgagtgggagctgcagaaagagaacagcaaacgctggaaccccgagatccagtatacctccaactacaacaagtctgttaatgtggactttactgtggacactaatggcgtgtattcagagcctcgccccattggcacaagatacctgactcgtaatctgtaa

SEQ ID NO: 3297 - DNA, 2208 bp, Artificial Sequence
  Description of Artificial Sequence: Synthetic polynucleotide
atggctgccgatggttatcttccagattggctcgaggacactctctctgaaggaataagacagtggtggaagctcaaacctggcccaccaccgccaaagcccgcagagcggcataaggacgacagcaggggtcttgtgcttcctgggtacaagtacctcggacccttcaacggactcgacaaaggagagccggtcaacgaggcagacgccgcggccctcgagcacgacaaggcctacgaccggcagctcgacagcggagacaacccgtacctcaagtacaaccacgccgacgcggagtttcaggagcgccttaaagaagatacgtcttttgggggcaacctcgcaagagcagtattccaggcgaaaaagagggttcttgaacctctgggcctggttgaggagcctgttaagacggctccgggaaaaaagaggccggtagagcactctcctgcggagccagattcctcctccggaactggaaagtcgggccaacagcctgcaagaaagagattgaattttggtcagactggagacgcagactccgtacctgacccccagcctctcggacagccaccagcagccccctctggtctgggaactaatacgatggcttcaggcagtggcgcaccaatggcagacaataacgagggcgccgacggagtgggtaattcctcgggaaattggcattgcgattccacatggatgggcgacagagtcatcaccaccagcacccgcacctgggctctgcccacctacaacaaccatctgtacaagcaaatttccagccagtctggagccagcaacgacaaccactactttggctacagcaccccttgggggtattttgacttcaacagattccactgccacttctccccacgtgactggcaaagactcatcaacaacaattggggattccggcccaaaagactcaacttcaagctctttaacattcaagtcaaggaggtcacgcagaatgacggtacgacgacgattgccaataaccttaccagcacggttcaggtgtttactgactcggagtaccagctcccgtacgtccccggctcggcgcatcaaggatgcctcccgccgttcccagcagacgtcttcatggtgccacagtatggatacctcaccctgaacaacgggagtcaggcggtaggacgctcttcattttactgcctggagtactttccttctcagatgctgcgtaccggaaacaactttaccttcagctacacctttgaggacgttccttttcacagcagctacgctcacagccagagtttggaccgtctcatgaatcctctcatcgaccagtacctgtattacttgagcagaacaaacactccaagcggaaccactacgcagtccaggcttcggttttctcaagccggagcgagtgacattcgggaccagtctaggaactggcttcctggaccctgttaccgccagcagcgagtatcaaagacggctgcggacaacaacaacagtgattactcgtggactggagctaccaagtatcacctcaatggaagagactctctggtgaatccgggcacagccatggccagccacaaggacgatgaagaaaagtattttcctcagagcggggttctcatcttcggaaaacaagactcgggaaaaactaatgtggacattgaaagggtcatgattacagacgaagaggaaatcaggaccaccaatcccgtggctacggagcagtatggttctgtatctaccaatctccagagcggcaacacacaagcagctacctcagatgtcaacacacaaggcgttcttccaggcatggtctggcaggacagagacgtgtacctgcagggacccatctgggcaaagattccacacacggacggacattttcacccttctcctcttatgggaggatttggactgaagcaccctcccccgcagattctcatcaagaataccccggtacctgcgaatccttctaccaccttcagcgcggcaaagtttgcttccttcatcacacagtactccacggggcaggtcagcgtggagatcgagtgggagctgcagaaagagaacagcaaacgctggaaccccgagatccagtatacctccaactacaacaagtctgttaatgtggactttactgtggacactaatggcgtgtattcagagcctcgccccattggcacaagatacctgactcgtaatctgtaa

SEQ ID NO: 3298 - DNA, 2208 bp, Artificial Sequence
  Description of Artificial Sequence: Synthetic polynucleotide
atggctgccgatggttatcttccagattggctcgaggacactctctctgaaggaataagacagtggtggaagctcaaacctggcccaccaccgccaaagcccgcagagcggcataaggacgacagcaggggtcttgtgcttcctgggtacaagtacctcggacccttcaacggactcgacaaaggagagccggtcaacgaggcagacgccgcggccctcgagcacgacaaggcctacgaccggcagctcgacagcggagacaacccgtacctcaagtacaaccacgccgacgcggagtttcaggagcgccttaaagaagatacgtcttttgggggcaacctcgcaagagcagtattccaggcgaaaaagagggttcttgaacctctgggcctggttgaggagcctgttaagacggctccgggaaaaaagaggccggtagagcactctcctgcggagccagattcctcctccggaactggaaagtcgggccaacagcctgcaagaaagagattgaattttggtcagactggagacgcagactccgtacctgacccccagcctctcggacagccaccagcagccccctctggtctgggaactaatacgatggcttcaggcagtggcgcaccaatggcagacaataacgagggcgccgacggagtgggtaattcctcgggaaattggcattgcgattccacatggatgggcgacagagtcatcaccaccagcacccgcacctgggctctgcccacctacgacaaccatctgtacaagcaaatttccagccagtctggagccagcaacgacaaccactactttggctacagcaccccttgggggtattttgacttcaacagattccactgccacttctccccacgtgactggcaaagactcatcaacaacaattggggattccggcccaaaagactcaacttcaagctctttaacattcaagtcaaggaggtcacgcagaatgacggtacgacgacgattgccaataaccttaccagcacggttcaggtgtttactgactcggagtaccagctcccgtacgtcctcggctcggcgcatcaaggatgcctcccgccgttcccagcagacgtcttcatggtgccacagtatggatacctcaccctgaacaacgggagtcaggcggtaggacgctcttcattttactgcctggagtactttccttctcagatgctgcgtaccggaaacaactttaccttcagctacacctttgaggacgttccttttcacagcagctacgctcacagccagagtttggaccgtctcatgaatcctctcatcgaccagtacctgtattacttgagcagaacaaacacttcaagcggaaccactacgcagtccaggcttcggttttctcaagccggagcgagtgacattcgggaccagtctaggaactggcttcctggaccctgttaccgccagcagcgagtatcaaagacagctgcggacaacaacaacagtgattactcgtggactggagctaccaagtatcacctcaatggaagagactctctggtgaatccgggcacagccatggccagccacaaggacgatgaagaaaagtattttcctcagagcggggttctcatcttcggaaaacaagactcgggaaaaactaatgtggacattgaaagggtcatgattacagacgaagaggaaatcaggaccaccaatcccgtggctacggagcagtatggttctgtatctaccaatctccagagcggcaacacacaagcagctacctcagatgtcaacacacaaggcgttcttccaggcatggtctggcaggacagagacgtgtacctgcagggacccatctgggcaaagattccacacacggacggacattttcacccttctcctcttatgggaggatttggactgaagcaccctcccccgcagattctcatcaagaataccccggtacctgcgaatccttctaccaccttcagcgcggcaaagtttgcttccttcatcacacagtactccacggggcaggtcagcgtggagatcgagtgggagctgcagaaagagaacagcaaacgctggaaccccgagatccagtatacctccaactacaacaagtctgttaatgtggactttactgtggacactaatggcgtgtattcagagcctcgccccattggcacaagatacctgactcgtaatctgtaa

SEQ ID NO: 3299 - DNA, 2208 bp, Artificial Sequence
  Description of Artificial Sequence: Synthetic polynucleotide
atggctgccgatggttatcttccagattggctcgaggacactctctctgaaggaataagacagtggtggaagctcaaacctggcccaccaccaccaaggcccgcagagcggcatcaggacgacagcaggggtcttgtgcttcctgggtacaagtacctcggacccttcaacggactcgacaaaggagagccggtcaacgaggcagacgctgcggccctcgagcacgacaaggcctacgaccggcagctcgacagcggagacaacccgtacctcaagtacaaccacgccgacgcggagtttcaggagcgtcttaaagaagatacgtcttttgggggcaacctcggacgagcagtcttccaggcgaaaaagagggttcttgaacctctgggcctggttgaggaacctgttaagacggctccgggaaaaaagaggccggtagagcactctcctgcggagccagactcctcctcgggaaccggaaaagcgggccagcagcctgcaagaaagagattgaatttcggtcagactggagacgcagactccgtacctgacccccagcctctcggacagccaccagcagcccccacaagtttgggatctactacaatggctacaggcagtggcgcaccaatggcagacaataacgagggtgccgatggagtgggtaattcctcaggaaattggcattgcgattcccaatggctgggcgacagagtcatcaccaccagcacccgaacctgggccctgcccacctacaacaaccacctctacaagcaaatctccagccaatcaggagcatcgaacgacaaccactactttggctacagcaccccttgggggtattttgacttcaacagattccactgtcacttctccccacgtgactggcaaagactcatcaacaacaactggggattccgacccaagagactcaacttcaagctctttaacattcaagtcaaagaggtcacgcagaatgacggtacgacgacgattgccaataaccttaccagcacggttcaggtgtttactgactcggagtaccagctcccgtacgtcctcggctcggcgcatcaaggatgcctcccgccgtttccagcggacgtcttcatggtcccacagtatggatacctcaccctgaacaacgggagtcaggcggtaggacgctcttccttttactgcctggagtactttccttctcagatgctgcgtaccggaaacaactttaccttcagctacacctttgaggacgttccttttcacagcagctacgctcacagccagagtttggaccgtctcatgaatcctctcatcgaccagtacctgtattacttgagcagaacaaacactccaagcggaaccactacgcagtccaggcttcagttttctcaagccggagcgagtgacattcgggaccagtctaggaactggcttcctggaccctgttaccgccagcagcgagtatcaaagacagctgcggacaacaacaacagtgattactcgtggactggagctaccaagtatcacctcaatggaagagactctctggtgaatccgggcacagccatggccagccacaaggacgatgaagaaaagtattttcctcagagcggggttctcatcttcggaaaacaagactcgggaaaaactaatgtggacattgaaaaggtcatgattacagacgaagaggaaatcaggaccaccaatcccgtggctacggagcagtatggttctgtatctaccaatctccagagcggcaacacacaagcagctacctcagatgtcaacacacaaggcgttcttccaggcatggtctggcaggacagagacgtgtacctgcagggacccatctgggcaaagattccacacacggacggacactttcacccttctcctcttatgggaggatttggactgaagcaccctcccccgcagattctcatcaagagtaccccggtacctgcgaatccttctaccaccttcagcgcggcaaagtttgcttccttcatcacacagtactccacggggcaggtcagcgtggagatcgagtgggagctgcagaaagagaacagcaaacgctggaaccccgagatccagtatacctccaactacaacaagtctgttaatgtggactttactgtggacactaatggcgtgtattcagagcctcgccccattggcacaagatacctgactcgtaatctgtaa

SEQ ID NO: 3300 - DNA, 2208 bp, Artificial Sequence
  Description of Artificial Sequence: Synthetic polynucleotide
atggctgccgatggttatcttccagattggctcgaggacactctctctgaaggaataagacagtggtggaagctcaaacctggcccaccaccgccaaagcccgcagagcggcataaggacgacagcaggggtcttgtgcttcctgggtacaagtacctcggacccttcaacggactcgacaaaggagagccggtcaacgaggcagacgccgcggccctcgagcacgacaaggcctacgaccggcagctcgacagcggagacaacccgtacctcaagtacaaccacgccgacgcggagtttcaggagcgccttaaagaagatacgtcttttgggggcaacctcgcaagagcagtattccaggcgaaaaagagggttcttgaacctctgggcctggttgaggagcctgttaagacggctccgggaaaaaagaggccggtagagcactctcctgcggagccagattcctcctccggaactggaaagtcgggccaacagcctgcaagaaagagattgaattttggtcagactggagacgcagactccgtacctgacccccagcctctcggacagccaccagcagccccctctggtctgggaactaatacgatggcttcaggcagtggcgcaccaatggcagacaataacgagggcgccgacggagtgggtaattcctcgggaaattggcattgcgattccacatggatgggcgacagagtcatcaccaccagcacccgcacctgggctctgcccacctacaacaaccatctgtacaagcaaatttccagccagtctggagccagcaacgacaaccactactttggctacagcaccccttgggggtattttgacttcaacagattccactgccacttctccccacgtgactggcaaagactcatcaacaacaattggggattccggcccaaaagactcaacttcaagctctttaacattcaagtcaaggaggtcacgcagaatgacggtacgacgacgattgccaataaccttaccagcacggttcaggtgtttactgactcggagtaccagctcccgtacgtcctcggctcggcgcatcaaggatgcctcccgccgttcccagcagacgtcttcatggtgccacagtatggatacctcaccctgaacaacgggagtcaggcggtaggacgctcttcattttactgcctggagtactttccttctcagatgctgcgtaccggaaacaactttaccttcagctacacctttgaggacgttccttttcacagcagctacgctcacagccagagttcggaccgtctcatgaatcctctcatcgaccagtacctgtattacttgagcagaacaaacactccaagcggaaccactacgcagtccaggcttcggttttctcaagccggagcgagtgacattcgggaccagtctaggaactggcttcctggaccctgttaccgccagcagcgagtatcaaagacagctgcggacaacaacaacagtgattactcgtggactggagctaccaagtatcacctcaatggaagagactctctggtgaatccgggcacagccatggccagccacaaggacgatgaagaaaagtattttcctcagagcggggttctcatcttcggaaaacaagactcgggaaaaactaatgtggacattgaaagggtcatgattacagacgaagaggaaatcaggaccaccaatcccgtggctacggagcagtatggttctgtatctaccaatctccagagcggcaacacacaagcagctacctcagatgtcaacacacaaggcgttcttccaggcatggtctggcaggacagagacgtgtacctgcagggacccatctgggcaaagattccacacacggacggacattttcacccttctcctcttatgggaggatttggactgaagcaccctcccccgcagattctcatcaagaataccccggtacctgcgaatccttctaccaccttcagcgcggcaaagcttgcttccttcatcacacagtactccacggggcaggtcagcgtggagatcgagtgggagctgcagaaagagaacagcaaacgctggaaccccgagatccagtatacctccaactacaacaagtctgttaatgtggactttactgtggacactaatggcgtgtattcagagcctcgccccattggcacaagatacctgactcgtaatctgtaa

SEQ ID NO: 3301 - DNA, 2208 bp, Artificial Sequence
  Description of Artificial Sequence: Synthetic polynucleotide
atggctgccgatggttatcttccagattggctcgaggacactctctctgaaggaataagacagtggtggaagctcaaacctggcccaccaccgccaaagcccgcagagcggcataaggacgacagcaggggtcttgtgcttcctgggtacaagtacctcggacccttcaacggactcgacaaaggagagccggtcaacgaggcagacgccgcggccctcgagcacgacaaggcctacgaccggcagctcgacagcggagacaacccgtacctcaagtacaaccacgccgacgcggagtttcaggagcgccttaaagaagatacgtcttttgggggcaacctcgcaagagcagtattccaggcgaaaaagagggttcttgaacctctgggcctggttgaggagcctgttaagacggctccgggaaaaaagaggccggtagagcactctcctgcggagccagattcctcctccggaactggaaagtcgggccaacagcctgcaagaaagagattgaattttggtcagactggagacgcagactccgtacctgacccccagcctctcggacagccaccagcagccccctctggtctgggaactaatacgatggcttcaggcagtggcgcaccaatggcagacaataacgagggcgccgacggagtgggtaattcctcgggaaattggcattgcgattccacatggatgggcgacagagtcatcaccaccagcacccgcacctgggctctgcccacctacaacaaccatctgtacaagcaaatttccagccagtctggagccagcaacgacaaccactactttggctacagcaccccttgggggtattttgacttcaacagattccactgccacttctccccacgtgactggcaaagactcatcaacaacaattggggattccggcccaaaagactcaacttcaagctctttaacattcaagtcaaggaggtcacgcagaatgacggtacgacgacgattgccaataaccttaccagcacggttcaggtgtttactgactcggagtaccagctcccgtacgtcctcggctcggcgcatcaaggatgcctcccgccgttcccagcagacgtcttcatggtgccacagtatggatacctcaccctgaacaacgggagtcaggcggtaggacgctcttcattttactgcctggagtactttccttctcagatgctgcgtaccggaaacaactttaccttcagctacacctttgaggacgttccttttcacagcagctacgctcacagccagagtttggaccgtctcatgaatcctctcatcgaccagtacctgtattacttgagcagaacaaacactccaagcggaaccactacgcagtccaggcttcggttttctcaagccggagcgagtgacattcgggaccagtctaggaactggcttcctggaccctgttaccgccagcagcgagtatcaaagacagctgcggacaacaacaacagtgattactcgtggactggagctaccaagtatcacctcaatggaagagactctctggtgaatccgggcacagccatggccagccacaaggacgatgaagaaaagtattttcctcagagcggggttctcatcttcggaaaacaagactcgggaaaaactaatgtggacattgaaagggtcatgattacagacgaagaggaaatcaggaccaccaatcccgtggctacggagcagtatggttctgtatctaccaatctccagagcggcaacacacaagcagctacctcagatgtcaacacacaaggcgttcttccaggcatggtctggcaggacagagacgtgtacctgcagggacccatctgggcaaagattccacacacggacggacattttcacccttctcctcttatgggaggatttggactgaagcaccctcccccgcagattctcatcaagaataccccggtacctgcgaatccttctaccaccttcagcgcggcaaagtttgcttccttcatcacacagtactccacggggcaggtcagcgtggagatcgagtgggagctgcagaaggagaacagcaaacgctggaaccccgagatccagtacacttccaactacaacaaatctgttaatgtggactttactgtggacgctaatggtgtgtattcagagcctcgccccattggcaccagatacctgactcgtaatctgtaa

SEQ ID NO: 3302 - DNA, 2208 bp, Artificial Sequence
  Description of Artificial Sequence: Synthetic polynucleotide
atggctgccgatggttatcttccagattggctcgaggacactctctctgaaggaataagacagtggtggaagctcaaacctggcccaccaccgccaaagcccgcagagcggcataaggacgacagcaggggtcttgtgcttcctgggtacaagtacctcggacccttcaacggactcgacaaaggagagccggtcaacgaggcagacgccgcggccctcgagcacgacaaggcctacgaccggcagctcgacagcggagacaacccgtacctcaagtacaaccacgccgacgcggagtttcaggagcgccttaaagaagatacgtcttttgggggcaacctcgcaagagcagtattccaggcgaaaaagagggttcttgaacctctgggcctggttgaggagcctgttaagacggctccgggaaaaaagaggccggtagagcactctcctgcggggccagattcctcctccggaactggaaagtcgggccaacagcctgcaagaaagagattgaattttggtcagactggagacgcagactccgtacctgacccccagcctctcggacagccaccagcagccccctctggtctgggaactaatacgatggcttcaggcagtggcgcaccaatggcagacaataacgagggcgccgacggagtgggtaattcctcgggaaattggcattgcgattccacatggatgggcgacagagtcatcaccaccagcacccgcacctgggctctgcccacctacaacaaccatctgtacaagcaaatttccagccagtctggagccagcaacgacaaccactactttggctacagcaccccttgggggtattttgacttcaacagattccactgccacttctccccacgtgactggcaaagactcatcaacaacaattggggattccggcccaaaagactcaacttcgagctctttaacattcaagtcaaggaggtcacgcagaatgacggtacgacgacgattgccaataaccttaccagcacggttcaggtgtttactgactcggagtaccagctcccgtacgtcctcggctcggcgcatcaaggatgcctcccgccgttcccagcagacgtcttcatggtgccacagtatggatacctcaccctgaacaacgggagtcaggcggtaggacgctcttcattttactgcctggagtactttccttctcagatgctgcgtaccggaaacaactttaccttcagctacacctttgaggacgttccttttcacagcagctacgctcacagccagagtttggaccgtctcatgaatcctctcatcgaccagtacctgtattacttgagcagaacaaacactccaagcggaaccactacgcagtccaggcttcagttttctcaagccggagcgagtgacattcgggaccagtctaggaactggcttcctggaccctgttaccgccagcagcgagtatcaaagacagctgcggacaacaacaacagtgattactcgtggactggagctaccaagtatcacctcaatggaagagactctctggtgaatccgggcacagccatggccagccacaaggacgatgaagaaaagtattttcctcagagcggggttctcatcttcggaaaacaagactcgggaaaaactaatgtggacattgaaaaggtcatgattacagacgaagaggaaatcaggaccaccaatcccgtggctacggagcagtatggttctgtatctaccaatctccagagcggcaacacacaagcagctacctcagatgtcaacacacaaggcgttcttccaggcatggtctggcaggacagagacgtgtacctgcagggacccatctgggcaaagattccacacacggacggacactttcacccttctcctcttatgggaggatttggactgaagcaccctcccccgcagattctcatcaagagtaccccggtacctgcgaatccttctaccaccttcagcgcggcaaagtttgcttccttcatcacacagtactccacggggcaggtcagcgtggagatcgagtgggagctgcagaaagagaacagcaaacgctggaaccccgagatccagtatacctccaactgcaacaagtctgttaatgtggactttactgtggacactaatggcgtgtattcagatcctcgccccattggcacaagatacctgactcgtaatctgtaa

SEQ ID NO: 3303 - DNA, 2208 bp, Artificial Sequence
  Description of Artificial Sequence: Synthetic polynucleotide
atggctgccgatggttatcttccagattggctcgaggacactctctctgaaggaataagacagtggtggaagctcaaacctggcccaccaccgccaaagcccgcagagcggcataaggacgacagcaggggtcttgtgcttcctgggtacaagtacctcggacccttcaacggactcgacaaaggagagccggtcaacgaggcagacgccgcggccctcgagcacgacaaggcctacgaccggcagctcgacagcggagacaacccgtacctcaagtacaaccacgccgacgcggagcttcaggagcgccttaaagaagatacgtcttttgggggcaacctcgcaagagcagtattccaggcgaaaaagagggttcttgaacctctgggcctggttgaggagcctgttaagacggctccgggaaaaaagaggccggtagagcactctcctgcggagccagattcctcctccggaactggaaagtcgggccaacagcctgcaagaaagagattgaattttggtcagactggagacgcagactccgtacctgacccccagcctctcggacagccaccagcagccccctctggtctgggaactaatacgatggcttcaggcagtggcgcaccaatggcagacaataacgagggcgccgacggagtgggtaattcctcgggaaattggcattgcgattccacatggatgggcgacagagtcatcaccaccagcacccgcacctgggctctgcccacctacaacaaccatctgtacaagcaaatttccagccagtctggagccagcaacgacaaccactactttggctacagcaccccttgggggtattttgacttcaacagattccactgccacttctccccacgtgactggcaaagactcatcaacaacaattggggattccggcccaaaagactcaacttcaagctctttaacattcaagtcaaggaggtcacgcagaatgacggtacgacgacgattgccaataaccttaccagcacggttcaggtgtatactgactcggagtaccagctcccgtacgtcctcggctcggcgcatcaaggatgcctcccgccgttcccagcagacgtcttcatggtgccacagtatggatacctcaccctgaacaacgggagtcaggcggtaggacgctcttcattttactgcctggagtactttccttctcagatgctgcgtaccggaaacaactttaccttcagctacacctttgaggacgttccttttcacagcagctacgctcacagccagagtttggaccgtctcatgaatcctctcatcgaccagtacctgtattacttgagcagaacaaacactccaagcggaaccactacgcagtccaggcttcggttttctcaagccggagcgagtgacattcgggaccagtctaggaactggcttcctggaccctgttaccgccagcagcgagtatcaaagacagctgcggacaacaacaacagtgattactcgtggactggagctaccaagtatcacctcaatggaagagactctctggtgaatccgggcacagccatggccagccacaaggacgatgaagaaaagtattttcctcagagcggggttctcatcttcggaaaacaagactcgggaaaaactaatgtggacattgaaagggtcatgattacagacgaagaggaaatcaggaccaccaatcccgtggctacggagcagtatggttctgtatctaccaatctccagagcggcaacacacaagcagctacctcagatgtcaacacacaaggcgttcttccaggcatggtctggcaggacagagacgtgtacctgcagggacccatctgggcaaagattccacacacggacggacattttcacccttctcctcttatgggaggatttggactgaagcaccctcccccgcagattctcatcaagaataccccggtacctgcgaatccttctaccaccttcagcgcggcaaagtttgcttccttcatcacacagtactccacggggcaggtcagcgtggagatcgagtgggagctgcagaaagagaacagcaaacgctggaaccccgagatccagtatacctccaactacaacaagtctgttaatgtggactttactgtggacactaatggcgtgtattcagagcctcgccccattggcacaagatacctgactcgtaatctgtaa

SEQ ID NO: 3304 - DNA, 2208 bp, Artificial Sequence
  Description of Artificial Sequence: Synthetic polynucleotide
atggctgccgatggttatcttccagattggctcgaggacactctctctgaaggaataagacagtggtggaagctcaaacctggcccaccaccgccaaagcccgcagagcggcataaggacgacagcaggggtcttgtgcttcctgggtacaagtacctcggacccttcaacggactcgacaaaggagagccggtcaacgaggcagacgccgcggccctcgagcacgacaaggcctacgaccggcagctcgacagcggagacaacccgtacctcaagtacaaccacgccgacgcggagtttcaggagcgccttaaagaagatacgtcttttgggggcaacctcgcaagagcagtattccaggcgaaaaagagggttcttgaacctctgggcctggttgaggagcctgttaagacggctccgggaaaaaagaggccggtagagcactctcctgcggagccagattcctcctccggaactggaaagtcgggccaacagcctgtaagaaagagattgaattttggtcagactggagacgcagactccgtacctgacccccagcctctcggacagccaccagcagccccctctggtctgggaactaatacgatggcttcaggcagtggcgcaccaatggcagacaataacgagggcgccgacggagtgggtaattcctcgggaaattggcattgcgattccacatggatgggcgacagagtcatcaccaccagcacccgcacctgggctctgcccacctacaacaaccatctgtacaagcaaatttccagccagtctggagccagcaacgacaaccactactttggctacagcaccccttgggggtattttgacttcaacagattccactgccacttctccccacgtgactggcaaagactcatcaacaacaattggggattccggcccaaaagactcaacttcaagctctttaacattcaagtcaaggaggtcacgcagaatgacggtacgacgacgattgccaataaccttaccagcacggttcaggtgtttactgactcggagtaccagctcccgtacgtcctcggctcggcgcatcaaggatgcctcccgccgttcccagcagacgtcttcatggtgccacagtatggatacctcaccctgaacaacgggagtcaggcggtaggacgctcttcattttactgcctggagtactttccttctcagatgctgcgtaccggaagcaactttaccttcagctacacctttgaggacgttccttttcacagcagctacgctcacagccagagtttggaccgtctcatgaatcctctcatcgaccagtacctgtattacttgagcagaacaaacactccaagcggaaccactacgcagtccaggcttcggttttctcaagccggagcgagtgacattcgggaccagtctaggaactggcttcctgggccctgttaccgccagcagcgagtatcaaagacagctgcggacaacaacaacagtgattactcgtggactggagctaccaagtatcacctcaatggaagagactctctggtgaatccgggcacagccatggccagccacaaggacgatgaagaaaagtattttcctcagagcggggttctcatcttcggaaaacaagactcgggaaaaactaatgtggacattgaaagggtcatgattacagacgaagaggaaatcaggaccaccaatcccgtggctacggagcagtatggttctgtatctaccaatctccagagcggcaacacacaagcagctacctcagatgtcaacacacaaggcgttcttccaggcatggtctggcaggacagagacgtgtacctgcagggacccatctgggcaaagattccacacacggacggacattttcacccttctcctcttatgggaggatttggactgaagcaccctcccccgcagattctcatcaagaataccccggtacctgcgaatccttctaccaccttcagcgcggcaaagtttgcttccttcatcacacagtactccacggggcaggtcagcgtggagatcgagtgggagctgcagaaagagaacagcaaacgctggaaccccgagatccagtatacctccaactacaacaagtctgttaatgtggactttactgtggacactaatggcgtgtattcagagcctcgccccattggcacaagatacctgactcgtaatctgtaa

SEQ ID NO: 3305 - DNA, 2208 bp, Artificial Sequence
  Description of Artificial Sequence: Synthetic polynucleotide
atggctgccgatggttatcttccagattggctcgaggacactctctctgaaggaataagacagtggtggaagctcaaacccggcccaccaccaccaaggcccgcagagcggcatcaggacgacagcaggggtcttgtgcttcctgggtacaagtacctcggacccttcaacggactcgacaaaggagagccggtcaacgaggcagacgctgcggccctcgagcacgacaaggcctacgaccggcagctcgacagcggagacaacccgtacctcaagtacaaccacgccgacgcggagtttcaggagcgtcttaaagaagatacgtcttttgggggcaacctcggacgagcagtcttccaggcgaaaaagagggttcttgaacctctgggcctggttgaggagcctgttaagacggctccgggaaaaaagaggccggtagagcactctcctgcggggccagattcctcctccggaactggaaagtcgggccaacagcctgcaagaaagagattgaattttggtcagactggagacgcagactccgtacctgacccccagcctctcggacagccaccagcagccccctctggtctgggaactaatacgatggcttcaggcagtggcgcaccaatggcagacaataacgagggcgccgacggagtgggtaattcctcgggaaattggcattgcgattccacatggatgggcgacagagtcatcaccaccagcacccgcacctgggctctgcccacctacaacaaccatctgtacaagcaaatttccagccagtctggagccagcaacgacaaccactactttggctacagcaccccttgggggtattttgacttcaacagattccactgccacttctccccacgtgactggcaaagactcatcaacaacaattggggattccggcccaaaagactcaacttcgagctctttaacattcaagtcaaggaggtcacgcagaatgacggtacgacgacgattgccaataaccttaccagcacggttcaggtgtttactgactcggagtaccagctcccgtacgtcctcggctcggcgcatcaaggatgcctcccgccgttcccagcagacgtcttcatggtgccacagtatggatacctcaccctgaacaacgggagtcaggcggtaggacgctcttcattttactgcctggagtactttccttctcagatgctgcgtaccggaaacaactttaccttcagctacacctttgaggacgttccttttcacagcagctacgctcacagccagagtttggaccgtctcatgaatcctctcatcgaccagtacctgtattacttgagcagaacaaacactccaagcggaaccactacgcagtccaggcttcagttttctcaagccggagcgagtgacattcgggaccagtctaggaactggcttcctggaccctgttaccgccagcagcgagtatcaaagacagctgcggacaacaacaacagtgattactcgtggactggagctaccaagtatcacctcaatggaagagactctctggtgaatccgggcacagccatggccagccacaaggacgatgaagaaaagtattttcctcagagcggggttctcatcttcggaaaacaagactcgggaaaaactaatgtggacattgaaaaggtcatgattacagacgaagaggaaatcaggaccaccaatcccgtggctacggagcagtatggttctgtatctaccaatctccagagcggcaacacacaagcagctacctcagatgtcaacacacaaggcgttcttccaggcatggtctggcaggacagagacgtgtacctgcagggacccatctgggcaaagattccacacacggacggacactttcacccttctcctcttatgggaggatttggactgaagcaccctcccccgcagattctcatcaagagtaccccggtacctgcgaatccttctaccaccttcagcgcggcaaagtttgcttccttcatcacacagtactccacggggcaggtcagcgtggagatcgagtgggagctgcagaaagagaacagcaaacgctggaaccccgagatccagtatacctccaactacaacaagtctgttaatgtggactttactgtggacactaatggcgtgtattcagagcctcgccccattggcacaagatacctgactcgtaatctgtaa

SEQ ID NO: 3306 - DNA, 2208 bp, Artificial Sequence
  Description of Artificial Sequence: Synthetic polynucleotide
atggctgccgatggttatcttccagattggctcgaggacactctctctgaaggaataagacagtggtggaagctcaaacctggcccaccaccgccaaagcccgcagagcggcataaggacgacagcaggggtcttgtgcttcctgggtacaagtacctcggacccttcaacggactcgacaaaggagagccggtcaacgaggcagacgccgcggccctcgagcacgacaaggcctacgaccggcagctcgacagcggagacaacccgtacctcaagtacaaccacgccgacgcggagtttcaggagcgccttaaagaagatacgtcttttgggggcaacctcgcaagagcagtattccaggcgaaaaagagggttcttgaacctctgggcctggttgaggagcctgttaagacggctccgggaaaaaagaggccggtagagcactctcctgcggagccagattcctcctccggaactggaaagtcgggccaacagcctgcaagaaagagattgaattttggtcagactggagacgcagactccgtacctgacccccagcctctcggacagccaccagcagccccctctggtctgggaactaatacgatggcttcaggcagtggcgcaccaatggcagacaataacgagggcgccgacggagtgggtaattcctcgggaaattggcattgcgattccacatggatgggcgacagagtcatcaccaccagcacccgcacctgggctctgcccacctacaacaaccatctgtacaagcaaatttccagccagtctggagccagcaacgacaaccactactttggctacagcaccccttgggggtattttgacttcaacagattccacggccacttctccccacgtgactggcaaagactcatcaacaacaattggggattccggcccaaaagactcaacttcaagctctttaacattcaagtcaaggaggtcacgcagaatgacggtacgacgacgattgccaataaccttaccagcacggttcaggtgtttactgactcggagtaccagctcccgtacgtcctcggctcggcgcatcaaggatgcctcccgccgttcccagcagacgtcttcatggtgccacagtatggatacctcaccctgaacaacgggagtcaggcggtaggacgctcttcattttactgcctggagtactttccttctcagatgctgcgtaccggaaacaactttaccttcagctacacctttgaggacgttccttttcacagcagctacgctcacagccagagtttggaccgtctcatgaatcctctcatcgaccagtacctgtattacttgagcagaacaaacactccaagcggaaccactacgcagtccaggcttcggttttctcaagccggagcgagtgacattcgggaccagtctaggaactggcttcctggaccctgttaccgccagcagcgagtatcaaagacagctgcggacaacaacaacagtgattactcgtggactggagctaccaagtatcacctcaatggaagagactctctggtgaatccgggcacagccatggccagccacaaggacgatgaagaaaagtattttcctcagagcggggttctcatcttcggaaaacaagactcgggaaaaactaatgtggacattgaaagggtcatgattacagacgaagaggaaatcaggaccaccaatcccgtggctacggagcagtatggttctgtatctaccaatctccagagcggcaacacacaagcagctacctcagatgtcaacacacaaggcgttcttccaggcatggtctggcaggacagagacgtgtacctgcagggacccatctgggcaaagattccacacacggacggacattttcacccttctcctcttatgggaggatttggactgaagcaccctcccccgcagattctcatcaagaataccccggtacctgcgaatccttctaccaccttcagcgcggcaaagtttgcttccttcatcacacagtactccacggggcaggtcagcgtggagatcgagtgggagctgcagaaagagaacagcaaacgctggaaccccgagatccagtatacctccaactacaacaagtctgttaatgtggactttactgtggacactaatggcgtgtattcagagcctcgccccattggcacaagatacctgactcgtaatctgtaa

SEQ ID NO: 3307 - DNA, 2208 bp, Artificial Sequence
  Description of Artificial Sequence: Synthetic polynucleotide
atggctgccgatggttatcttccagattggctcgaggacactctctctgaaggaataagacagtggtggaagctcaaacctggcccaccaccgccaaagcccgcagagcggcataaggacgacagcaggggtcttgtgcttcctgggtacaagtacctcggacccttcaacggactcgacaaaggagagccggtcaacgaggcagacgccgcggccctcgagcacgacaaggcctacgaccggcagctcgacagcggagacaacccgtacctcaagtacaaccacgccgacgcggagtttcaggagcgccttaaagaagatacgtcttttgggggcaacctcgcaagagcagtattccaggcgaaaaagagggttcttgaacctctgggcctggttgaggagcctgttaagacggctccgggaaaaaagaggccggtagagcactctcctgcggagccagattcctcctccggaactggaaagtcgggccaacagcctgcaagaaagagattgaattttggtcagactggagacgcagactccgtacctgacccccagcctctcggacagccaccagcagccccctctggtctgggaactaatacgatggcttcaggcagtggcgcaccaatggcagacaataacgagggcgccgacggagtgggtaattcctcgggaaattggcattgcgattccacatggatgggcgacagagtcatcaccaccagcacccgcacctgggctctgcccacctacaacaaccatctgtacaagcaaatttccagccagtctggagccagcaacgacaaccactactttggctacagcaccccttgggggtattttgacttcaacagattccactgccacttctccccacgtgactggcaaagactcatcaacaacaattggggattccggcccaaaagactcaacttcaagctctttaacattcaagtcaaggaggtcacgcagaatgacggtacgacgacgattgccaataaccttaccagcacggttcaggtgtttactgactcggagtaccagctcccgtacgtcctcggctcggcgcatcaaggatgcctcccgccgttcccagcagacgtcttcatggtgccacagtatggatacctcaccctgaacaacgggagtcaggcggtaggacgctcttcattttactgcctggagtactttccttctcagatgctgcgtaccggaaacaactttaccttcagctacacctttgaggacgttccttttcacagtagctacgctcacagccagagtttggaccgtctcatgaatcctctcatcgaccagtacctgtattacttgagcagaacaaacactccaagcggaaccactacgcagtccaggcttcggttttctcaagccggagcgagtgacattcgggaccagtctaggaactggcttcctgggccctgttaccgccagcagcgagtatcaaagacagctgcggacaacaacaacagtgattactcgtggactggagctaccaagtatcacctcaatggaagagactctctggtgaatccgggcacagccatggccagccacaaggacgatgaagaaaagtattttcctcagagcggggttctcatcttcggaaaacaagactcgggaaaaactaatgtggacattgaaagggtcatgattacagacgaagaggaaatcaggaccaccaatcccgtggctacggagcagtatggttctgtatctaccaatctccagagcggcaacacacaagcagctacctcagatgtcaacacacaaggcgttcttccaggcatggtctggcaggacagagacgtgtacctgcagggacccatctgggcaaagattccacacacggacggacattttcgcccttctcctcttatgggaggatttggactgaagcaccctcccccgcagattctcatcaagaataccccggtacctgcgaatccttctaccaccttcagcgcggcaaagtttgcttccttcatcacacagtactccacggggcaggtcagcgtggagatcgagtgggagctgcagaaagagaacagcaaacgctggaaccccgagatccagtatacctccaactacaacaagtctgttaatgtggactttactgtggacactaatggcgtgtattcagagcctcgccccattggcacaagatacctgactcgtaatctgtaa

SEQ ID NO: 3308 - DNA, 2208 bp, Artificial Sequence
  Description of Artificial Sequence: Synthetic polynucleotide
atggctgccgatggttatcttccagattggctcgaggacactctctctgaaggaataagacagtggtggaagctcaaacctggcccaccaccaccaaagcccgcagagcggcataaggacgacagcaggggtcttgtgcttcctgggtacaagtacctcggacccttcaacggactcgacaagggagagccggtcaacgaggcagacgccgcggccctcgagcacgacaaagcctacgaccggcagctcgacagcggagacaacccgtacctcaagtacaaccacgccgacgcggagtttcaggagcgccttaaagaagatacgtcttttgggggcaacctcggacgagcagtcttccaggcgaaaaagagggctcttgaacctctgggcctggttgaggaacctgttaagacggctccgggaaaaaagaggccggtagagcactctcctgtggagccagactcctcctcgggaaccggaaaggcgggccagcagcctgcaagaaaaagattgaattttggtcagactggagacgcagactcggtacctgacccccagcctctcggacagccaccagcagccccctctggtctgggaactaatacgatggctacaggcagtggcgcaccaatggcagacaataacgagggcgccgacggagtgggtaattcctcgggaaattggcattgcgattccacatggatgggcgacagagtcatcaccaccagcacccgaacctgggccctgcccacctacaacaaccacctctacaaacaaatttccagccaatcaggagcctcgaacgacaatcactactttggctacagcaccccttgggggtattttgacttcaacagattccactgccacttttcaccacgtgactggcaaagactcatcaacaacaactggggattccgacccaagagactcaacttcaagctctttaacattcaagtcaaagaggtcacgcagaatgacggtacgacgacgattgccaataaccttaccagcacggttcaggtgtttactgactcggagtaccagctcccgtacgtcctcggctcggcgcatcaaggatgcctcccgccgttcccagcagacgtcttcatggtgccacagtatggatacctcaccctgaacaacgggagtcaggcagtaggacgctcttcattttactgcctggagtactttccttctcagatgctgcgtaccggaaacaactttaccttcagctacacttttgaggacgttcctttccacagcagctacgctcacagccagagtctggaccgtctcatgaatcctctcatcgaccagtacctgtattacttgagcagaacaaacactccaagtggaaccaccacgcagtcaaggcttcagttttctcaggccggagcgagtgacattcgggaccagtctaggaactggcttcctggaccctgttaccgccagcagcgagtatcaaagacatctgcggataacaacaacagtgaatactcgtggactggagctaccaagtaccacctcaatggcagagactctctggtgaatccgggcccggccatggcaagccacaaggacgatgaagaaaagttttttcctcagagcggggttctcatctttgggaagcaaggctcagagaaaacaaatgtggacattgaaaaggtcatgattacagacgaagaggaaatcaggacaaccaatcccgtggctacggagcagtatggttctgtatctaccaacctccagagaggcaacagacaagcagctaccgcagatgtcaacacacaaggcgttcttccaggcatggtctggcaggacagagatgtgtaccttcaggggcccatctgggcaaagattccacacacggacggacattttcacccctctcccctcatgggtggattcggacttaaacaccctcctccacagattctcatcaagaacaccccggtacctgcgaatccttcgaccaccttcagtgcggcaaagtttgcttccttcatcacacagtactccacgggacaggtcagcgtggagatcgagtgggagctgcagaaggaaaacagcaaacgctggaatcccgaaattcagtacacttccaactacaacaagtctgttaatgtggactttactgtggacactaatggcgtgtattcagagcctcgccccattggcaccagatacctgactcgtaatctgtaa

SEQ ID NO: 3309 - DNA, 2208 bp, Artificial Sequence
  Description of Artificial Sequence: Synthetic polynucleotide
atggctgccgatggttatcttccagattggctcgaggacactctctctgaaggaataagacagtggtggaagctcaaacctggcccaccaccaccaaagcccgcagagcggcataaggacgacagcaggggtcttgtgcttcctgggtacaagtacctcggacccttcaacggactcgacaagggagagccggtcaacgaggcagacgccgcggccctcgagcacgacaaagcctacgaccggcagctcgacagcggagacaacccgtacctcaagtacaaccacgccgacgcggagtttcaggagcgccttaaagaagatacgtcttttgggggcaacctcggacgagcagtcttccaggcgaaaaagagggtccttgaacctctgggcctggttgaggaacctgttaagacggctccgggaaaaaagaggccggtagagcactctcctgtggagccagactcctcctcgggaaccggaaaggcgggccagcagcctgcaagaaaaagattgaattttggtcagactggagacgcagactcagtacctgacccccagcctctcggacagccaccagcagccccctctggtctgggaactaatacgatggctacaggcagtggcgcaccaatggcagacaataacgagggcgccgacggagtgggtaattcctcgggaaattggcattgcgattccacatggatgggcgacagagtcatcaccaccagcacccgaacctgggccctgcccacctacaacaaccacctctacaaacaaatttccagccaatcaggagcctcgaacgacaatcactactttggctacagcaccccttgggggtattttgacttcaacagattccactgccacttttcaccacgtgactggcaaagactcatcaacaacaactggggattccgacccaagagactcaacttcaagctctttaacattcaagtcaaagaggtcacgcagaatgacggtacgacgacgattgccaataaccttaccagcacggttcaggtgtttactgactcggagtaccagctcccgtacgtcctcggctcggcgcatcaaggatgcctcccgccgttcccagcagacgtcttcatggtgccacagtatggatacctcaccctgaacaacgggagtcaggcagtaggacgctcttcattttactgcctggagtactttccttctcagatgctgcgtaccggaaacaactttaccttcagctacacttttgaggacgttcctttccacagcagctacgctcacagccagagtctggaccgtctcatgaatcctctcatcgaccagtacctgtattacttgagcagaacaaacactccaagtggaaccaccacgcagtcaaggcttcagttttctcaggccggagcgagtgacattcgggaccagtctaggaactggcttcctggaccctgttaccgccagcagcgagtatcaaagacatctgcggataacaacaacagtgaatactcgtggactggagctaccaagtaccacctcaatggcagagactctctggtgaatccgggcccggccatggcaagccacaaggacgatgaagaaaagttttttcctcagagcggggttctcatctttgggaagcaaggctcagagaaaacaaatgtggacattgaaaaggtcatgattacagacgaagaggaaatcaggacaaccaatcccgtggctacggagcagtatggttctgtatctaccaacctccagagaggcaacagacaagcagctaccgcagatgtcaacacgcaaggcgttcttccaggcacggtctggcaggacagagatgtgtaccttcaggggcccatctgggcaaagattccacacacggacggacattttcacccctctcccctcatgggtggattcggacttaaacaccctcctccacagattctcatcaagaacaccccggtacctgcgaatccttcgaccaccttcagtgcggcaaagtttgcttccttcatcacacagtactccacgggacaggtcagcgtggagatcgagtgggagctgcagaaggaaaacagcaaacgctggaatcccgaaattcagtacacttccaactacaacaagtctgttaatgtggactttactgtggacactaatggcgtgtattcagagcctcgccccattggcaccagatacctgactcgtaatctgtaa

SEQ ID NO: 3310 - DNA, 2208 bp, Artificial Sequence
  Description of Artificial Sequence: Synthetic polynucleotide
atggctgccgatggttatcttccagattggctcgaggacactctctctgaaggaataagacagtggtggaagctcaaacctggcccaccaccaccaaagcccgcagagcggcataaggacgacagcaggggtcttgtgcttcctgggtacaagtacctcggacccttcaacggactcgacaagggagagccggtcaacgaggcagacgccgcggccctcgagcacgacaaagcctacaaccggcagctcgacagcggagacaacccgtacctcaagtacaaccacgccgacgcggagtttcaggagcgccttaaagaagatacgtcttttgggggcaacctcggacgagcagtcttccaggcgaaaaagagggttcttgaacctctgggcctggttgaggaacctgttaagacggctccgggaaaaaagaggccggtagagcactctcctgtggagccagactcctcctcgggaaccggaaaggcgggccagcagcctgcaagaaaaagattgaattttggtcagactggagacgcagactcagtacctgacccccagcctctcggacagccaccagcagccccctctggtctgggaactaatacgatggctacaggcagtggcgcaccaatggcagacaataacgagggcgccgacggagtgggtaattcctcgggaaattggcattgcgattccacatggatgggcgacagagtcatcaccaccagcacccgaacctgggccctgcccacctacaacaaccacctctacaaacaaatttccagccaatcaggagcctcgaacgacaatcactactttggctacagcaccccttgggggtattttgacttcaacagattccactgccacttttcaccacgtgactggcaaagactcatcaacaacaactggggattccgacccaagagactcaacttcaagctctttaacattcaagtcaaagaggtcacgcagaatgacggtacgacgacgattgccaataaccttaccagcacggttcaggtgtttactgactcggagtaccagctcccgtacgtcctcggctcggcgcatcaaggatgcctcccgccgttcccagcagacgtcttcatggtgccacagtatggatacctcaccctgaacaacgggagtcaggcagtaggacgctcttcattttactgcctggagtactttccttctcagatgctgcgtaccggaaacaactttaccttcagctacacttttgaggacgttcctttccacagcagctacgctcacagccagagtctggaccgtctcatgaatcctctcatcgaccagtacctgtattacttgagcagaacaaacactccaagtggaaccaccacgcagtcaaggcttcagttttctcaggccggagcgagtgacattcgggaccagtctaggaactggcttcctggaccctgttaccgccagcagcgagtatcaaagacatctgcggataacaacaacagtgaatactcgtggactggagctaccaagtaccacctcaatggcagggactctctggtgaatccgggcccggccatggcaagccacaaggacgatgaagaaaagttttttcctcagagcggggttctcatctttgggaagcaaggctcagagaaaacaaatgtggacattgaaaaggtcatgattacagacgaagaggaaatcaggacaaccaatcccgtggctacggagcagtatggttctgtatctaccaacctccagagaggcaacagacaagcagctaccgcagatgtcaacacacaaggcgttcttccaggcatggtctggcaggacagagatgtgtaccttcaggggcccatctgggcaaagattccacacacggacggacattttcacccctctcccctcatgggtggattcggacttaaacaccctcctccacagattctcatcaagaacaccccggtacctgcgaatccttcgaccaccttcagtgcggcaaagtttgcttccttcatcacacagtactccacgggacaggtcagcgtggagatcgagtgggagctgcagaaggaaaacagcaaacgcgggaatcccgaaattcagtacacttccaactacaacaagtctgttaatgtggactttactgtggacactaatggcgtgtattcagagcctcgccccattggcaccagatacctgactcgtaatctgtaa

SEQ ID NO: 3311 - DNA, 2208 bp, Artificial Sequence
  Description of Artificial Sequence: Synthetic polynucleotide
atggctgccgatggttatcttccagattggctcgaggacactctctctgaaggaataagacagtggtggaagctcaaacctggcccaccaccaccaaagcccgcagagcggcataaggacgacagcaggggtcttgtgcttcctgggtacaagtacctcggacccttcaacggactcgacaagggagagccggtcaacgaggcagacgccgcggccctcgagcacgacaaagcctacgaccggcagctcgacagcggagacaacccgtacctcaagtacaaccacgccgacgcggagtttcaggagcgccttaaagaagatacgtcttttgggggcaacctcggacgagcagtcttccaggcgaaaaagagggttcttgaacctctgggcctggttgaggaacctgttaagacggctccgggaaaaaagaggccggtagagcactctcctgtggagccagactcctcctcgggaaccggaaaggcgggccagcagcctgcaagaaaaagattgaattttggtcagactggagacgcagactcagtacctgacccccagcctctcggacagccaccagcagccccctctggtctgggaactaatacgatggctacaggcagtggcgcaccaatggcagacaataacgagggcgccgacggagtgggtaattcctcgggaaattggcattgcgattccacatggatgggcgacagagtcatcaccaccagcacccgaacctgggccctgcccacctacaacaaccacctctacaaacaaatttccagccaatcaggagcctcgaacgacaatcactactttggctacagcaccccttgggggtattttgacttcaacagattccactgccacttttcaccacgtgactggcaaagactcatcaacaacaactggggattccgacccaagagactcaacttcaagctctttaacattcaagtcaaagaggtcacgcagaatgacggtacgacgacgattgccaataaccttaccagcacggttcaggtgtttactgactcggagtaccagctcccgtacgtcctcggctcggcgcatcaaggatgcctcccgccgttcccagcagacgtcttcatggtgccacagtatggatacctcaccctgaacaacgggagtcaggcagtaggacgctcttcattttactgcctggagtactttccttctcagatgctgcgtaccggaaacaactttaccttcagctacacttttgaggacgttcctttccacagcagctacgctcacagccagagtctggaccgtctcatgaatcctctcatcgaccagtacctgtattacttgagcagaacaaacactccaagtggaaccaccacgcagtcaaggcttcagttttctcaggccggagcgagtgacattcgggaccagtctaggaactggcttcctggaccctgttaccgccagcagcgagtatcaaagacatctgcggataacaacaacagtgaatacccgtggactggagctaccaagtaccacctcaatggcagagactctctggtgaatccgggcccggccatggcaagccacaaggacgatgaagaaaagttttttcctcagagcggggttctcatctttgggaagcaaggctcagagaaaacaaatgtggacattgaaaaggtcatgattacagacgaagaggaaatcaggacaaccaatcccgtggctacggagcagtatggttctgtatctaccaacctccagagaggcaacagacaagcagctaccgcagatgtcaacacacaaggcgttcttccaggcacggtctggcaggacagagatgtgtaccttcaggggcccatctgggcaaagattccacacacggacggacattttcacccctctcccctcatgggtggattcggacttaaacaccctcctccacagattctcatcaagaacaccccggtacctgcgaatccttcgaccaccttcagtgcggcaaagtttgcttccttcatcacacagtactccacgggacaggtcagcgtggagatcgagtgggagctgcagaaggaaaacagcaaacgctggaatcccgaaattcagtacacttccaactacaacaagtctgttaatgtggactttactgtggacactaatggcgtgtattcagagcctcgccccattggcaccagatacctgactcgtaatctgtaa

SEQ ID NO: 3312 - DNA, 2208 bp, Artificial Sequence
  Description of Artificial Sequence: Synthetic polynucleotide
atggctgccgatggttatcttccagattggctcgaggacactctctctgaaggaataagacagtggtggaagctcaaacctggcccaccaccaccaaagcccgcagagcggcataaggacgacagcaggggtcttgtgcttcctgggtacaagtacctcggacccttcaacggactcgacaagggagagccggtcaacgaggcagacgccgcggccctcgagcacgacaaagcctacgaccggcagctcgacagcggagacaacccgtacctcaagtacaaccacgccgacgcggagtttcaggagcgccttaaagaagatacgtcttttgggggcaacctcggacgagcagtcttccaggcgaaaaagagggttcttgaacctctgggcctggttgaggaacctgttaagacggctccgggaaaaaagaggccggtagagcactctcctgtggagccagactcctcctcgggaaccggaaaggcgggccagcagcctgcaagaaaaagattgaattttggtcagactggagacgcagactcagtacctgacccccagcctctcggacagccaccagcagccccctctggtctgggaactaatacgatggctacaggcagtggcgcaccaatggcagacaataacgagggcgccgacggagtgggtaattcctcgggaaattggcattgcgattccacatggatgggcgacagagtcatcaccaccagcacccgaacctgggccctgcccacctacaacaaccacctctacaaacaaatttccagccaatcaggagcctcgaacgacaatcactactttggctacagcaccccttgggggtattttgacttcaacagattccactgccacttttcaccacgtgactggcaaagactcatcaacaacaactggggattccgacccaagagactcaacttcaagctctttaacattcaagtcaaagaggtcacgcagaatgacggtacgacgacgattgccaataaccttaccagcacggttcaggtgtttactgactcggagtaccagctcccgtacgtcctcggctcggcgcatcaaggatgcctcccgccgttcccagcagacgtcttcatggtgccacagtatggatacctcaccctgaacaacgggagtcaggcagtaggacgctcttcattttactgcctggagtactttccttctcagatgctgcgtaccggaaacaactttaccttcagctacacttttgaggacgttcctttccacagcagctacgctcacagccagagtctggaccgtctcatgaatcctctcatcgaccagtacctgtattacttgagcagaacaaacactccaagtggaaccaccacgcagtcaaggcttcagttttctcaggccggagcgagtgacattcgggaccagtctaggaactggcttcctggaccctgttaccgccagcagcgagtatcaaagacatctgcggataacaacaacagtgaatactcgtggactggagctaccaagtaccacctcaatggcagagactctctggtgaatccgggcccggccatggcaagccacaaggacgatgaagaaaagttttttcctcagagcggggttctcatctttgggaagcaaggctcagagaaaacaaatgtgggcattgaaaaggtcatgattacagacgaagaggaaatcaggacaaccaatcccgtggctacggagcagtatggttctgtatctaccaacctccagagaggcaacagacaagcagctaccgcagatgtcaacacacaaggcgttcttccaggcacggtctggcaggacagagatgtgtaccttcaggggcccatctgggcaaagattccacacacggacggacattttcacccctctcccctcatgggtggattcggacttaaacaccctcctccacagattctcatcaagaacaccccggtacctgcgaatccttcgaccaccttcagtgcggcaaagtttgcttccttcatcacacagtactccacgggacaggtcagcgtggagatcgagtgggagctgcagaaggaaaacagcaaacgctggaatcccgaaattcagtacacttccaactacaacaagtctgttaatgtggactttactgtggacactaatggcgtgtattcagagcctcgccccattggcaccagatacctgactcgtaatctgtaa

SEQ ID NO: 3313 - DNA, 2208 bp, Artificial Sequence
  Description of Artificial Sequence: Synthetic polynucleotide
atggctgccgatggttatcttccagattggctcgaggacactctctctgaaggaataagacagtggtggaagctcaaacctggcccaccaccaccaaagcccgcagggcggcataaggacgacagcaggggtcttgtgcttcctgggtacaagtacctcggacccttcaacggactcgacaagggagagccggtcaacgaggcagacgccgcggccctcgagcacgacaaagcctacgaccggcagctcgacagcggagacaacccgtacctcaagtacaaccacgccgacgcggagtttcaggagcgccttaaagaagatacgtcttttgggggcaacctcggacgagcagtcttccaggcgaaaaagagggctcttgaacctctgggcctggttgaggaacctgttaagacggctccgggaaaaaagaggccggtagagcactctcctgtggagccagactcctcctcgggaaccggaaaggcgggccagcagcctgcaagaaaaagattgaattttggtcagactggagacgcagactcagtacctgacccccagcctctcggacagccaccagcagccccctctggtctgggaactaatacgatggctacaggcagtggcgcaccaatggcagacaataacgagggcgccgacggagtgggtaattcctcgggaaattggcattgcgattccacatggatgggcgacagagtcatcaccaccagcacccgaacctgggccctgcccacctacaacaaccacctctacaaacaaatttccagccaatcaggagcctcgaacgacaatcactactttggctacagcaccccttgggggtattttgacttcaacagattccactgccacttttcaccacgtgactggcaaagactcatcaacaacaactggggattccgacccaagagactcaacttcaagctctttaacattcaagtcaaagaggtcacgcagaatgacggtacgacgacgattgccaataaccttaccagcacggttcaggtgtttactgactcggagtaccagctcccgtacgtcctcggctcggcgcatcaaggatgcctcccgccgttcccagcagacgtcttcatggtgccacagtatggatacctcaccctgaacaacgggagtcaggcagtaggacgctcttcattttactgcctggagtactttccttctcagatgctgcgtaccggaaacaactttaccttcagctacacttttgaggacgttcctttccacagcagctacgctcacagccagagtctggaccgtctcatgaatcctctcatcgaccagtacctgtattacttgagcagaacaaacactccaagtggaaccaccacgcagtcaaggcttcagttttctcaggccggagcgagtgacattcgggaccagtctaggaactggcttcctggaccctgttaccgccagcagcgagtatcaaagacatctgcggataacaacaacagtgaatactcgtggactggagctaccaagtaccacctcaatggcagagactctctggtgaatccgggcccggccatggcaagccacaaggacgatgaagaaaagttttttcctcagagcggggttctcatctttgggaagcaaggctcagagaaaacaaatgtggacattgaaaaggtcatgattacagacgaagaggaaatcaggacaaccaatcccgtggctacggagcagtatggttctgtatctaccaacctccagagaggcaacagacaagcagctaccgcagatgtcaacacacaaggcgttcttccaggcatggtctggcaggacagagatgtgtaccttcaggggcccatctgggcaaagattccacacacggacggacattttcacccctctcccctcatgggtggattcggacttaaacaccctcctccacagattctcatcaagaacaccccggtacctgcgaatccttcgaccaccttcagtgcggcaaagtttgcttccttcatcacacagtactccacgggacaggtcagcgtggagatcgagtgggagctgcagaaggaaaacagcaaacgctggaatcccgaaattcagtacacttccaactacaacaagtctgttaatgtggactttactgtggacactaatggcgtgtattcagagcctcgccccattggcaccagatacctgactcgtaatctgtaa

SEQ ID NO: 3314 - DNA, 2208 bp, Artificial Sequence
  Description of Artificial Sequence: Synthetic polynucleotide
atggctgccgatggttatcttccagattggctcgaggacactctctctgaaggaataagacagtggtggaagctcaaacctggcccaccaccaccaaagcccgcagagcggcataaggacgacagcaggggtcttgtgcttcctgggtacaagtacctcggacccttcaacggactcgacaagggagagccggtcaacgaggcagacgccgcggccctcgagcacgacaaagcctacgaccggcagctcgacagcggagacaacccgtacctcaagtacaaccacgccgacgcggagtttcaggagcgccttaaagaagatacgtcttttgggggcaacctcggacgagcagtcttccaggcgaaaaagagggttcttgaacctctgggcctggttgaggaacctgttaagacggctccgggaaaaaagaggccggtagagcactctcctgtggagccagactcctcctcgggaaccggaaaggcgggccagcagcctgcaagaaaaagattgaattttggtcagactggagacgcagactcagtacctgacccccagcctctcggacagccaccagcagccccctctggtctgggaactaatacgatggctacaggcagtggcgcaccaatggcagacaataacgagggcgccgacggagtgggtaattcctcgggaaattggcattgcgattccacatggatgggcgacagagtcatcaccaccagcacccgaacctgggccctgcccacctacaacaaccacctctacaaacaaatttccagccaatcaggagcctcgaacgacaatcactactttggctacagcaccccttgggggtattttgacttcaacagattccactgccacttttcaccacgtgactggcaaagactcatcaacaacaactggggattccgacccaagagactcaacttcaagctctttaacattcaagtcaaagaggtcacgcagaatgacggtacgacgacgattgccaataaccttaccagcacggttcaggtgtttactgactcggagtaccagctcccgtacgtcctcggctcggcgcatcaaggatgcctcccgccgttcccagcagacgtcttcatggtgccacagtatggatacctcaccctgaacaacgggagtcaggcagtaggacgctcttcattttactgcctggagtactttccttctcagatgctgcgtaccggaaacaactttaccttcagctacacttttgaggacgttcctttccacagcagctacgctcacagccagagtctggaccgtctcatgaatcctctcatcgaccagtacctgtattacttgagcagaacaaacactccaagtggaaccaccacgcagtcaaggcctcagttttctcaggccggagcgagtgacattcgggaccagtctaggaactggcttcctggaccctgttaccgccagcagcgagtatcaaagacatctgcggataacaacaacagtgaatactcgtggactggagctaccaagtaccacctcaatggcagagactctctggtgaatccgggcccggccatggcaagccacaaggacgatgaagaaaagttttttcctcagagcggggttctcatctttgggaagcaaggctcagagaaaacaaatgtggacattgaaaaggtcatgattacagacgaagaggaaatcaggacaaccaatcccgtggctacggagcagtatggttctgtatctaccaacctccagagaggcaacagacaagcagctaccgcagatgtcaacacacaaggcgttcttccaggcacggtctggcaggacagagatgtgtaccttcaggggcccatctgggcaaagattccacacacggacggacattttcacccctctcccctcatgggtggattcggacttaaacaccctcctccacagattctcatcaagaacaccccggtacctgcgaatccttcgaccaccttcagtgcggcaaagtttgcttccttcatcacacagtactccacgggacaggtcagcgtggagatcgagtgggagctgcagaaggaaaacagcaaacgctggaatcccgaaattcagtacacttccaactacaacaagtctgttaatgtggactttactgtggacactaatggcgtgtattcagagcctcgccccattggcaccagatacctgactcgtaatctgtaa

SEQ ID NO: 3315 - DNA, 2208 bp, Artificial Sequence; identical to SEQ ID NO: 21
  Description of Artificial Sequence: Synthetic polynucleotide

SEQ ID NO: 3316 - DNA, 2208 bp, Artificial Sequence
  Description of Artificial Sequence: Synthetic polynucleotide
atggctgccgatggttatcttccagattggctcgaggacactctctctgaaggaataagacagtggtggaagctcaaacctggcccaccaccaccaaagcccgcagagcggcataaggacgacagcaggggtcttgtgcttcctgggtacaagtacctcggacccttcaacggactcgacaagggagagccggtcaacgaggcagacgccgcggccctcgagcacgacaaagcctacaaccggcaactcgacagcggagacaacccgtacctcaagtacaaccacgccgacgcggagtttcaggagcgccttaaagaagatacgtcttttgggggcaacctcggacgagcagtcttccaggcgaaaaagagggttcttgaacctctgggcctggttgaggaacctgttaagacggctccgggaaaaaagaggccggtagagcactctcctgtggagccagactcctcctcgggaaccggaaaggcgggccagcagcctgcaagaaaaagattgaattttggtcagactggagacgcagactcagtacctgacccccagcctctcggacagccaccagcagccccctctggtctgggaactaatacgatggctacaggcagtggcgcaccaatggcagacaataacgagggcgccgacggagtgggtaattcctcgggaaattggcattgcgattccacatggatgggcgacagagtcatcaccaccagcacccgaacctgggccctgcccacctacaacaaccacctctacaaacaaatttccagccaatcaggagcctcgaacgacaatcactactttggctacagcaccccttgggggtattttgacttcaacagattccactgccacttttcaccacgtgactggcaaagactcatcaacaacaactggggattccgacccaagagactcaacttcaagctctttaacattcaagtcaaagaggtcacgcagaatgacggtacgacgacgattgccaataaccttaccagcacggttcaggtgtttactgactcggagtaccagctcccgtacgtcctcggctcggcgcatcaaggatgcctcccgccgttcccagcagacgtcttcatggtgccacagtatggatacctcaccctgaacaacgggagtcaggcagtaggacgctcttcattttactgcctggagtactttccttctcagatgctgcgtaccggaaacaactttaccttcagctacacttttgaggacgttcctttccacagcagctacgctcacagccagagtctggaccgtctcatgaatcctctcatcgaccagtacctgtattacttgagcagaacaaacactccaagtggaaccaccacgcagtcaaggcttcagttttctcaggccggagcgagtgacattcgggaccagtctaggaactggcttcctggaccctgttaccgccagcagcgagtatcaaagacatctgcggataacaacaacagtgaatactcgtggactggagctaccaagtaccacctcaatggcagggactctctggtgaatccgggcccggccatggcaagccacaaggacgatgaagaaaagttttttcctcagagcggggttctcatctttgggaagcaaggctcagagaaaacaaatgtggacattgaaaaggtcatgattacagacgaagaggaaatcaggacaaccaatcccgtggctacggagcagtatggttctgtatctaccaacctccagagaggcaacagacaagcagctaccgcagatgtcaacacacaaggcgttcttccaggcatggtctggcaggacagagatgtgtaccttcaggggcccatctgggcaaagattccacacacggacggacattttcacccctctcccctcatgggtggattcggacttaaacaccctcctccacagattctcatcaagaacaccccggtacctgcgaatccttcgaccaccttcagtgcggcaaagtttgcttccttcatcacacagtactccacgggacaggtcagcgtggagatcgagtgggagctgcagaaggaaaacagcaaacgctggaatcccgaaattcagtacacttccaactacaacaagtctgttaatgtggactttactgtggacactaatggcgtgtattcagagcctcgccccattggcaccagatacctgactcgtaatctgtaa

SEQ ID NO: 3317 - DNA, 2208 bp, Artificial Sequence
  Description of Artificial Sequence: Synthetic polynucleotide
atggctgccgatggttatcttccagattggctcgaggacactctctctgaaggaataagacagtggtggaagctcaaacctggcccaccaccaccaaagcccgcagagcggcataaggacgacagcaggggtcttgtgcttcctgggtacaagtacctcggacccttcaacggactcgacaagggagagccggtcaacgaggcagacgccgcggccctcgagcacgacaaagcctacgaccggcagctcgacagcggagacaacccgtacctcaagtacaaccacgccgacgcggagtttcaggagcgccttaaagaagatacgtcttttgggggcaacctcggacgagcagtcttccaggcgaaaaagagggttcttgaacctctgggcctggttgaggaacctgttaagacggctccgggaaaaaagaggccggtagagcactctcctgtggagccagactcctcctcgggaaccggaaaggcgggccagcagcctgcaagaaaaagattgaattttggtcagactggagacgcagactcagtacctgacccccagcctctcggacagccaccagcagccccctctggtctgggaactaatacgatggctacaggcagtggcgcaccaatggcagacaataacgagggcgccgacggagtgggtaattcctcgggaaattggcattgcgattccacatggatgggcgacagagtcatcaccaccagcacccgaacctgggccctgcccacctacaacaaccacctctacaaacaaatttccagccaatcaggagcctcgaacgacaatcactactttggctacagcaccccttgggggtattttgacttcaacagattccactgccacttttcaccacgtgactggcaaagactcatcaacaacaactggggattccgacccaagagactcaacttcaagctctttaacattcaagtcaaagaggtcacgcagaatgacggtacgacgacgattgccaataaccttaccagcacggttcgggtgtttactgactcggagtaccagctcccgtacgtcctcggctcggcgcatcaaggatgcctcccgccgttcccagcagacgtcttcatggtgccacagtatggatacctcaccctgaacaacgggagtcaggcagtaggacgctcttcattttactgcctggagtactttccttctcagatgctgcgtaccggaaacaactttaccttcagctacacttttgaggacgttcctttccacagcagctacgctcacagccagagtctggaccgtctcatgaatcctctcatcgaccagtacctgtattacttgagcagaacaaacactccaagtggaaccaccacgcagtcaaggcttcagttttctcaggccggagcgagtgacattcgggaccagtctaggaactggcttcctggaccctgttaccgccagcagcgagtatcaaagacatctgcggataacaacaacagtgaatactcgtggactggagctaccaagtaccacctcaatggcagagactctctggtgaatccgggcccggccatggcaagccacaaggacgatgaagaaaagttttttcctcagagcggggttctcatctttgggaagcaaggctcagagaaaacaaatgtggacattgaaaaggtcatgattacagacgaagaggaaatcaggacaaccaatcccgtggctacggagcagtatggttctgtatctaccaacctccagagaggcaacagacaagcagctaccgcagatgtcaacacacaaggcgttcttccaggcacggtctggcaggacagagatgtgtaccttcaggggcccatctgggcaaagattccacacacggacggacattttcacccctctcccctcatgggtggattcggacttaaacaccctcctccacagattctcatcaagaacaccccggtacctgcgaatccttcgaccaccttcagtgcggcaaagtttgcttccttcatcacacagtactccacgggacaggtcagcgtggagatcgagtgggagctgcagaaggaaaacagcaaacgctggaatcccgaaattcagtacacttccaactacaacaagtctgttaatgtggactttactgtggacactaatggcgtgtattcagagcctcgccccattggcaccagatacctgactcgtaatctgtaa

SEQ ID NO: 3318 - DNA, 2208 bp, Artificial Sequence
  Description of Artificial Sequence: Synthetic polynucleotide
atggctgccgatggttatcttccagattggctcgaggacactctctctgaaggaataagacagtggtggaagctcaaacctggcccaccaccaccaaagcccgcagagcggcataaggacgacagcaggggtcttgtgcttcctgggtacaagtacctcggacccttcaacggactcgacaagggagagccggtcaacgaggcagacgccgcggccctcgagcacgacaaagcctacgaccggcagctcgacagcggagacaacccgtacctcaagtacaaccacgccgacgcggagtttcaggagcgccttaaagaagatacgtcttttgggggcaacctcggacgagcagtcttccaggcgaaaaagagggttcttgaacctctgggcctggttgaggaacctgttaagacggctccgggaaaaaagaggccggtagagcactctcctgtggagccagactcctcctcgggaaccggaaaggcgggccagcagcctgcaagaaaaagattgaattttggtcagactggagacgcagactcagtacctgacccccagcctctcggacagccaccagcagccccctctggtctgggaactaatacgatggctacaggcagtggcgcaccaatggcagacaataacgagggcgccgacggagtgggtaattcctcgggaaattggcattgcgattccacatggatgggcgacagagtcatcaccaccagcacccgaacctgggccctgcccacctacaacaaccacctctacaaacaaatttccagccaatcaggagcctcgaacgacaatcactactttggctacagcaccccttgggggtattttgacttcaacagattccactgccacttttcaccacgtgactggcaaagactcatcaacaacaactggggattccgacccaagagactcaacttcaagctctttaacattcaagtcaaagaggtcacgcagaatgacggtacgacgacgattgccaataaccttaccagcacggttcaggtgtttactgactcggagtaccagctcccgtacgtcctcggctcggcgcatcaaggatgcctcccgccgttcccagcagacgtcttcatggtgccacagtatggatacctcaccctgaacaacgggagtcaggcagtaggacgctcttcattttactgcctggagtactttccttctcagatgctgcgtaccggaaacaactttaccttcagctacacttttgaggacgctcctttccacagcagctacgctcacagccagagtctggaccgtctcatgaatcctctcatcgaccagtacctgtattacttgagcagaacaaacactccaagtggaaccaccacgcagtcaaggcttcagttttctcaggccggagcgagtgacattcgggaccagtctaggaactggcttcctggaccctgttaccgccagcagcgagtatcaaagacatctgcggataacaacaacagtgaatactcgtggactggagctaccaagtaccacctcaatggcagagactctctggtgaatccgggcccggccatggcaagccacaaggacgatgaagaaaagttttttcctcagagcggggttctcatctttgggaagcaaggctcagagaaaacaaatgtggacattgaaaaggtcatgattacagacgaagaggaaatcaggacaaccaatcccgtggctacggagcagtatggttctgtatctaccaacctccagagaggcaacagacaagcagctaccgcagatgtcaacacacaaggcgttcttccaggcacggtctggcaggacagagatgtgtaccttcaggggcccatctgggcaaagattccacacacggacggacattttcacccctctcccctcatgggtggattcggacttaaacaccctcctccacagattctcatcaagaacaccccggtacctgcgaatccttcgaccaccttcagtgcggcaaagtttgcttccttcatcacacagtactccacgggacaggtcagcgtggagatcgagtgggagctgcagaaggaaaacagcaaacgctggaatcccgaaattcagtacacttccaactacaacaagtctgttaatgtggactttactgtggacactaatggcgtgtattcagagcctcgccccattggcaccagatacctgactcgtaatctgtaa

SEQ ID NO: 3319 - DNA, 2205 bp, Artificial Sequence
  Description of Artificial Sequence: Synthetic polynucleotide
atggctgccgatggttatcttccagattggctcgaggacactctctctgaaggaataagacagtggtggaagctcaaacctggcccaccaccaaagcccgcagagcggcataaggacgacagcaggggtcttgtgcttcctgggtacaagtacctcggacccttcaacggactcgacaagggagagccggtcaacgaggcagacgccgcggccctcgagcacgacaaagcctacgaccggcagctcgacagcggagacaacccgtacctcaagtacaaccacgccgacgcggagtttcaggagcgccttaaagaagatacgtcttttgggggcaacctcggacgagcagtcttccaggcgaaaaagagggttcttgaacctctgggcctggttgaggaacctgttaagacggctccgggaaaaaagaggccggtagagcactctcctgtggagccagactcctcctcgggaaccggaaaggcgggccagcagcctgcaagaaaaagattgaattttggtcagactggagacgcagactcagtacctgacccccagcctctcggacagccaccagcagccccctctggtctgggaactaatacgatggctacaggcagtggcgcaccaatggcagacaataacgagggcgccgacggagtgggtaattcctcgggaaattggcattgcgattccacatggatgggcgacagagtcatcaccaccagcacccgaacctgggccctgcccacctacaacaaccacctctacaaacaaatttccagccaatcaggagcctcgaacgacaatcactactttggctacagcaccccttgggggtattttgacttcaacagattccactgccacttttcaccacgtgactggcaaagactcatcaacaacaactggggattccgacccaagagactcaacttcaagctctttaacattcaagtcaaagaggtcacgcagaatgacggtacgacgacgattgccaataaccttaccagcacggttcaggtgtttactgactcggagtaccagctcccgtacgtcctcggctcggcgcatcaaggatgcctcccgccgttcccagcagacgtcttcatggtgccacagtatggatacctcaccctgaacaacgggagtcaggcagtaggacgctcttcattttactgcctggagtactttccttctcagatgctgcgtaccggaaacaactttaccttcagctacacttttgaggacgttcctttccacagcagctacgctcacagccagagtctggaccgtctcatgaatcctctcatcgaccagtacctgtattacttgagcagaacaaacactccaagtggaaccaccacgcagtcaaggcttcagttttctcaggccggagcgagtgacattcgggaccagtctaggaactggcttcctggaccctgttaccgccagcagcgagtatcaaagacatctgcggataacaacaacagtgaatactcgtggactggagctaccaagtaccacctcaatggcagagactctctggtgaatccgggcccggccatggcaagccacaaggacgatgaagaaaagttttttcctcagagcggggttctcatctttgggaagcaaggctcagagaaaacaaatgtggacattgaaaaggtcatgattacagacgaagaggaaatcaggacaaccaatcccgtggctacggagcagtatggttctgtatctaccaacctccagagaggcaacagacaagcagctaccgcagatgtcaacacacaaggcgttcttccaggcacggtctggcaggacagagatgtgtaccttcaggggcccatctgggcaaagattccacacacggacggacattttcacccctctcccctcatgggtggattcggacttaaacaccctcctccacagattctcatcaagaacaccccggtacctgcgaatccttcgaccaccttcagtgcggcaaagtttgcttccttcatcacacagtactccacgggacaggtcagcgtggagatcgagtgggagctgcagaaggaaaacagcaaacgctggaatcccgaaattcagtacacttccaactacaacaagtctgttaatgtggactttactgtggacactaatggcgtgtattcagagcctcgccccattggcaccagatacctgactcgtaatctgtaa

SEQ ID NO: 3320 - DNA, 2208 bp, Artificial Sequence
  Description of Artificial Sequence: Synthetic polynucleotide
atggctgccgatggttatcttccagattggctcgaggacactctctctgaaggaataagacagtggtggaagctcaaacctggcccaccaccaccaaagcccgcagagcggcataaggacgacagcaggggtcttgtgcttcctgggtacaagtacctcggacccttcaacggactcgacaagggagagccggtcaacgaggcagacgccgcggccctcgagcacgacaaagcctacgaccggcagctcgacagcggagacaacccgtacctcaagtacaaccacgccgacgcggagtttcaggagcgccttaaagaagatacgtcttttgggggcaacctcggacgagcagtcttccaggcgaaaaagagggctcttgaacctctgggcctggttgaggaacctgttaagacggctccgggaaaaaagaggccggtagagcactctcctgtggagccagactcctcctcgggaaccggaaaggcgggccagcagcctgcaagaaaaagattgaattttggtcagactggagacgcagactcagtacctgacccccagcctctcggacagccaccagcagccccctctggtctgggaactaatacgatggctacaggcagtggcgcaccaatggcagacaataacgagggcgccgacggagtgggtaattcctcgggaaattggcattgcgattccacatggatgggcgacagagtcatcaccaccagcacccgaacctgggccctgcccacctacaacaaccacctctacaaacaaatttccagccaatcaggagcctcgaacgacaatcactactttggctacagcaccccttgggggtattttgacttcaacagattccactgccacttttcaccacgtgactggcaaagactcatcaacaacaactggggattccgacccaagagactcaacttcaagctctttaacattcaagtcaaagaggtcacgcagaatgacggtacgacgacgattgccaataaccttaccagcacggttcaggtgtttactgactcggagtaccagctcccgtacgtcctcggctcggcgcatcaaggatgcctcccgccgttcccagcagacgtcttcatggtgccacagtatggatacctcaccctgaacaacgggagtcaggcagtaggacgctcttcattttactgcctggagtactttccttctcagatgctgcgtaccggaaacaactttaccttcagctacacttttgaggacgttcctttccacagcagctacgctcacagccagagtctggaccgtctcatgaatcctctcatcgaccagtacctgtattacttgagcagaacaaacactccaagtggaaccaccacgcagtcaaggcttcggttttctcaggccggagcgagtgacattcgggaccagtctaggaactggcttcctggaccctgttaccgccagcagcgagtatcaaagacatctgcggataacaacaacagtgaatactcgtggactggagctaccaagtaccacctcaatggcagagactctctggtgaatccgggcccggccatggcaagccacaaggacgatgaagaaaagttttttcctcagagcggggttctcatctttgggaagcaaggctcagagaaaacaaatgtggacattgaaaaggtcatgattacagacgaagaggaaatcaggacaaccaatcccgtggctacggagcagtatggttctgtatctaccaacctccagagaggcaacagacaagcagctaccgcagatgtcaacacacaaggcgttcttccaggcatggtctggcaggacagagatgtgtaccttcaggggcccatctgggcaaagattccacacacggacggacattttcacccctctcccctcatgggtggattcggacttaaacaccctcctccacagattctcatcaagaacaccccggtacctgcgaatccttcgaccaccttcagtgcggcaaagtttgcttccttcatcacacagtactccacgggacaggtcagcgtggagatcgagtgggagctgcagaaggaaaacagcaaacgctggaatcccgaaattcagtacacttccaactacaacaagtctgttaatgtggactttactgtggacactaatggcgtgtattcagagcctcgccccattggcaccagatacctgactcgtaatctgtaa

SEQ ID NO: 3321 - DNA, 2208 bp, Artificial Sequence
  Description of Artificial Sequence: Synthetic polynucleotide
atggctgccgatggttatcttccagattggctcgaggacactctctctgaaggaataagacagtggtggaagctcaaacctggcccaccaccaccaaagcccgcagagcggcataaggacgacagcaggggtcttgtgcttcctgggtacaagtacctcggacccttcaacggactcgacaagggagagccggtcaacgaggcagacgccgcggccctcgagcacgacaaagcctacgaccggcagctcgacagcggagacaacccgtacctcaagtacaaccacgccgacgcggagtttcaggagcgccttaaagaagatacgtcttttgggggcaacctcggacgagcagtcttccaggcgaaaaagagggttcttgaacctctgggcctggttgaggaacctgttaagacggctccgggaaaaaagaggccggtagagcactctcctgtggagccagactcctcctcgggaaccggaaaggcgggccagcggcctgcaagaaaaagattgaattttggtcagactggagacgcagactcagtacctgacccccagcctctcggacagccaccagcagccccctctggtctgggaactaatacgatggctacaggcagtggcgcaccaatggcagacaataacgagggcgccgacggagtgggtaattcctcgggaaattggcattgcgattccacatggatgggcgacagagtcatcaccaccagcacccgaacctgggccctgcccacctacaacaaccacctctacaaacaaatttccagccaatcaggagcctcgaacgacaatcactactttggctacagcaccccttgggggtattttgacttcaacagattccactgccacttttcaccacgtgactggcaaagactcatcaacaacaactggggattccgacccaagagactcaacttcaagctctttaacattcaagtcaaagaggtcacgcagaatgacggtacgacgacgattgccaataaccttaccagcacggttcaggtgtttactgactcggagtaccagctcccgtacgtcctcggctcggcgcatcaaggatgcctcccgccgttcccagcagacgtcttcatggtgccacagtatggatacctcaccctgaacaacgggagtcaggcagtaggacgctcttcattttactgcctggagtactttccttctcagatgctgcgtaccggaaacaactttaccttcagctacacttttgaggacgttcctttccacagcagctacgctcacagccagagtctggaccgtctcatgaatcctctcatcgaccagtacctgtattacttgagcagaacaaacactccaagtggaaccaccacgcagtcaaggcttcagttttctcaggccggagcgagtgacattcgggaccagtctaggaactggcttcctggaccctgttaccgccagcagcgagtatcaaagacatctgcggataacaacaacagtgaatactcgtggactggagctaccaagtaccacctcaatggcagagactctctggtgaatccgggcccggccatggcaagccacaaggacgatgaagaaaagttttttcctcagagcggggttctcatctttgggaagcaaggctcagagaaaacaaatgtggacattgaaaaggtcatgattacagacgaagaggaaatcaggacaaccaatcccgtggctacggagcagtatggttctgtatctaccaacctccagagaggcaacagacaagcagctaccgcagatgtcaacacacaaggcgttcttccaggcacggtctggcaggacagagatgtgtaccttcaggggcccatctgggcaaagattccacacacggacggacattttcacccctctcccctcatgggtggattcggacttaaacaccctcctccacagattctcatcaagaacaccccggtacctgcgaatccttcgaccaccttcagtgcggcaaagtttgcttccttcatcacacagtactccacgggacaggtcagcgtggagatcgagtgggagctgcagaaggaaaacagcaaacgctggaatcccgaaattcagtacacttccaactacaacaagtctgttaatgtggactttactgtggacactaatggcgtgtattcagagcctcgccccattggcaccagatacctgactcgtaatctgtaa

SEQ ID NO: 3322 - DNA, 2208 bp, Artificial Sequence
  Description of Artificial Sequence: Synthetic polynucleotide
atggctgccgatggttatcttccagattggctcgaggacactctctctgaaggaataagacagtggtggaagctcaaacctggcccaccaccaccaaagcccgcagagcggcataaggacgacagcaggggtcttgtgcttcctgggtacaagtacctcggacccttcaacggactcgacaagggagagccggtcaacgaggcagacgccgcggccctcgagcacgacaaagcctacgaccggcagctcgacagcggagacaacccgtacctcaagtacaaccacgccgacgcggagtttcaggagcgccttaaagaagatacgtcttttgggggcaacctcggacgagcagtcttccaggcgaaaaagagggttcttgaacctctgggcctggttgaggaacctgttaagacggctccgggaaaaaagaggccggtagagcactctcctgtggagccagactcctcctcgggaaccggaaaggcgggccagcagcctgcaagaaaaagattgaattttggtcagactggagacgcagactcagtacctgacccccagcctctcggacagccaccagcagccccctctggtctgggaactaatacgatggctacaggcagtggcgcaccaatggcagacaataacgagggcgccgacggagtgggtaattcctcgggaaattggcattgcgattccacatggatgggcgacagagtcatcaccaccagcacccgaacctgggccctgcccacctacaacaaccacctctacaaacaaatttccagccaatcaggagcctcgaacgacaatcactactttggctacagcaccccttgggggtattttgacttcaacagattccactgccacttttcaccacgtgactggcaaagactcatcaacaacaactggggattccgacccaagagactcaacttcaagctctttaacattcaagtcaaagaggtcacgcagaatgacggtacgacgacgattgccaataaccttaccagcacggttcaggtgtttactgactcggagtaccagctcccgtacgtcctcggctcggcgcatcaaggatgcctcccgccgttcccagcagacgtcttcatggtgccacagtatggatacctcaccctgaacaacgggagtcaggcagtaggacgctcttcattttactgcctggagtactttccttctcagatgctgcgtaccggaaacaactttaccttcagctacacttttgaggacgttcctttccacagcagctacgctcacagccagagtctggaccgtctcatgaatcctctcatcgaccagtacctgtattacttgagcagaacaaacactccaagtggaaccaccacgcagtcaaggcttcagttttctcaggccggagcgagtgacattcgggaccagtctaggaactggcttcctggaccctgttaccgccagcagcgagtatcaaagacatctgcggataacaacaacagtgaatactcgtggactggagctaccaagtaccacctcaatggcagagactctctggtgaatccgggcccggccatggcaagccacaaggacgatgaagaaaagttttttcctcagagcggggttctcatctttgggaagcaaggctcagagaaaacaaatgtggacattgaaaaggtcatgattacagacgaagaggaaatcaggacaaccaatcccgtggctacggagcagtatggttctgtatctaccaacctccagagaggcaacagacaagcagctaccgcagatgtcaacacacaaggcgttcttccaggcatggtctggcaggacagagatgtgtaccttcaggggcccatctgggcaaagattccacacacggacggacattttcacccctctcccctcatgggtggattcggacttaaacaccctcctccacagattctcatcaagaacaccccggtacctgcgaatccttcgaccaccttcagtgcggcaaagtttgcttccttcatcacacagtactccacgggacaggtcagcgtggagatcgagtgggagctgcagaaggaaaacagcaaccgctggaatcccgaaattcagtacacttccaactacaacaagtctgttaatgtggactttactgtggacactaatggcgtgtattcagagcctcgccccattggcaccagatacctgactcgtaatctgtaa

SEQ ID NO: 3323 - DNA, 2208 bp, Artificial Sequence
  Description of Artificial Sequence: Synthetic polynucleotide
atggctgccgatggttatcttccagattggctcgaggacactctctctgaaggaataagacagtggtggaagctcaaacctggcccaccaccaccaaagcccgcagagcggcataaggacgacagcaggggtcttgtgcttcctgggtacaagtacctcggacccttcaacggactcgacaagggagagccggtcaacgaggcagacgccgcggccctcgagcacgacaaagcctacgaccggcagctcgacagcggagacaacccgtacctcaagtacaaccacgccgacgcggagtttcaggagcgccttaaagaagatacgtcttttgggggcaacctcggacgagcagtcttccaggcgaaaaagagggttcttgaacctctgggcctggttgaggaacctgttaagacggctccgggaaaaaagaggccggtagagcactctcctgtggagccagactcctcctcgggaaccggaaaggcgggccagcagcctgcaagaaaaagattgaattttggtcagactggagacgcagactcagtacctgacccccagcctctcggacagccaccagcagccccctctggtctgggaactaatacgatggctacaggcagtggcgcaccaatggcagacaataacgagggcgccgacggagtgggtaattcctcgggaaattggcattgcgattccacatggatgggcgacagagtcatcaccaccagcacccgaacctgggccctgcccacctacaacaaccacctctacaaacaaatttccagccaatcaggagcctcgaacgacaatcactactttggctacagcaccccttgggggtattttgacttcaacagattccactgccacttttcaccacgtgactggcaaagactcatcaacaacaactggggattccgacccaagagactcaacttcaagctctttaacattcaagtcaaagaggtcacgcagaatgacggtacgacgacgattgccaataaccttaccagcacggttcaggtgtttactgactcggagtaccagctcccgtacgtcctcggctcggcgcatcaaggatgcctcccgccgttcccagcagacgtcttcatggtgccacagtatggatacctcaccctgaacaacgggagtcaggcagtaggacgctcttcattttactgcctggagtactttccttctcagatgctgcgtaccggaaacaactttaccttcagctacacttttgaggacgttcctttccacagcagctacgctcacagccagagtctggaccgtctcatgaatcctctcatcgaccagtacctgtattacttgagcagaacaaacactccaagtggaaccaccacgcagtcaaggcttcagttttctcaggccggagcgagtgacattcgggaccagtctaggaactggcttcctggaccctgttaccgccagcagcgagtatcaaagacatctgcggataacaacaacagtgaatactcgtggactggagctaccaagtaccacctcaatggcagagactctctggtgaatccgggcccggccatggcaagccacaaggacgatgaagaaaagttttttcctcagagcggggttctcatctttgggaagcaaggctcagagaaaacaaatgtggacattgaaaaggtcatgattacagacgaagaggaaatcaggacaaccaatcccgtggctacggagcagtatggttctgtatctaccaacctccagagaggcaacagacaagcagctaccgcagatgtcaacacacaaggcgttcttccaggcacggtctggcaggacagagatgtgtaccttcaggggcccatctgggcaaagattccacacacggacggacattttcacccctctcccctcatgggtggattcggacttaaacaccctcctccacagattctcatcaagaacaccccggtacctgcgaatccttcgaccaccttcagtgcggcaaagtttgcttccttcatcacacagtactccacgggacaggtcggcgtggagatcgagtgggagctgcagaaggaaaacagcaaacgctggaatcccgaaattcagtacacttccaactacaacaagtctgttaatgtggactttactgtggacactaatggcgtgtattcagagcctcgccccattggcaccagatacctgactcgtaatctgtaa

SEQ ID NO: 3324 - DNA, 2208 bp, Artificial Sequence
  Description of Artificial Sequence: Synthetic polynucleotide
atggctgccgatggttatcttccagattggctcgaggacactctctctgaaggaataagacagtggtggaagctcaaacctggcccaccaccaccaaagcccgcagagcggcataaggacgacagcaggggtcttgtgcttcctgggtacaagtacctcggacccttcaacggactcgacaagggagagccggtcaacgaggcagacgccgcggccctcgagcacgacaaagcctacgaccggcagctcgacagcggagacaacccgtacctcaagtacaaccacgccgacgcggagtttcaggagcgccttaaagaagatacgtcttttgggggcaacctcggacgagcagtcttccaggcgaaaaagagggttcttgaacctctgggcctggttgaggaacctgttaagacggctccgggaaaaaagaggccggtagagcactctcctgtggagccagactcctcctcgggaaccggaaaggcgggccagcagcctgcaagaaaaagattgaattttggtcagactggagacgcagactcagtacctgacccccagcctctcggacagccaccagcagccccctctggtctgggaactaatacgatggctacaggcagtggcgcaccaatggcagacaataacgagggcgccgacggagtgggtaattcctcgggaaattggcattgcgattccacatggatgggcgacagagtcatcaccaccagcacccgaacctgggccctgcccacctacaacaaccacctctacaaacaaatttccagccaatcaggagcctcgaacgacaatcactactttggctacagcaccccttgggggtattttgacttcaacagattccactgccacttttcaccacgtgactggcaaagactcatcaacaacaactggggattccgacccaagagactcaacttcaagctctttaacattcaagtcaaagaggtcacgcagaatgacggtacgacgacgattgccaataaccttaccagcacggttcaggtgtttactgactcggagtaccagctcccgtacgtcctcggctcggcgcatcaaggatgcctcccgccgttcccagcagacgtcttcatggtgccacagtatggatacctcaccctgaacaacgggagtcaggcagtaggacgctcttcattttactgcctggagtactttccttctcagatgctgcgtaccggaaacaactttaccttcagctacacttttgaggacgttcctttccacagcagctacgctcacagccagagtctggaccgtctcatgaatcctctcatcgaccagtacctgtattacttgagcagaacaaacactccaagtggaaccaccacgcagtcaaggcttcagttttctcaggccggagcgagtgacattcgggaccagtctaggaactggcttcctggaccctgttaccgccagcagcgagtatcaaagacatctgcggataacaacaacagtgaatactcgtggactggagctaccaagtaccacctcaatggcagagactctctggtgaatccgggcccggccatggcaagccacaaggacgatgaagaaaagttttttcctcagagcggggttctcatctttgggaagcaaggctcagagaaaacaaatgtggacattgaaaaggtcatgattacagacgaagaggaaatcagggcaaccaatcccgtggctacggagcagtgtggttctgtatctaccaacctccagagaggcaacagacaagcagctaccgcagatgtcaacacacaaggcgttcttccaggcacggtctggcaggacagagatgtgtaccttcaggggcccatctgggcaaagattccacacacggacggacattttcacccctctcccctcatgggtggattcggacttaaacaccctcctccacagattctcatcaagaacaccccggtacctgcgaatccttcgaccaccttcagtgcggcaaagtttgcttccttcatcacacagtactccacgggacaggtcagcgtggagatcgagtgggagctgcagaaggaaaacagcaaacgctggaatcccgaaattcagtacacttccaactacaacaagtctgttaatgtggactttactgtggacactaatggcgtgtattcagagcctcgccccattggcaccagatacctgactcgtaatctgtaa

SEQ ID NO: 3325 - DNA, 2208 bp, Artificial Sequence
  Description of Artificial Sequence: Synthetic polynucleotide
atggctgccgatggttatcttccagattggctcgaggacactctctctgaaggaataagacagtggtggaagctcaaacctggcccaccaccaccaaagcccgcagagcggcataaggacgacagcaggggtcttgtgcttcctgggtacaagtacctcggacccttcaacggactcgacaagggagagccggtcaacgaggcagacgccgcggccctcgagcacgacaaagcctacgaccggcagctcgacagcggagacaacccgtacctcaagtacaaccacgccgacgcggagtttcaggagcgccttaaagaagatacgtcttttgggggcaacctcggacgagcagtcttccaggcgaaaaagagggctcttgaacctctgggcctggttgaggaacctgttaagacggctccgggaaaaaagaggccggtagagcactctcctgtggagccagactcctcctcgggaaccggaaaggcgggccagcagcctgcaagaaaaagattgaattttggtcagactggagacgcagactcagtacctgacccccagcctctcggacagccaccagcagccccctctggtctgggaactaatacgatggctacaggcagtggcgcaccaatggcagacaataacgagggcgccgacggagtgggtaattcctcgggaaattggcattgcgattccacatggatgggcgacagagtcatcaccaccagcacccgaacctgggccctgcccacctacaacaaccacctctacaaacaaatttccagccaatcaggagcctcgaacgacaatcactactttggctacagcaccccttgggggtattttgacttcaacagattccactgccacttttcaccacgtgactggcaaagactcatcaacaacaactggggattccgacccaagagactcaacttcaagctctttaacattcaagtcaaagaggtcacgcagaatgacggtacgacgacgattgccaataaccttaccagcacggttcaggtgtttactgactcggagtaccagctcccgtacgtcctcggctcggcgcatcaaggatgcctcccgccgttcccagcagacgtcttcgtggtgccacagtatggatacctcaccctgaacaacgggagtcaggcagtaggacgctcttcattttactgcctggagtactttccttctcagatgctgcgtaccggaaacaactttaccttcagctacacttttgaggacgttcctttccacagcagctacgctcacagccagagtctggaccgtctcatgaatcctctcatcgaccagtacctgtattacttgagcagaacaaacactccaagtggaaccaccacgcagtcaaggcttcagttttctcaggccggagcgagtgacattcgggaccagtctaggaactggcttcctggaccctgttaccgccagcagcgagtatcaaagacatctgcggataacaacaacagtgaatactcgtggactggagctaccaagtaccacctcaatggcagagactctctggtgaatccgggcccggccatggcaagccacaaggacgatgaagaaaagttttttcctcagagcggggttctcatctttgggaagcaaggctcagagaaaacaaatgtggacattgaaaaggtcatgattacagacgaagaggaaatcaggacaaccaatcccgtggctacggagcagtatggttctgtatctaccaacctccagagaggcaacagacaagcagctaccgcagatgtcaacacacaaggcgttcttccaggcatggtctggcaggacagagatgtgtaccttcaggggcccatctgggcaaagattccacacacggacggacattttcacccctctcccctcatgggtggattcggacttaaacaccctcctccacagattctcatcaagaacaccccggtacctgcgaatccttcgaccaccttcagtgcggcaaagtttgcttccttcatcacacagtactccacgggacaggtcagcgtggagatcgagtgggagctgcagaaggaaaacagcaaacgctggaatcccgaaattcagtacacttccaactacaacaagtctgttaatgtggactttactgtggacactaatggcgtgtattcagagcctcgccccattggcaccagatacctgactcgtaatctgtaa

SEQ ID NO: 3326 - DNA, 2208 bp, Artificial Sequence
  Description of Artificial Sequence: Synthetic polynucleotide
atggctgccgatggttatcttccagattggctcgaggacactctctctgaaggaataagacagtggtggaagctcaaacctggcccaccaccaccaaagcccgcagagcggcataaggacgacagcaggggtcttgtgcttcctgggtacaagtacctcggacccttcaacggactcgacaagggagagccggtcaacgaggcagacgccgcggccctcgagcacgacaaagcctacgaccggcagctcgacagcggagacaacccgtacctcaagtacaaccacgccgacgcggagtttcaggagcgccttaaagaagatacgtcttttgggggcaacctcggacgagcagtcttccaggcgaaaaagagggttcttgaacctctgggcctggttgaggaacctgttaagacggctccgggaaaaaagaggccggtagagcactctcctgtggagccagactcctcctcgggaaccggaaaggcgggccagcagcctgcaagaaaaagattgaattttggtcagactggagacgcagactcagtacctgacccccagcctctcggacagccaccagcagccccctctggtctgggaactaatacgatggctacaggcagtggcgcaccaatggcagacaataacgagggcgccgacggagtgggtaattcctcgggaaattggcattgcgattccacatggatgggcgacagagtcatcaccaccagcacccgaacctgggccctgcccacctacaacaaccacctctacaaacaaatttccagccaatcaggagcctcgaacgacaatcactactttggctacagcaccccttgggggtattttgacttcaacagattccactgccacttttcaccacgtgactggcaaagactcatcaacaacaactggggattccgacccaagagactcaacttcaagctctttaacattcaagtcaaagaggtcacgcagaatgacggtacgacgacgattgccaataaccttaccagcacggttcaggtgtttactgactcggagtaccagctcccgtacgtcctcggctcggcgcatcaaggatgcctcccgccgttcccagcagacgtcttcatggtgccacagtatggatacctcaccctgaacaacgggagtcaggcagtaggacgctcttcattttactgcctggagtactttccttctcagatgctgcgtaccggaaacaactttaccttcagctacacttttgaggacgttcctttccacagcagctacgctcacagccagagtctggaccgtctcatgaatcctctcatcgaccagtacctgtattacttgagcagaacaaacactccaagtggaaccaccacgcagtcaaggcttcagttttctcaggccggagcgagtgacattcgggaccagtctaggaactggcttcctggaccctgttaccgccagcagcgagtatcaaagacatctgcggataacaacaacagtgaatactcgtggactggagctaccaagtaccacctcaatggcagagactctctggtgaatccgggcccggccatggcaagccacaaggacgatgaagaaaagttttttcctcagagcggggttctcatctttgggaagcaaggctcagagaaaacaaatgtggacattgaaaaggtcatgattacagacgaagaggaaatcaggacaaccaatcccgtggctacggagcagtatggttctgtatctaccaacctccagagaggcaacagacaagcagctaccgcagatgtcaacacacaaggcgttcttccaggcacggtctggcaggacagagatgtgtaccttcaggggcccatctgggcaaagattccacacacggacggacattttcacccctctcccctcgtgggtggattcggacttaaacaccctcctccacagattctcatcaagaacaccccggtacctgcgaatccttcgaccaccttcagtgcggcaaagtttgcttccttcatcacacagtactccacgggacaggtcagcgtggagatcgagtgggagctgcagaaggaaaacagcaaacgctggaatcccgaaattcagtacacttccaactacaacaagtctgttaatgtggactttactgtggacactaatggcgtgtattcagagcctcgccccattggcaccagatacctgactcgtaatctgtaa

SEQ ID NO: 3327 - DNA, 2208 bp, Artificial Sequence
  Description of Artificial Sequence: Synthetic polynucleotide
atggctgccgatggttatcttccagattggctcgaggacactctctctgaaggaataagacagtggtggaagctcaaacctggcccaccaccaccaaagcccgcagagcggcataaggacgacagcaggggtcttgtgcttcctgggtacaagtacctcggacccttcaacggactcgacaagggagagccggtcaacgaggcagacgccgcggccctcgagcacgacaaagcctacgaccggcagctcgacagcggagacaacccgtacctcaagtacaaccacgccgacgcggagtttcaggagcgccttaaagaagatacgtcttttgggggcaacctcggacgagcagtcttccaggcgaaaaagagggttcttgaacctctgggcctggttgaggaacctgttaagacggctccgggaaaaaagaggccggtagagcactctcctgtggagccagactcctcctcgggaaccggaaaggcgggccagcagcctgcaagaaaaagattgaattttggtcagactggagacgcagactcagtacctgacccccagcctctcggacagccaccagcagccccctctggtctgggaactaatacgatggctacaggcagtggcgcaccaatggcagacaataacgagggcgccgacggagtgggtaattcctcgggaaattggcattgcgattccacatggatgggcgacagagtcatcaccaccagcacccgaacctgggccctgcccacctacaacaaccacctctacaaacaaatttccagccaatcaggagcctcgaacgacaatcactactttggctacagcaccccttgggggtattttgacttcaacagattccactgccacttttcaccacgtgactggcaaagactcatcaacaacaactggggattccgacccaagagactcaacttcaagctctttaacattcaagtcaaagaggtcacgcagaatgacggtacgacgacgattgccaataaccttaccagcacggttcaggtgtttactgactcggagtaccagctcccgtacgtcctcggctcggcgcatcaaggatgcctcccgccgttcccagcagacgtcttcatggtgccacagtatggatacctcaccctgaacaacgggagtcaggcagtaggacgctcttcattttactgcctggagtactttccttctcagatgctgcgtaccggaaacaactttaccttcagctacacttttgaggacgttcctttccacagcagctacgctcacagccagagtctggaccgtctcatgaatcctctcatcgaccagtacctgtattacttgagcagaacaaacactccaagtggaaccaccacgcagtcaaggcttcagttttctcaggccggagcgagtgacattcgggaccagtctaggaactggcttcctggaccctgttaccgccagcagcgagtatcaaagacatctgcggataacaacaacagtgaatactcgtggactggagctaccaagtaccacctcaatggcagagactctctggtgaatccgggcccggccatggcaagccacaaggacgatgaagaaaagttttttcctcagagcggggttctcatctttgggaagcaaggctcagagaaaacaaatgtggacattgaaaaggtcatgattacagacgaagaggaaatcaggacaaccaatcccgtggctacggagcagtatggttctgtatctaccaacctccagagaggcaacagacaagcagctaccgcagatgtcaacacacaaggcgttcttccaggcacggtctggcaggacagagatgtgtaccttcaggggcccatctgggcaaagattccacacacggacggacattttcacccctctcccctcatgggtggattcggacttaaacaccctcctccacagattctcatcaagaacaccccggtacctgcgaatccttcgaccaccctcagtgcggcaaagtttgcttccttcatcacacagtactccacgggacaggtcagcgtggagatcgagtgggagctgcagaaggaaaacagcaaacgctggaatcccgaaattcagtacacttccaactacaacaagtctgttaatgtggactttactgtggacactaatggcgtgtattcagagcctcgccccattggcaccagatacctgactcgtaatctgtaa

SEQ ID NO: 3328 - DNA, 2208 bp, Artificial Sequence
  Description of Artificial Sequence: Synthetic polynucleotide
atggctgccgatggttatcttccagattggctcgaggacactctctctgaaggaataagacagtggtggaagctcaaacctggcccaccaccaccaaagcccgcagagcggcataaggacgacagcaggggtcttgtgcttcctgggtacaagtacctcggacccttcaacggactcgacaagggagagccggtcaacgaggcagacgccgcggccctcgagcacgacaaagcctacgaccggcagctcgacagcggagacaacccgtacctcaagtacaaccacgccgacgcggagtttcaggagcgccttaaagaagatacgtcttttgggggcaacctcggacgagcagtcttccaggcgaaaaagagggttcttgaacctctgggcctggttgaggaacctgttaagacggctccgggaaaaaagaggccggtagagcactctcctgtggagccagactcctcctcgggaaccggaaaggcgggccagcagcctgcaagaaaaagattgaattttggtcagactggagacgcagactcagtacctgacccccagcctctcggacagccaccagcagccccctctggtctgggaactaatacgatggctacaggcagtggcgcaccaatggcagacaataacgagggcgccgacggagtgggtaattcctcgggaaattggcattgcgattccacatggatgggcgacagagtcatcaccaccagcacccgaacctgggccctgcccacctacaacaaccacctctacaaacaaatttccagccaatcaggagcctcgaacgacaatcactactttggctacagcaccccttgggggtattttgacttcaacagattccactgccacttttcaccacgtgactggcaaagactcatcaacaacaactggggattccgacccaagagactcaacttcaagctctttaacattcaagtcaaagaggtcacgcagaatgacggtacgacgacgattgccaataaccttaccagcacggttcaggtgtttactgactcggagtaccagctcccgtacgtcctcggctcggcgcatcaaggatgcctcccgccgttcccagcagacgtcttcatggtgccacagtatggatacctcaccctgaacaacgggagtcaggcagtagggcgctcttcattttactgcctggagtactttccttctcagatgctgcgtaccggaaacaactttaccttcagctacacttttgaggacgttcctttccacagcagctacgctcacagccagagtctggaccgtctcatgaatcctctcatcgaccagtacctgtattacttgagcagaacaaacactccaagtggaaccaccacgcagtcaaggcttcagttttctcaggccggagcgagtgacattcgggaccagtctaggaactggcttcctggaccctgttaccgccagcagcgagtatcaaagacatctgcggataacaacaacagtgaatactcgtggactggagctaccaagtaccacctcaatggcagagactctctggtgaatccgggcccggccatggcaagccacaaggacgatgaagaaaagttttttcctcagagcggggttctcatctttgggaagcaaggctcagagaaaacaaatgtggacattgaaaaggtcatgattacagacgaaggggaaatcaggacaaccaatcccgtggctacggagcagtatggttctgtatctaccaacctccagagaggcaacagacaagcagctaccgcagatgtcaacacacaaggcgttcttccaggcacggtctggcaggacagagatgtgtaccttcaggggcccatctgggcaaagattccacacacggacggacattttcacccctctcccctcatgggtggattcggacttaaacaccctcctccacagattctcatcaagaacaccccggtacctgcgaatccttcgaccaccttcagtgcggcaaagtttgcttccttcatcacacagtactccacgggacaggtcagcgtggagatcgagtgggagctgcagaaggaaaacagcaaacgctggaatcccgaaattcagtacacttccaactacaacaagtctgttaatgtggactttactgtggacactaatggcgtgtattcagagcctcgccccattggcaccagatacctgactcgtaatctgtaa

SEQ ID NO: 3329 - DNA, 2208 bp, Artificial Sequence
  Description of Artificial Sequence: Synthetic polynucleotide
atggctgccgatggttatcttccagattggctcgaggacactctctctgaaggaataagacagtggtggaagctcaaacctggcccaccaccaccaaagcccgcagagcggcataaggacgacagcaggggtcttgtgcttcctgggtacaagtacctcggacccttcaacggactcgacaagggagagccggtcaacgaggcagacgccgcggccctcgagcacgacaaagcctacgaccggcagctcgacagcggagacaacccgtacctcaagtacaaccacgccgacgcggagtttcaggagcgccttaaagaagatacgtcttttgggggcaacctcggacgagcagtcttccaggcgaaaaagagggctcttgaacctctgggcctggttgaggaacctgttaagacggctccgggaaaaaagaggccggtagagcactctcctgtggagccagactcctcctcgggaaccggaaaggcgggccagcagcctgcaagaaaaagattgaattttggtcagactggagacgcagactcagtacctgacccccagcctctcggacagccaccagcagccccctctggtctgggaactaatacgatggctacaggcagtggcgcaccaatggcagacaataacgagggcgccgacggagtgggtaattcctcgggaaattggcattgcgattccacatggatgggcgacagagtcatcaccaccagcacccgaacctgggccctgcccacctacaacaaccacctctacaaacaaatttccagccaatcaggagcctcgaacgacaatcactactttggctacagcaccccttgggggtattttgacttcaacagattccactgccacttttcaccacgtgactggcaaagactcatcaacaacaactggggattccgacccaagagactcaacttcaagctctttaacattcaagtcaaagaggtcacgcagaatgacggtacgacgacgattgccaataaccttaccagcacggttcaggtgtttactgactcggagtaccagctcccgtacgtcctcggctcggcgcatcaaggatgcctcccgccgttcccagcagacgtcttcatggtgccacagtatggatacctcaccctgaacaacgggagtcaggcagtaggacgctcttcattttactgcctggagtactttccttctcagatgctgcgtaccggaaacaactttaccttcagctacacttttgaggacgttcctttccacagcagctacgctcacagccagagtctggaccgtctcatgaatcctctcatcgaccagtacctgtattacttgagcagaacaaacactccaagtggaaccaccacgcagtcaaggcttcagttttctcaggccggagcgagtgacattcgggaccagtctaggaactggcttcctggaccctgttaccgccagcagcgagtatcaaagacatctgcggataacaacaacagtgaatactcgtggactggagctaccaagtaccacctcaatggcagagactctctggtgaatccgggcccggccatggcaagccacaaggacgatgaagaaaagttttttcctcagagcggggttctcatctttgggaagcaaggctcagagaaaacaaatgtggacattgaaaaggtcatgattacagacgaagaggaaatcaggacaaccaatcccgtggctacggagcagtatggttctgtatctaccaacctccagagaggcaacagacaagcagctaccgcagatgtcaacacacaaggcgttcttccaggcatggtctggcaggacagagatgtgtaccttcaggggcccatctgggcaaagattccacacacggacggacattttcacccctctcccctcatgggtggattcggacttaaacaccctcctccacagattctcatcaaaaacaccccggtacctgcgaatccttcgaccaccttcagtgcggcaaagtttgcttccttcatcacacagtactccgcgggacaggtcagcgtggagatcgagtgggagctgcagaaggaaaacagcaaacgctggaatcccgaaattcagtacacttccaactacaacaagtctgttaatgtggactttactgtggacactaatggcgtgtattcagagcctcgccccattggcaccagatacctgactcgtaatctgtaa

SEQ ID NO: 3330 - DNA, 2208 bp, Artificial Sequence
  Description of Artificial Sequence: Synthetic polynucleotide
atggctgccgatggttatcttccagattggctcgaggacactctctctgaaggaataagacagtggtggaagctcaaacctggcccaccaccaccaaagcccgcagagcggcataaggacgacagcaggggtcttgtgcttcctgggtacaagtacctcggacccttcaacggactcgacaagggagagccggtcaacgaggcagacgccgcggccctcgagcacgacaaagcctacgaccggcagctcgacagcggagacaacccgtacctcaagtacaaccacgccgacgcggagtttcaggagcgccttaaagaagatacgtcttttgggggcaacctcggacgagcagtcttccaggcgaaaaagagggttcttgaacctctgggcctggttgaggaacctgttaagacggctccgggaaaaaagaggccggtagagcactctcctgtggagccagactcctcctcgggaaccggaaaggcgggccagcagcctgcaagaaaaagattgaattttggtcagactggagacgcagactcagtacctgacccccagcctctcggacagccaccagcagccccctctggtctgggaactaatacgatggctacaggcagtggcgcaccaatggcagacaataacgagggcgccgacggagtgggtaattcctcgggaaattggcattgcgattccacatggatgggcgacagagtcatcaccaccagcacccgaacctgggccctgcccacctacaacaaccacctctacaaacaaatttccagccaatcaggagcctcgaacgacaatcactactttggctacagcaccccttgggggtattttgacttcaacagattccactgccacttttcaccacgtgactggcaaagactcatcaacaacaactggggattccgacccaagagactcaacttcaagctctttaacattcaagtcaaagaggtcacgcagaatgacggtacgacgacgattgccaataaccttaccagcacggttcaggtgtttactgactcggagtaccagctcccgtacgtcctcggctcggcgcatcaaggatgcctcccgccgttcccagcagacgtcttcatggtgccacagtatggatacctcaccctgaacaacgggagtcaggcagtaggacgctcttcattttactgcctggagtactttccttctcagatgctgcgtaccggaaacaactttaccttcagctacacttttgaggacgttcctttccacagcagctacgctcacagccagagtctggaccgtctcatgaatcctctcatcgaccagtacctgtattacttgagcagaacaaacactccaagtggaaccaccacgcagtcaaggcttcagttttctcaggccggagcgagtgacattcgggaccagtctaggaactggcttcctggaccctgttaccgccagcagcgagtatcaaagacatctgcggataacaacaacagtgaatactcgtggactggagctaccgagtaccacctcaatggcagagactctctggtgaatccgggcccggccatggcaagccacaaggacgatgaagaaaagttttttcctcagagcggggttctcatctttgggaagcaaggctcagagaaaacaaatgtggacattgaaaaggtcatgattacagacgaagaggaaatcaggacaaccaatcccgtggctacggagcagtatggttctgtatctaccaacctccagagaggcaacagacaagcagctaccgcagatgtcaacacacaaggcgttcttccaggcacggtctggcaggacagagatgtgtaccttcaggggcccatctgggcaaagattccacacacggacggacattttcacccctctcccctcatgggtggattcggacttaaacaccctcccccacagattctcatcaagaacaccccggtacctgcgaatccttcgaccaccttcagtgcggcaaagtttgcttccttcatcacacagtactccacgggacaggtcagcgtggagatcgagtgggagctgcagaaggaaaacagcaaacgctggaatcccgaaattcagtacacttccaactacaacaagtctgttaatgtggactttactgtggacactaatggcgtgtattcagagcctcgccccattggcaccagatacctgactcgtaatctgtaa

SEQ ID NO: 3331 - DNA, 2208 bp, Artificial Sequence
  Description of Artificial Sequence: Synthetic polynucleotide
atggctgccgatggttatcttccagattggctcgaggacactctctctgaaggaataagacagtggtggaagctcaaacctggcccaccaccaccaaagcccgcagagcggcataaggacgacagcaggggtcttgtgcttcctgggtacaagtacctcggacccttcaacggactcgacaagggagagccggtcaacgaggcagacgccgcggccctcgagcacggcaaagcctacgaccggcagctcgacagcggagacaacccgtacctcaagtacaaccacgccgacgcggagtttcaggagcgccttaaagaagatacgtcttttgggggcaacctcggacgagcagtcttccaggcgaaaaagagggttcttgaacctctgggcctggttgaggaacctgttaagacggctccgggaaaaaagaggccggtagagcactctcctgtggagccagactcctcctcgggaaccggaaaggcgggccagcagcctgcaagaaaaagattgaattttggtcagactggagacgcagactcagtacctgacccccagcctctcggacagccaccagcagccccctctggtctgggaactaatacgatggctacaggcagtggcgcaccaatggcagacaataacgagggcgccgacggagtgggtaattcctcgggaaattggcattgcgattccacatggatgggcgacagagtcatcaccaccagcacccgaacctgggccctgcccacctacaacaaccacctctacaaacaaatttccagccaatcaggagcctcgaacgacaatcactactttggctacagcaccccttgggggtattttgacttcaacagattccactgccacttttcaccacgtgactggcaaagactcatcaacaacaactggggattccgacccaagagactcaacttcaagctctttaacattcaagtcaaagaggtcacgcagaatgacggtacgacgacgattgccaataaccttaccagcacggttcaggtgtttactgactcggagtaccagctcccgtacgtcctcggctcggcgcatcaaggatgcctcccgccgttcccagcagacgtcttcatggtgccacagtatggatacctcaccctgaacaacgggagtcaggcagtaggacgctcttcattttactgcctggagtactttccttctcagatgctgcgtaccggaaacaactttaccttcagctacacttttgaggacgttcctttccacagcagctacgctcacagccagagtctggaccgtctcatgaatcctctcatcgaccagtacctgtattacttgagcagaacaaacactccaagtggaaccaccacgcagtcaaggcttcagttttctcaggccggagcgagtgacattcgggaccagtctaggaactggcttcctggaccctgttaccgccagcagcgagtatcaaagacatctgcggataacaacaacagtgaatactcgtggactggagctaccaagtaccacctcaatggcagagactctctggtgaatccgggcccggccatggcaagccacaaggacgatgaagaaaagttttttcctcagagcggggttctcatctttgggaagcaaggctcagagaaaacaaatgtggacattgaaaaggtcatgattacagacgaagaggaaatcaggacaaccaatcccgtggctacggagcagtatggttctgtatctaccaacctccagagaggcaacagacaagcagctaccgcagatgtcaacacacaaggcgttcttccaggcacggtctggcaggacagagatgtgtaccttcaggggcccatctgggcaaagattccacacacggacggacattttcacccctctcccctcatgggtggattcggacttaaacaccctcctccacagattctcatcaagaacaccccggtacctgcgaatccttcgaccaccttcagtgcggcaaagtttgcttccttcatcacacagtactccacgggacaggtcagcgtggagatcgagtgggagctgcagaaggaaaacagcaaacgctggaatcccgaaattcagtacacttccaactacaacaagtctgttaatgtggactttactgtggacactaatggcgtgtattcagagcctcgccccattggcaccagatacctgactcgtaatctgtaa

SEQ ID NO: 3332 - DNA, 2208 bp, Artificial Sequence
  Description of Artificial Sequence: Synthetic polynucleotide
atggctgccgatggttatcttccagattggctcgaggacactctctctgaaggaataagacagtggtggaagctcaaacctggcccaccaccaccaaagcccgcagagcggcataaggacgacagcaggggtcttgtgcttcctgggtacaagtacctcggacccttcaacggactcgacaagggagagccggtcaacgaggcagacgccgcggccctcgagcacgacaaagcctacgaccggcagctcgacagcggagacaacccgtacctcaagtacaaccacgccgacgcggagtttcaggagcgccttaaagaagatacgtcttttgggggcaacctcggacgagcagtcttccaggcgaaaaagagggctcttgaacctctgggcctggttgaggaacctgttaagacggctccgggaaaaaagaggccggtagagcactctcctgtggagccagactcctcctcgggaaccggaaaggcgggccagcagcctgcaagaaaaagattgaattttggtcagactggagacgcagactcagtacctgacccccagcctctcggacagccaccagcagccccctctggtctgggaactaatacgatggctacaggcagtggcgcaccaatggcagacaataacgagggcgccgacggagtgggtaattcctcgggaaattggcattgcgattccacatggatgggcgacagagtcatcaccaccagcacccgaacctgggccctgcccacctacaacaaccacctctacaaacaaatttccagccaatcaggagcctcgaacgacaatcactactttggctacagcaccccttgggggtattttgacttcaacagattccactgccacttttcaccacgtgactggcaaagactcatcaacaacaactggggattccgacccaagagactcaacttcaagctctttaacattcaagtcaaagaggtcacgcagaatgacggtacgacgacgattgccaataaccttaccagcacggttcaggtgtttactgactcggagtaccagctcccgtacgtcctcggctcggcgcatcaaggatgcctcccgccgttcccagcagacgtcttcatggtgccacagtatggatacctcaccctgaacaacgggagtcaggcagtaggacgctcttcattttactgcctggagtactttccttctcagatgctgcgtaccggaaacaactttaccttcagctacacttttgaggacgttcctttccacagcagctacgctcacagccagagtctggaccgtctcatgaatcctctcgtcgaccagtacctgtattacttgagcagaacaaacactccaagtggaaccaccacgcagtcaaggcttcagttttctcaggccggagcgagtgacattcgggaccagtctaggaactggcttcctggaccctgttaccgccagcagcgagtatcaaagacatctgcggataacaacaacagtgaatactcgtggaccggagctaccaagtaccacctcaatggcagagactctctggtgaatccgggcccggccatggcaagccacaaggacgatgaagaaaagttttttcctcagagcggggttctcatctttgggaagcaaggctcagagaaaacaaatgtggacattgaaaaggtcatgattacagacgaagaggaaatcaggacaaccaatcccgtggctacggagcagtatggttctgtatctaccaacctccagagaggcaacagacaagcagctaccgcagatgtcaacacacaaggcgttcttccaggcatggtctggcaggacagagatgtgtaccttcaggggcccatctgggcaaagattccacacacggacggacattttcacccctctcccctcatgggtggattcggacttaaacgccctcctccacagattctcatcaagaacaccccggtacctgcgaatccttcgaccaccttcagtgcggcaaagtttgcttccttcatcacacagtactccacgggacaggtcagcgtggagatcgagtgggagctgcagaaggaaaacagcaaacgctggaatcccgaaattcagtacacttccaactacaacaagtctgttaatgtggactttactgtggacactaatggcgtgtattcagagcctcgccccattggcaccagatacctgactcgtaatctgtaa

SEQ ID NO: 3333 - DNA, 2208 bp, Artificial Sequence
  Description of Artificial Sequence: Synthetic polynucleotide
atggctgccgatggttatcttccagattggctcgaggacactctctctgaaggaataagacagtggtggaagctcaaacctggcccaccaccaccaaagcccgcagagcggcataaggacgacagcaggggtcttgtgcttcctgggtacaagtacctcggacccttcaacggactcgacaagggagagccggtcaacgaggcagacgccgcggccctcgagcacgacaaagcctacgaccggcagctcgacagcggagacaacccgtacctcaagtacaaccacgccgacgcggagtttcaggagcgccttaaagaagatacgtcttttgggggcaacctcggacgagcagtcttccaggcgaaaaagagggttcttgaacctctgggcctggttgaggaacctgttaagacggctccgggaaaaaagaggccggtagagcactctcctgtggagccagactcctcctcgggaaccggaaaggcgggccagcagcctgcaagaaaaagattgaattttggtcagactggagacgcagactcagtacctgacccccagcctctcggacagccaccagcagccccctctggtctgggaactaatacgatggctacaggcagtggcgcaccaatggcagacaataacgagggcgccgacggagtgggtaattcctcgggaaattggcattgcgattccacatggatgggcgacagagtcatcaccaccagcacccgaacctgggccctgcccacctacaacaaccacctctacaaacaaatttccagccaatcaggagcctcgaacgacaatcactactttggctacagcaccccttgggggtattttgacttcaacagattccactgccacttttcaccacgtgactggcaaagactcatcaacaacaactggggattccgacccaagagactcaacttcaagctctttaacattcaagtcaaagaggtcacgcagaatgacggtacgacgacgattgccaataaccttaccagcacggttcaggtgtttactgactcggagtaccagctcccgtacgtcctcggctcggcgcatcaaggatgcctcccgccgttcccagcagacgtcttcatggtgccacagtatggatacctcaccctgaacaacgggagtcaggcagtaggacgctcttcattttactgcctggagtactttccttctcagatgctgcgtaccggaaacaactttaccttcagctacacttttgaggacgttcctttccacagcagctacgctcacagccagagtctggaccgtctcatgaatcctctcatcgaccagtacctgtattacttgagcagaacaaacactccaagtggaaccaccacgcagtcaaggcttcagttttctcaggccggagcgagtgacattcgggaccagtctaggaactggcttcctggaccctgttaccgccagcagcgagtatcaaagacatctgcggataacaacaacagtgaatactcgtggactggagctaccaagtaccacctcaatggcagagactctctggtgaatccgggcccggccatggcaagccacaaggacgatgaagaaaagttttttcctcagagcggggttctcatctttgggaagcaaggctcagagaaaacaaatgtggacattgaaaaggtcatgattacagacgaagaggaaatcaggacaaccaatcccgtggctacggagcagtatggttctgtatctaccaacctccagagaggcaacagacaagcagctaccgcagatgtcaacacacaaggcgttcttccaggcacggtctggcaggacagagatgtgtaccttcaggggcccatctgggcaaagattccacacacggacggacattttcacccctctcccctcatgggtggattcggacttaaacaccctcctccacagattctcatcaagaacaccccggtacctgcgaatccttcgaccaccttcagtgcggcaaagtttgcttccttcatcacacagcactccacgggacaggtcagcgtggagatcgagtgggagctgcagaaggaaaacagcaaacgctggaatcccgaaattcagtacacttccaactacaacaagtctgttaatgtggactttactgtggacactaatggcgtgtattcagagcctcgccccattggcaccagatacctgactcgtaatctgtaa

SEQ ID NO: 3334 - DNA, 2208 bp, Artificial Sequence
  Description of Artificial Sequence: Synthetic polynucleotide
atggctgccgatggttatcttccagattggctcgaggacactctctctgaaggaataagacagtggtggaagctcaaacctggcccaccaccgccaaagcccgcagagcggcataaggacgacagcaggggtcttgtgcttcctgggtacaagtacctcggacccttcaacggactcgacaagggagagccggtcaacgaggcagacgccgcggccctcgagcacgacaaggcctacgaccggcagctcgacagcggagacgacccgtacctcaagtacaaccacgccgacgcggagtttcaggagcgccttaaagaagatacgtcttttgggggcaacctcgcaagagcagtattccaggcgaaaaagagggttcttgaacctctgggcctggttgaggagcctgttaagacggctccgggaaaaaagaggccggtagagcattctcctgcggagccagactcctcctcgggaaccggaaaagcgggccagcagcctgcgagaaagagattgaatttcggtcagactggagacgcagactccgtacctgacccccagcctctcggacagccaccagcagccccctctggtctgggaactaatacgatggctacaggcagtggcgcaccaatggcagacaataacgagggtgccgacggagtgggtaattcctcaggaaattggcattgcgattccacatggatgggcgacagagtcatcaccaccagcacccgcacctgggctctgcccacctacaacaaccatctgtacaagcagatctccagccaatctggagccagcaacgacaaccactactttggctacagcaccccttgggggtattttgacttcaacagattccactgccacttctccccacgtgactggcaaagactcatcaacaacaactggggattccggcccaagagactcagcttcaagctctttaacattcaagtcaaggaggtcacgcagaatgacggtacgacgacgattgccaataaccttaccagcacggttcaggtctttactgactcggagtaccagctcccgtacgtcctcggctcggcgcatcaaggatgcctcccgccgttcccagcagacgtcttcatggtgccacagtatggatacctcaccctgaacaacgggagtcaggcggtaggacgctcttcattttactgcctggagtacttcccttctcagatgcttcgcacgggaaacaactttaccttcagctacacctttgaggacgtgccttttcacagcagctacgctcacagccaaagtctggaccgtctcatgaatcctctcatcgaccagtacctgtattacttgagcaaaacaaacgctccaagcggaaccaccacgatgtccaggcttcagttttctcaggccggagcaagtgacattcgggaccagtctagaaactggcttcctggaccctgttaccgccagcagcgagtatcaaagacagctgcggacaacaacaacagtgattactcgtggactggagctaccaagtaccacctcaatggaagagactctctggtgaacccgggcccagctatggccagccacaaggacgatgaagaaaaatattttcctcagagcggggttctcatcttcgggaaacaaggctcaaataaaactaatgtggacattgaaaaggttatgattacagacgaagaggaaatcaggaccaccaatcccgtggctacggagcagtatggttctgtatctaccaaccttcaaagcggcaacacacaagcagctacctcagatgtcaacacacaaggcgttcttcctggcatggtctggcaggacagagatgtgtacctgcaggggcccatctgggcaaagattccacacacggatggacactttcacccttctcctcttatgggaggatttggactgaagcaccctcccccgcagattctcatcaagaataccccggtacctgcgaatccttcgaccaccttcagtgcggcaaagtttgcttctttcatcacacagtactccacggggcaggtcagcgtggagatcgagtgggagctgcagaaggagaacagcaaacgctggaaccccgagatccagtatacttccaactacaacaaatctgttaatgtggactttactgtggacactaatggtgtgtattcagagcctcgccccattggcaccagatacctgactcgtaatctgtaa

SEQ ID NO: 3335 - DNA, 2208 bp, Artificial Sequence
  Description of Artificial Sequence: Synthetic polynucleotide
atggctgccgatggttatcttccagattggctcgaggacactctctctgaaggaataagacagtggtggaagctcaaacctggcccaccaccaccaaagcccgcagagcggcataaggacgacagcaggggtcttgtgcttcctgggtacaagtacctcggacccttcaacggactcgacaagggagagccggtcaacgaggcagacgccgcggccctcgagcacgacaaagcctacgaccggcagctcgacagcggagacaacccgtacctcaagtacaaccacgccgacgcggagtttcaggagcgccttaaagaagatacgtcttttgggggcaacctcggacgagcagtcttccaggcgaaaaagagggttcttgaacctctgggcctggttgaggaacctgttaagacggctccgggaaaaaagaggccggtagagcactctcctgtggagccagactcctcctcgggaaccggaaaggcgggccagcagcctgcaagaaaaagattgaattttggtcagactggagacgcagactcagtacctgacccccagcctctcggacagccaccagcagccccctctggtctgggaactaatacgatggctacaggcagtggcgcaccaatggcagacaataacgagggcgccgacggagtgggtaattcctcgggaaattggcattgcgattccacatggatgggcgacagagtcatcaccaccagcacccgaacctgggccctgcccacctacaacaaccacctctacaaacaaatttccagccaatcaggagcctcgaacgacaatcactactttggctacagcaccccttgggggtattttgacttcaacagattccactgccacttttcaccacgtgactggcaaagactcatcaacaacaactggggattccgacccaagagactcaacttcaagctctttaacattcaagtcaaagaggtcacgcagaatgacggtacgacgacgattgccaataaccttaccagcacggttcaggtgtttactgactcggagtaccagctcccgtacgtcctcggctcggcgcatcaaggatgcctcccgccgttcccagcagacgtcttcatggtgccacagtatggatacctcaccctgaacaacgggagtcaggcagtaggacgctcttcattttactgcctggagtactttccttctcagatgctgcgtaccggaaacaactttaccttcagctacacttttgaggacgttcctttccacagcagctacgctcacagccagagtctggaccgtctcatgaatcctctcatcgaccagtacctgtattacttgagcagaacaaacactccaagtggaaccaccacgcagccaaggcttcagttttctcaggccggagcgagtgacattcgggaccagtctaggaactggcttcctggaccctgttaccgccagcagcgagtatcaaagacatctgcggataacaacaacagtgaatactcgtggactggagctaccaagtaccacctcaatggcagagactctctggtgaatccgggcccggccatggcaagccacaaggacgatgaagaaaagttttttcctcagagcggggttctcatctttgggaagcaaggctcagagaaaacaaatgtggacattgaaaaggtcatgattacagacgaagaggaaatcaggacaaccaatcccgtggctacggagcagtatggttctgtatctaccaacctccagagaggcaacagacaagcagctaccgcagatgtcaacacacaaggcgttcttccaggcacggtctggcaggacagagatgtgtaccttcaggggcccatctgggcaaagattccacacacggacggacattttcacccctctcccctcatgggtggattcggacttaaacaccctcctccacagattctcatcaagaacaccccggtacctgcgaatccttcgaccaccttcagtgcggcaaagtttgcttccttcatcacacagtactccacgggacaggtcagcgtggagatcgagtgggagctgcagaaggaaaacagcaaacgctggaatcccgaaattcagtacacttccaactacaacaagtctgttaatgtggactttactgtggacactaatggcgtgtattcagagcctcgccccattggcaccagatacctgactcgtaatctgtaa

SEQ ID NO: 3336 - DNA, 2208 bp, Artificial Sequence
  Description of Artificial Sequence: Synthetic polynucleotide
atggctgccgatggttatcttccagattggctcgaggacactctctctgaaggaataagacagtggtggaagctcaaacctggcccaccaccaccaaagcccgcagagcggcataaggacgacagcaggggtcttgtgcttcctgggtacaagtacctcggacccttcaacggactcgacaagggagagccggtcaacgaggcagacgccgcggccctcgagcacgacaaagcctacgaccggcagctcgacagcggagacaacccgtacctcaagtacaaccacgccgacgcggagtttcaggagcgccttaaagaagatacgtcttttgggggcaacctcggacgagcagtcttccaggcgaaaaagagggttcttgaacctctgggcctggttgaggaacctgttaagacggctccgggaaaaaagaggccggtagagcactctcctgtggagccagactcctcctcgggaaccggaaaggcgggccagcagcctgcaagaaaaagattgaattttggtcagactggagacgcagactcagtacctgacccccagcctctcggacagccaccagcagccccctctggtctgggaactaatacgatggctacaggcagtggcgcaccaatggcagacaataacgagggcgccgacggagtgggtaattcctcgggaaattggcattgcgattccacatggatgggcgacagagtcatcaccaccagcacccgaacctgggccctgcccacctacaacaaccacctctacaaacaaatttccagccaatcaggagcctcgaacgacaatcactactttggctacagcaccccttgggggtattttgacttcaacagattccactgccacttttcaccacgtgactggcaaagactcatcaacaacaactggggattccgacccaagagactcaacttcaagctctttaacattcaagtcaaagaggtcacgcagaatgacggtacgacgacgattgccaataaccttaccagcacggttcaggtgtttactgactcggagtaccagctcccgtacgtcctcggctcggcgcatcaaggatgcctcccgccgttcccagcagacgtcttcatggtgccacagtatggatacctcaccctgaacaacgggagtcaggcagtaggacgctcttcattttactgcctggagtactttccttctcagatgctgcgtaccggaaacaactttaccttcagctacacttttgaggacgttcctttccacagcagctacgctcacagccagagtctggaccgtctcatgaatcctctcatcgaccagtacctgtattacttgagcagaacaaacactccaagtggaaccaccacgcagtcaaggcttcagttttctcaggccggagcgagtgacattcgggaccagtctaggaactggcttcctggaccctgttaccgccagcagcgagtatcaaagacatctgcggataacaacaacagtgaatacttgtggactggagctaccaagtaccacctcaatggcagagactctctggtgaatccgggcccggccatggcaagccacaaggacgatgaagaaaagttttttcctcagagcggggttctcatctttgggaagcaaggctcagagaaaacaaatgtggacattgaaaaggtcatgattacagacgaagaggaaatcaggacaaccaatcccgtggctacggagcagtatggttctgtatctaccaacctccagagaggcaacaggcaagcagctaccgcagatgtcaacacacaaggcgttcttccaggcacggtctggcaggacagagatgtgtaccttcaggggcccatctgggcaaagattccacacacggacggacattttcacccctctcccctcatgggtggattcggacttaaacaccctcctccacagattctcatcaagaacaccccggtacctgcgaatccttcgaccaccttcagtgcggcaaagtttgcttccttcatcacacagtactccacgggacaggtcagcgtggagatcgagtgggagctgcagaaggaaaacagcaaacgctggaatcccgaaattcagtacacttccaactacaacaagtctgttaatgtggactttactgtggacactaatggcgtgtattcagagcctcgccccattggcaccagatacctgactcgtaatctgtaa

SEQ ID NO: 3337 - DNA, 2208 bp, Artificial Sequence
  Description of Artificial Sequence: Synthetic polynucleotide
atggctgccgatggttatcttccagattggctcgaggacactctctctgaaggaataagacagtggtggaagctcaaacctggcccaccaccaccaaagcccgcagagcggcataaggacgacagcaggggtcttgtgcttcctgggtacaagtacctcggacccttcaacggactcgacaagggagagccggtcaacgaggcagacgccgcggccctcgagcacgacaaagcctacgaccggcagctcgacagcggagacaacccgtacctcaagtacaaccacgccgacgcggagtttcaggagcgccttaaagaagatacgtcttttgggggcaacctcggacgagcagtcttccaggcgaaaaagagggttcttgaacctctgggcctggttgaggaacctgttaagacggctccgggaaaaaagaggccggtagagcactctcctgtggagccagactcctcctcgggaaccggaaaggcgggccagcagcctgcaagaaaaagattgaattttggtcagactggagacgcagactcagtacctgacccccagcctctcggacagccaccagcagccccctctggtctgggaactaatacgatggctacaggcagtggcgcaccaatggcagacaataacgagggcgccgacggagtgggtaattcctcgggaaattggcattgcgattccacatggatgggcgacagagtcatcaccaccagcacccgaacctgggccctgcccacctacaacaaccacctctacaaacaaatttccagccaatcaggagcctcgaacgacaatcactactttggctacagcaccccttgggggtattttgacttcaacagattccactgccacttttcaccacgtgactggcaaagactcatcaacaacaactggggattccgacccaagagactcaacttcaagccctttaacattcaagtcaaagaggtcacgcagaatgacggtacgacgacgattgccaataaccttaccagcacggttcaggtgtttactgactcggagtaccagctcccgtacgtcctcggctcggcgcatcaaggatgcctcccgccgttcccagcagacgtcttcatggtgccacagtatggatacctcaccctgaacaacgggagtcaggcagtaggacgctcttcattttactgcctggagtactttccttctcagatgctgcgtaccggaaacaactttaccttcagctacacttttgaggacgttcctttccacagcagctacgctcacagccagagtctggaccgtctcatgaatcctctcatcgaccagtacctgtattacttgagcagaacaaacactccaagtggaaccaccacgcagtcaaggcttcagttttctcaggccggagcgagtgacattcgggaccagtctaggaactggcttcctggaccctgttaccgccagcagcgagtatcaaagacatctgcggataacaacaacagtgaatactcgtggactggagctaccaagtaccacctcaatggcagagactctctggtgaatccgggcccggccatggcaagccacaaggacgatgaagaaaagttttttcctcagagcggggttctcatctttgggaagcaaggctcagagaaaacaaatgtggacattgaaaaggtcatgattacagacgaagaggaaatcaggacaaccaatcccgtggctacggagcagtatggttctgtatctaccaacctccagagaggcaacagacaagcagctaccgcagatgtcaacacacaaggcgttcttccaggcacggtctggcaggacagagatgtgtaccttcaggggcccatctgggcaaagattccacacacggacggacattttcacccctctcccctcatgggtggattcggacttaaacaccctcctccacagattctcatcaagaacaccccggtacctgcgaatccttcgaccaccttcagtgcggcaaagtttgcttccttcatcacacagtactccacgggacaggtcagcgtggagatcgagtgggagctgcagaaggaaaacagcaaacgctggaatcccgaaattcagtacacttccaactacaacaagtctgttaatgtggactttactgtggacactaatggcgtgtattcagagcctcgccccattggcaccagatacctgactcgtaatctgtaa

SEQ ID NO: 3338 - DNA, 2208 bp, Artificial Sequence
  Description of Artificial Sequence: Synthetic polynucleotide
atggctgccgatggttatcttccagattggctcgaggacactctctctgaaggaataagacagtggtggaagctcaaacctggcccaccaccaccaaagcccgcagagcggcataaggacgacagcaggggtcttgtgcttcctgggtacaagtacctcggacccttcaacggactcgacaagggagagccggtcaacgaggcagacgccgcggccctcgagcacgacaaagcctacgaccggcagctcgacagcggagacaacccgtacctcaagtacaaccacgccgacgcggagtttcaggagcgccttaaagaagatacgtcttttgggggcaacctcggacgagcagtcttccaggcgaaaaagagggttcttgaacctctgggcctggttgaggaacctgttaagacggctccgggaaaaaagaggccggtagagcactctcctgtggagccagactcctcctcgggaaccggaaaggcgggccagcagcctgcaagaaaaagattgaattttggtcagactggagacgcagactcagtacctgacccccagcctctcggacagccaccagcagccccctctggtctgggaactaatacgatggctacaggcagtggcgcaccaatggcagacaataacgagggcgccgacggagtgggtaattcctcgggaaattggcattgcgattccacatggatgggcgacagagtcatcaccaccagcacccgaacctgggccctgcccacctacaacaaccacctctacaaacaaatttccagccaatcaggagcctcgaacgacaatcactactttggctacagcaccccttgggggtattttgacttcaacagattccactgccacttttcaccacgtgactggcaaagactcatcaacaacaactggggattccgacccaagagactcaacttcaagctctttaacattcaagtcaaagaggtcacgcagaatgacggtacgacgacgattgccaataaccttaccagcacggttcaggtgtttactgactcggagtaccagctcccgtacgtcctcggctcggcgcatcaaggatgcctcccgccgttcccagcagacgtcttcatggtgccacagtatggatacctcaccctgaacaacgggagtcaggcagtaggacgctcttcattttactgcctggagtactttccttctcagatgctgcgtaccggaaacaactttaccttcagctacacttttgaggacgttcctttccacagcagctacgctcacagccagagtctggaccgtctcatgaatcctctcatcgaccagtacccgtattacttgagcagaacaaacactccaagtggaaccaccacgcagtcaaggcttcagttttctcaggccggagcgagtgacattcgggaccagtctaggaactggcttcctggaccctgttaccgccagcagcgagtatcaaagacatctgcggataacaacaacagtgaatactcgtggactggagctaccaagtaccacctcaatggcagagactctctggtgaatccgggcccggccatggcaagccacaaggacgatgaagaaaagttttttcctcagagcggggttctcatctttgggaagcaaggctcagagaaaacaaatgtggacattgaaaaggtcatgattacagacgaagaggaaatcaggacaaccaatcccgtggctacggagcagtatggttctgtatctaccaacctccagagaggcaacagacaagcagctaccgcagatgtcaacacacaaggcgttcttccaggcacggtctggcaggacagagatgtgtaccttcaggggcccatctgggcaaagattccacacacggacggacattttcacccctctcccctcatgggtggattcggacttaaacaccctcctccacagattctcatcaagaacaccccggtacctgcgaatccttcgaccaccttcagtgcggcaaagtttgcttccttcatcacacagtactccacgggacaggtcagcgtggagatcgagtgggagctgcagaaggaaaacagcaaacgctggaatcccgaaattcagtacacttccaactacaacaagtctgttaatgtggactttactgtggacactaatggcgtgtattcagagcctcgccccattggcaccagatacctgactcgtaatctgtaa

SEQ ID NO: 3339 - DNA, 2208 bp, Artificial Sequence
  Description of Artificial Sequence: Synthetic polynucleotide
atggctgccgatggttatcttccagattggctcgaggacactctctctgaaggaataagacagtggtggaagctcaaacctggcccaccaccaccaaagcccgcagagcggcataaggacgacagcaggggtcttgtgcttcctgggtacaagtacctcggacccttcaacggactcgacaagggagagccggtcaacgaggcagacgccgcggccctcgagcacgacaaagcctacgaccggcagctcgacagcggagacaacccgtacctcaagtacaaccacgccgacgcggagtttcaggagcgccttaaagaagatacgtcttttgggggcaacctcggacgagcagtcttccaggcgaaaaagagggctcttgaacctctgggcctggttgaggaacctgttaagacggctccgggaaaaaagaggccggtagagcactctcctgtggagccagactcctcctcgggaaccggaaaggcgggccagcagcctgcaagaaaaagattgaattttggtcagactggagacgcagactcagtacctgacccccagcctctcggacagccaccagcagccccctctggtctgggaactaatacgatggctacaggcagtggcgcaccaatggcagacaataacgagggcgccgacggagtgggtaattcctcgggaaattggcattgcgattccacatggatgggcgacagagtcatcaccaccagcacccgaacctgggccctgcccacctacaacaaccacctctacaaacaaatttccagccaatcaggagcctcgaacgacaatcactactttggctacagcaccccttgggggtattttgacttcaacagattccactgccacttttcaccacgtgactggcaaagactcatcaacaacaactggggattccgacccaagagactcaacttcaagctctttaacattcaagtcaaagaggtcacgcagaatgacggtacgacgacgattgccaataaccttaccagcacggttcaggtgtttactgactcggagtaccagctcccgtacgtcctcggctcggcgcatcaaggatgcctcccgccgttcccagcagacgtcttcatggtgccacagtatggatacctcaccctgaacaacgggagtcaggcagtaggacgctcttcattttactgcctggagtactttccttctcagatgctgcgtaccggaaacaactttaccttcagctacacttttgaggacgttcctttccacagcagctacgctcacagccagagtctggaccgtctcatgaatcctctcatcgaccagtacctgtattacttgagcagaacaaacactccaagtggaaccaccacgcagtcaaggcttcagttttctcaggccggagcgagtgacattcgggaccagtctaggaactggcttcctggaccctgttaccgccagcagcgagtatcaaagacatctgcggataacaacaacagtgaatactcgtggactggagctaccaagtaccacctcaatggcagagactctctggtgaatccgggcccggccatggcaagccacaaggacgatgaagaaaagttttttcctcagagcggggttctcatctttgggaagcaaggctcagagaaaacaaatgtggacattgaaaaggtcatgattacagacgaagaggaaatcaggacaaccaatcccgtggctacggagcagtatggttctgtatctaccaacctccagagaggcaacagacaagcagctaccgcagatgtcaacacacaaggcgttcttccaggcacggtctggcaggacagagatgtgtaccttcaggggcccatctgggcaaagattccacacacggacggacattttcacccctctcccctcatgggtggattcggacttaaacaccctcctccacagattctcatcaagaacaccccggtacctgcgaatccttcgaccaccttcagtgcggcaaagtttgcttccttcatcacacagtactccacgggacaggtcagcgtggagatcgagtgggagctgcagaaggaaaacagcaaacgctggaatcccgaaattcagtacacttccaactacaacaagtctgttaatgtggactttactgtggacactaatggcgtgtattcagagcctcgccccattggcaccagatacctgactcgtaatctgtaa

SEQ ID NO: 3340 - DNA, 2208 bp, Artificial Sequence
  Description of Artificial Sequence: Synthetic polynucleotide
atggctgccgatggttatcttccagattggctcgaggacactctctctgaaggaataagacagtggtggaagctcaaacctggcccaccaccaccaaagcccgcagagcggcataaggacgacagcaggggtcttgtgcttcctgggtacaagtacctcggacccttcaacggactcgacaagggagagccggtcaacgaggcagacgccgcggccctcgagcacgacaaagcctacgaccggcagctcgacagcggagacaacccgtacctcaagtacaaccacgccgacgcggagtttcaggagcgccttaaagaagatacgtcttttgggggcaacctcggacgagcagtcttccaggcgaaaaagagggttcttgaacctctgggcctggttggggaacctgttaagacggctccgggaaaaaagaggccggtagagcactctcctgtggagccagactcctcctcgggaaccggaaaggcgggccagcagcctgcaagaaaaagattgaattttggtcagactggagacgcagactcagtacctgacccccagcctctcggacagccaccagcagccccctctggtctgggaactaatacgatggctacaggcagtggcgcaccaatggcagacaataacgagggcgccgacggagtgggtaattcctcgggaaattggcattgcgattccacatggatgggcgacagagtcatcaccaccagcacccgaacctgggccctgcccacctacaacaaccacctctacaaacaaatttccagccaatcaggagcctcgaacgacaatcactactttggctacagcaccccttgggggtattttgacttcaacagattccactgccacttttcaccacgtgactggcaaagactcatcaacaacaactggggattccgacccaagagactcaacttcaagctctttaacattcaagtcaaagaggtcacgcagaatgacggtacgacgacgattgccaataaccttaccagcacggttcaggtgtttactgactcggagtaccagctcccgtacgtcctcggctcggcgcatcaaggatgcctcccgccgttcccagcagacgtcttcatggtgccacagtatggatacctcaccctgaacaacgggagtcaggcagtaggacgctcttcattttactgcctggagtactttccttctcagatgctgcgtaccggaaacaactttaccttcagctacacttttgaggacgttcctttccacagcagctacgctcacagccagagtctggaccgtctcatgaatcctctcatcgaccagtacctgtattacttgagcagaacaaacactccaagtggaaccaccacgcagtcaaggcttcagttttctcaggccggagcgagtgacattcgggaccagtctaggaactggcttcctggaccctgttaccgccagcagcgagtatcaaagacatctgcggataacaacaacagtgaatactcgtggactggagctaccaagtaccacctcaatggcagagactctctggtgaatccgggcccggccatggcaagccacaaggacgatgaagaaaagttttttcctcagagcggggttctcatctttgggaagcaaggctcagagaaaacaaatgtggacattgaaaaggtcatgattacagacgaagaggaaatcaggacaaccaatcccgtggctacggagcagtatggttctgtatctaccaacctccagagaggcaacagacaagcagctaccgcagatgtcaacacacaaggcgttcttccaggcatggtctggcaggacagagatgtgtaccttcaggggcccatctgggcaaagattccacacacggacggacattttcacccctctcccctcatgggtggattcggacttaaacaccctcctccacagattctcatcaagaacaccccggtacctgcgaatccttcgaccaccttcagtgcggcaaagtttgcttccttcatcacacagtactccacgggacaggtcagcgtggagatcgagtgggagctgcagaaggaaaacagcaaacgctggaatcccgaaattcagtacacttccaactacaacaagtctgttaatgtggactttactgtggacactaatggcgtgtattcagagcctcgccccattggcaccagatacctgactcgtaatctgtaa

SEQ ID NO: 3341 - DNA, 2208 bp, Artificial Sequence
  Description of Artificial Sequence: Synthetic polynucleotide
atggctgccgatggttatcttccagattggctcgaggacactctctctgaaggaataagacagtggtggaagctcaaacctggcccaccaccaccaaagcccgcagagcggcataaggacgacagcaggggtcttgtgcttcctgggtacaagtacctcggacccttcaacggactcgacaagggagagccggtcaacgaggcagacgccgcggccctcgagcacgacaaagcctacgaccggcagcccgacagcggagacaacccgtacctcaagtacaaccacgccgacgcggagtttcaggagcgccttaaagaagatacgtcttttgggggcaacctcggacgagcagtcttccaggcgaaaaagagggttcttgaacctctgggcctggttgaggaacctgttaagacggctccgggaaaaaagaggccggtagagcactctcctgtggagccagactcctcctcgggaaccggaaaggcgggccagcagcctgcaagaaaaagattgaattttggtcagactggagacgcagactcagtacctgacccccagcctctcggacagccaccagcagccccctctggtctgggaactaatacgatggctacaggcagtggcgcaccaatggcagacaataacgagggcgccgacggagtgggtaattcctcgggaaattggcattgcgattccacatggatgggcgacagagtcatcaccaccagcacccgaacctgggccctgcccacctacaacaaccacctctacaaacaaatttccagccaatcaggagcctcgaacgacaatcactactttggctacagcaccccttgggggtattttgacttcaacagattccactgccacttttcaccacgtgactggcaaagactcatcaacaacaactggggattccgacccaagagactcaacttcaagctctttaacattcaagtcaaagaggtcacgcagaatgacggtacgacgacgattgccaataaccttaccagcacggttcaggtgtttactgactcggagtaccagctcccgtacgtcctcggctcggcgcatcaaggatgcctcccgccgttcccagcagacgtcttcatggtgccacagtatggatacctcaccctgaacaacgggagtcaggcagtaggacgctcttcattttactgcctggagtactttccttctcagatgctgcgtaccggaaacaactttaccttcagctacacttttgaggacgttcctttccacagcagctacgctcacagccagagtctggaccgtctcatgaatcctctcatcgaccagtacctgtattacttgagcagaacaaacactccaagtggaaccaccacgcagtcaaggcttcagttttctcaggccggagcgagtgacattcgggaccagtctaggaactggcttcctggaccctgttaccgccagcagcgagtatcaaagacatctgcggataacaacaacagtgaatactcgtggactggagctaccaagtaccacctcaatggcagagactctctggtgaatccgggcccggccatggcaagccacaaggacgatgaagaaaagttttttcctcagagcggggttctcatctttgggaagcaaggctcagagaaaacaaatgtggacattgaaaaggtcatgattacagacgaagaggaaatcaggacaaccaatcccgtggctacggagcagtatggttctgtatctaccaacctccagagaggcaacagacaagcagctaccgcagatgtcaacacacaaggcgttcttccaggcacggtctggcaggacagagatgtgtaccttcaggggcccatctgggcaaagattccacacacggacggacattttcacccctctcccctcatgggtggattcggacttaaacaccctcctccacagattctcatcaagaacaccccggtacctgcgaatccttcgaccaccttcagtgcggcaaagtttgcttccttcatcacacagtactccacgggacaggtcagcgtggagatcgagtgggagctgcagaaggaaaacagcaaacgctggaatcccgaaattcagtacacttccaactacaacaagtctgttaatgtggactttactgtggacactaatggcgtgtattcagagcctcgccccattggcaccagatacctgactcgtaatctgtaa

SEQ ID NO: 3342 - DNA, 2208 bp, Artificial Sequence
  Description of Artificial Sequence: Synthetic polynucleotide
atggctgccgatggttatcttccagattggctcgaggacactctctctgaaggaataagacagtggtggaagctcaaacctggcccaccaccaccaaagcccgcagagcggcataaggacgacagcaggggtcttgtgcttcctgggtacaagtacctcggacccttcaacggactcgacaagggagagccggtcaacgaggcagacgccgcggccctcgagcacgacaaagcctacgaccggcagctcgacagcggagacaacccgtacctcaagtacaaccacgccgacgcggagtttcaggagcgccttaaagaagatacgtcttttgggggcaacctcggacgagcagtcttccaggcgaaaaagagggttcttgaacctctgggcctggttgaggaacctgttaagacggctccgggaaaaaagaggccggtagagcactctcctgtggagccagactcctcctcgggaaccggaaaggcgggccagcagcctgcaagaaaaagattgaattttggtcagactggagacgcagactcagtacctgacccccagcctctcggacagccaccagcagccccctctggtctgggaactaatacgatggctacaggcagtggcgcaccaatggcagacaataacgagggcgccgacggagtgggtaattcctcgggaaattggcattgcgattccacatggatgggcgacagagtcatcaccaccagcacccgaacctgggccctgcccacctacaacaaccacctctacaaacaaatttccagccaatcaggagcctcgaacgacaatcactactttggctacagcaccccttgggggtattttgacttcaacagattccactgccacttttcaccacgtgactggcaaagactcatcaacaacaactggggattccgacccaagagactcaacttcaagctctttaacattcaagtcaaagaggtcacgcagaatgacggtacgacgacgattgccaataaccttaccagcacggttcaggtgtttactgactcggagtaccagctcccgtacgtcctcggctcggcgcatcaaggatgcctcccgccgttcccagcagacgtcttcatggtgccacagtatggatacctcaccctgaacaacgggagtcaggcagtaggacgctcttcattttactgcctggagtactttccttctcagatgctgcgtaccggaaacaactttaccttcagctacacttttgaggacgttcctttccacagcagctacgctcacagccagagtctggaccgtctcatgaatcctctcatcgaccagtacctgtattacttgagcagaacaaacaccccaagtggaaccaccacgcagtcaaggcttcagttttctcaggccggagcgagtgacattcgggaccagtctaggaactggcttcctggaccctgttaccgccagcagcgagtatcaaagacatctgcggataacaacaacagtgaatactcgtggactggagctaccaagtaccacctcaatggcagagactctctggtgaatccgggcccggccatggcaagccacaaggacgatgaagaaaagttttttcctcagagcggggttctcatctttgggaagcaaggctcagagaaaacaaatgtggacattgaaaaggtcatgattacagacgaagaggaaatcaggacaaccaatcccgtggctacggagcagtatggttctgtatctaccaacctccagagaggcaacagacaagcagctaccgcagatgtcaacacacaaggcgttcttccaggcatggtctggcaggacagagatgtgtaccttcaggggcccatctgggcaaagattccacacacggacggacattttcacccctctcccctcatgggtggattcggacttaaacaccctcctccacagattctcatcaagaacaccccggtacctgcgaatccttcgaccaccttcagtgcggcaaagtttgcttcctccatcacacagtactccacgggacaggtcagcgtggagatcgagtgggagctgcagaaggaaaacagcaaacgctggaatcccgaaattcagtacacttccaactacaacaagtctgttaatgtggactttactgtggacactaatggcgtgtattcagagcctcgccccattggcaccagatacctgactcgtaatctgtaa

SEQ ID NO: 3343 - DNA, 2208 bp, Artificial Sequence
  Description of Artificial Sequence: Synthetic polynucleotide
atggctgccgatggttatcttccagattggctcgaggacactctctctgaaggaataagacagtggtggaagctcaaacctggcccaccaccaccaaagcccgcagagcggcataaggacgacagcaggggtcttgtgcttcctgggtacaagtacctcggacccttcaacggactcgacaagggagagccggtcaacgaggcagacgccgcggccctcgagcacgacaaagcctacgaccggcagctcgacagcggagacaacccgtacctcaagtacaaccacgccgacgcggagtttcaggagcgccttaaagaagatacgtcttttgggggcaacctcggacgagcagtcttccaggcgaaaaagagggttcttgaacctctgggcctggttgaggaacctgttaagacggctccgggaaaaaagaggccggtagagcactctcctgtggagccagactcctcctcgggaaccggaaaggcgggccagcagcctgcaagaaaaagattgaattttggtcagactggagacgcagactcagtacctgacccccagcctctcggacagccaccagcagccccctctggtctgggaactaatacgatggctacaggcagtggcgcaccaatggcagacaataacgagggcgccgacggagtgggtaattcctcgggaaattggcattgcgattccacatggatgggcgacagagtcatcaccaccagcacccgaacctgggccctgcccacctacaacaaccacctctacaaacaaatttccagccaatcaggagcctcgaacgacaatcactactttggctacagcaccccttgggggtattttgacctcaacagattccactgccacttttcaccacgtgactggcaaagactcatcaacaacaactggggattccgacccaagagactcaacttcaagctctttaacattcaagtcaaagaggtcacgcagaatgacggtacgacgacgattgccaataaccttaccagcacggttcaggtgtttactgactcggagtaccagctcccgtacgtcctcggctcggcgcatcaaggatgcctcccgccgttcccagcagacgtcttcatggtgccacagtatggatacctcaccctgaacaacgggagtcaggcagtaggacgctcttcattttactgcctggagtactttccttctcagatgctgcgtaccggaaacaactttaccttcagctacacttttgaggacgttcctttccacagcagctacgctcacagccagagtctggaccgtctcatgaatcctctcatcgaccagtacctgtattacttgagcagaacaaacactccaagtggaaccaccacgcagtcaaggcttcagttttctcaggccggagcgagtgacattcgggaccagtctaggaactggcttcctggaccctgttaccgccagcagcgagtatcaaagacatctgcggataacaacaacagtgaatactcgtggactggagctaccaagtaccacctcaatggcagagactctctggtgaatccgggcccggccatggcaagccacaaggacgatgaagaaaagttttttcctcagagcggggttctcatctttgggaagcaaggctcagagaaaacaaatgtggacattgaaaaggtcatgattacagacgaagaggaaatcaggacaaccaatcccgtggctacggagcagtatggttctgtatctaccaacctccagagaggcaacagacaagcagctaccgcagatgtcaacacacaaggcgttcttccaggcacggtctggcaggacagagatgtgtaccttcaggggcccatctgggcaaagattccacacacggacggacattttcacccctctcccctcatgggtggattcggacttaaacaccctcctccacagattctcatcaagaacaccccggtacctgcgaatccttcgaccaccttcagtgcggcaaagtttgcttccttcatcacacagtactccacgggacaggtcagcgtggagatcgagtgggagctgcagaaggaaaacagcaaacgctggaatcccgaaattcagtacacttccaactacaacaagtctgttaatgtggactttactgtggacactaatggcgtgtattcagagcctcgccccattggcaccagatacctgactcgtaatctgtaa

SEQ ID NO: 3344 - DNA, 2208 bp, Artificial Sequence
  Description of Artificial Sequence: Synthetic polynucleotide
atggctgccgatggttatcttccagattggctcgaggacactctctctgaaggaataagacagtggtggaagctcaaacctggcccaccaccaccaaagcccgcagagcggcataaggacgacagcaggggtcttgtgcttcctgggtacaagtacctcggacccttcaacggactcgacaagggagagccggtcaacgaggcagacgccgcggccctcgagcacgacaaagcctacgaccggcagctcgacagcggagacaacccgtacctcaagtacaaccacgccgacgcggagtttcaggagcgccttaaagaagatacgtcttttgggggcaacctcggacgagcagtcttccaggcgaaaaagagggttcttgaacctctgggcctggttgaggaacctgttaagacggctccgggaaaaaagaggccggtagagcactctcctgtggagccagactcctcctcgggaaccggaaaggcgggccagcagcctgcaagaaaaagattgaattttggtcagactggagacgcagactcagtacctgacccccagcctctcggacagccaccagcagccccctctggtctgggaactaatacgatggctacaggcagtggcgcaccaatggcagacaataacgagggcgccgacggagtgggtaattcctcgggaaattggcattgcgattccacatggatgggcgacagagtcatcaccaccagcacccgaacctgggccctgcccacctacaacaaccacctctacaaacaaatttccagccaatcaggagcctcgaacgacaatcgctactttggctacagcaccccttgggggtattttgacttcaacagattccactgccacttttcaccacgtgactggcaaagactcatcaacaacaactggggattccgacccaagagactcaacttcaagctctttaacattcaagtcaaagaggtcacgcagaatgacggtacgacgacgattgccaataaccttaccagcacggttcaggtgtttactgactcggagtaccagctcccgtacgtcctcggctcggcgcatcaaggatgcctcccgccgttcccagcagacgtcttcatggtgccacagtatggatacctcaccctgaacaacgggagtcaggcagtaggacgctcttcattttactgcctggagtactttccttctcagatgctgcgtaccggaaacaactttaccttcagctacacttttgaggacgttcctttccacagcagctacgctcacagccagagtctggaccgtctcatgaatcctctcatcgaccagtacctgtattacttgagcagaacaaacactccaagtggaaccaccacgcagtcaaggcttcagttttctcaggccggagcgagtgacattcgggaccagtctaggaactggcttcctggaccctgttaccgccagcagcgagtatcaaagacatctgcggataacaacaacagtgaatactcgtggactggagctaccaagtaccacctcaatggcagagactctctggtgaatccgggcccggccatggcaagccacaaggacgatgaagaaaagttttttcctcagagcggggttctcatctttgggaagcaaggctcagagaaaacaaatgtggacattgaaaaggtcatgattacagacgaagaggaaatcaggacaaccaatcccgtggctacggagcagtatggttctgtatctaccaacctccagagaggcaacagacaagcagctaccgcagatgtcaacacacaaggcgttcttccaggcacggtctggcaggacagagatgtgtaccttcaggggcccatctgggcaaagattccacacacggacggacattttcacccctctcccctcatgggtggattcggacttaaacaccctcctccacagattctcatcaagaacaccccggtacctgcgaatccttcgaccaccttcagtgcggcaaagtttgcttccttcatcacacagtactccacgggacaggtcagcgtggagatcgagtgggagctgcagaaggaaaacagcaaacgctggaatcccgaaattcagtacacttccaactacaacaagtctgttaatgtggactttactgtggacactaatggcgtgtattcagagcctcgccccattggcaccagatacctgactcgtaatctgtaa

SEQ ID NO: 3345 - DNA, 2208 bp, Artificial Sequence
  Description of Artificial Sequence: Synthetic polynucleotide
atggctgccgatggttatcttccagattggctcgaggacactctctctgaaggaataagacagtggtggaagctcaaacctggcccaccaccaccaaagcccgcagagcggcataaggacgacagcaggggtcttgtgcttcctgggtacaagtacctcggacccttcaacggactcgacaagggagagccggtcaacgaggcagacgccgcggccctcgagcacgacaaagcctacgaccggcagctcgacagcggagacaacccgtacctcaagtacaaccacgccgacgcggagtttcaggagcgccttaaagaagatacgtcttttgggggcaacctcggacgagcagtcttccaggcgaaaaagagggttcttgaacctctgggcctggttgaggaacctgttaagacggctccgggaaaaaagaggccggtagagcactctcctgtggagccagactcctcctcgggaaccggaaaggcgggccagcagcctgcaagaaaaagattgaattttggtcagactggagacgcagactcagtacctgacccccagcctctcggacagccaccagcagccccctctggtctgggaactaatacgatggctacaggcagtggcgcaccaatggcagacaataacgagggcgccgacggagtgggtaattcctcgggaaattggcattgcgattccacatggatgggcgacagagtcatcaccaccagcacccgaacctgggccctgcccacctacaacaaccacctctacaaacaaatttccagccaatcaggagcctcgaacgacaatcactactttggctacagcaccccttgggggtattttgacttcaacagattccactgccacttttcaccacgtgactggcaaagactcatcaacaacaactggggattccgacccaagagactcaacttcaagctctttaacattcaagtcaaagaggtcacgcagaatgacggtacgacgacgattgccaataaccttaccagcacggttcaggtgtttactgactcggagtaccagctcccgtacgtcctcggctcggcgcatcaaggatgcctcccgccgttcccagcagacgtcttcatggtgccacagtatggatacctcaccctgaacaacgggagtcaggcagtaggacgctcttcattttactgcctggagtactttccttctcagatgctgcgtaccggaaacaactttaccttcagctacacttttgaggacgttcctttccacagcagctacgctcacagccagagtctggaccgtctcatgaatcctctcatcgaccagtacctgtattacttgagcagaacaaacactccaagtggaaccaccacgcagtcaaggcttcagttttctcaggccggagcgagtgacattcgggaccagtctaggaactggcttcctggaccctgttaccgccagcagcgagtatcaaagacatctgcggataacaacaacagtgaatactcgtggactggagctaccaagtaccacctcaatggcagagactctctggtgaatccgggcccggccatggcaagccacaaggacgatgaagaaaagttttttcctcagagcggggttctcatctttgggaagcaaggctcagagaaaacaaatgtggacattgaaaaggtcatgattacagacgaagaggaaatcaggacaaccaatcccgtggctacggagcagtatggttctgtatctaccaacctccagagaggcaacagacaagcagctaccgcagatgtcaacacacaaggcgttcttccaggcacggtctggcaggacagagatgtgtaccttcaggggcccatctgggcaaagattccacacacggacggacattttcacccctctcccctcatgggtggattcggacttaaacaccctcctccacagattctcatcaagaacaccccggtacctgcgaatccttcgaccaccttcagtgcggcaaagtttgcttccttcatcacacagtactccacgggacaggtcagcgtggagatcgagtgggagctgcagaaggaaaacagcaaacgctggaatcccgaaattcagtacacttccaactacaacaagtctgctaatgtggactttactgtggacactaatggcgtgtattcagagcctcgccccattggcaccagatacctgactcgtaatctgtaa

SEQ ID NO: 3346 - DNA, 2208 bp, Artificial Sequence
  Description of Artificial Sequence: Synthetic polynucleotide
atggctgccgatggttatcttccagattggctcgaggacactctctctgaaggaataagacagtggtggaagctcaaacctggcccaccaccaccaaagcccgcagagcggcataaggacgacagcaggggtcttgtgcttcctgggtacaagtacctcggacccttcaacggactcgacaagggagagccggtcaacgaggcagacgccgcggccctcgagcacgacaaagcctacgaccggcagctcgacagcggagacaacccgtacctcaagtacaaccacgccgacgcggagtttcaggagcgccttaaagaagatacgtcttttgggggcaacctcggacgagcagtcttccaggcgaaaaagagggttcttgaacctctgggcctggttgaggaacctgttaagacggctccgggaaaaaagaggccggtagagcactctcctgtggagccagactcctcctcgggaaccggaaaggcgggccagcagcctgcaagaaaaagattgaattttggtcagactggagacgcagactcagtacctgacccccagcctctcggacagccaccagcagccccctctggtctgggaactaatacgatggctacaggcagtggcgcaccaatggcaggcaataacgagggcgccgacggagtgggtaattcctcgggaaattggcattgcgattccacatggatgggcgacagagtcatcaccaccagcacccgaacctgggccctgcccacctacaacaaccacctctacaaacaaatttccagccaatcaggagcctcgaacgacaatcactactttggctacagcaccccttgggggtattttgacttcaacagattccactgccacttttcaccacgtgactggcaaagactcatcaacaacaactggggattccgacccaagagactcaacttcaagctctttaacattcaagtcaaagaggtcacgcagaatgacggtacgacgacgattgccaataaccttaccagcacggttcaggtgtttactgactcggagtaccagctcccgtacgtcctcggctcggcgcatcaaggatgcctcccgccgttcccagcagacgtcttcatggtgccacagtatggatacctcaccctgaacaacgggagtcaggcagtaggacgctcttcattttactgcctggagtactttccttctcagatgctgcgtaccggaaacaactttaccttcagctacacttttgaggacgttcctttccacagcagctacgctcacagccagagtctggaccgtctcatgaatcctctcatcgaccagtacctgtattacttgagcagaacaaacactccaagtggaaccaccacgcagtcaaggcttcagttttctcaggccggagcgagtgacattcgggaccagtctaggaactggcttcctggaccctgttaccgccagcagcgagtatcaaagacatctgcggataacaacaacagtgaatactcgtggactggagctaccaagtaccacctcaatggcagagactctctggtgaatccgggcccggccatggcaagccacaaggacgatgaagaaaagttttttcctcagagcggggttctcatctttgggaagcaaggctcagagaaaacaaatgtggacattgaaaaggtcatgattacagacgaagaggaaatcaggacaaccaatcccgtggctacggagcagtatggttctgtatctaccaacctccagagaggcaacagacaagcagctaccgcagatgtcaacacacaaggcgttcttccaggcacggtctggcaggacagagatgtgtaccttcaggggcccatctgggcaaagattccacacacggacggacattttcacccctctcccctcatgggtggattcggacttaaacaccctcctccacagattctcatcaagaacaccccggtacctgcgaatccttcgaccaccttcagtgcggcaaagtttgcttccttcatcacacagtactccacgggacaggtcagcgtggagatcgagtgggagctgcagaaggaaaacagcaaacgctggaatcccgaaattcagtacacttccaactacaacaagtctgttaatgtggactttactgtggacactaatggcgtgtattcagagcctcgccccattggcaccagatacctgactcgtaatctgtaa

SEQ ID NO: 3347 - DNA, 2208 bp, Artificial Sequence
  Description of Artificial Sequence: Synthetic polynucleotide
atggctgccgatggttatcttccagattggctcgaggacactctctctgaaggaataagacagtggtggaagctcaaacctggcccaccaccaccaaagcccgcagagcggcataaggacgacagcaggggtcttgtgcttcctgggtacaagtacctcggacccttcaacggactcgacaagggagagccggtcaacgaggcagacgccgcggccctcgagcacgacaaagcctacaaccggcagctcgacagcggagacaacccgtacctcaagtacaaccacgccgacgcggagtttcaggagcgccttaaagaagatacgtcttttgggggcaacctcggacgagcagtcttccaggcgaaaaagagggttcttgaacctctgggcctggttgaggaacctgttaagacggctccgggaaaaaagaggccggtagagcactctcctgtggagccagactcctcctcgggaaccggaaaggcgggccagcagcctgcaagaaaaagattgaattttggtcagactggagacgcagactcagtacctgacccccagcctctcggacagccaccagcagccccctctggtctgggaactaatacgatggctacaggcagtggcgcaccaatggcagacaataacgagggcgccgacggagtgggtaattcctcgggaaattggcattgcgattccacatggatgggcgacagagtcatcaccaccagcacccgaacctgggccctgcccacctacaacaaccacctctacaaacaaatttccagccaatcaggagcctcgaacgacaatcactactttggctacagcaccccttgggggtattttgacttcaacagattccactgccacttttcaccacgtgactggcaaagactcatcaacaacaactggggattccgacccaagagactcaacttcaagctctttaacattcaagtcaaagaggtcacgcagaatgacggtacgacgacgattgccaataaccttaccagcacggttcaggtgtttactgactcggagtaccagctcccgtacgtcctcggctcggcgcatcaaggatgcctcccgccgctcccagcagacgtcttcatggtgccacagtatggatacctcaccctgaacaacgggagtcaggcagtaggacgctcttcattttactgcctggagtactttccttctcagatgctgcgtaccggaaacaactttaccttcagctacacttttgaggacgttcctttccacagcagctacgctcacagccagagtctggaccgtctcatgaatcctctcatcgaccagtacctgtattacttgagcagaacaaacactccaagtggaaccaccacgcagtcaaggcttcagttttctcaggccggagcgagtgacattcgggaccagtctaggaactggcttcctggaccctgttaccgccagcagcgagtatcaaagacatctgcggataacaacaacagtgaatactcgtggactggagctaccaagtaccacctcaatggcagggactctctggtgaatccgggcccggccatggcaagccacaaggacgatgaagaaaagttttttcctcagagcggggttctcatctttgggaagcaaggctcagagaaaacaaatgtggacattgaaaaggtcatgattacagacgaagaggaaatcaggacaaccaatcccgtggctacggagcagtatggttctgtatctaccaacctccagagaggcaacagacaagcagctaccgcagatgtcaacacacaaggcgttcttccaggcatggtctggcaggacagagatgtgtaccttcaggggcccatctgggcaaagattccacacacggacggacattttcacccctctcccctcatgggtggattcggacttaaacaccctcctccacagattctcatcaagaacaccccggtacctgcgaatccttcgaccaccttcagtgcggcaaagtttgcttccttcatcacacagtactccacgggacaggtcagcgtggagatcgagtgggagctgcagaaggaaaacagcaaacgctggaatcccgaaattcagtacacttccaactacaacaagtctgttaatgtggactttactgtggacactaatggcgtgtattcagagcctcgccccattggcaccagatacctgactcgtaatctgtaa

SEQ ID NO: 3348 - DNA, 2208 bp, Artificial Sequence
  Description of Artificial Sequence: Synthetic polynucleotide
atggctgccgatggttatcttccagattggctcgaggacactctctctgaaggaataagacagtggtggaagctcaaacctggcccaccaccgccaaagcccgcagagcggcataaggacgacagcaggggtcttgtgcttcctgggtacaagtacctcggacccttcaacggactcgacaagggagagccggtcaacgaggcagacgccgcggccctcgagcacgacaaggcctacgaccggcagctcgacagcggagacaacccgtacctcaagtacaaccacgccgacgcggagtttcaggagcgccttaaagaagatacgtcttttgggggcaacctcgcaagagcagtattccaggcgaaaaagagggttcttgaacctctgggcctggttgaggagcctgttaagacggctccgggaaaaaagaggccggtagagcattctcctgcggagccagactcctcctcgggaaccggaaaagcgggccagcagcctgcgagaaagagattgaatttcggtcagactggagacgcagactccgtacctgacccccagcctctcggacagccaccagcagccccctctggtctgggaactaatacgatggctacaggcagtggcgcaccaatggcagacaataacgagggtgccgacggagtgggtaattcctcaggaaattggcattgcgattccacatggatgggcgacagagtcatcaccaccagcacccgcacctgggctctgcccacctacaacaaccatctgtacaagcagatctccagccaatctggagccagcaacgacaaccactactttggctacagcaccccttgggggtattttgacttcaacagattccactgccacttctccccacgtgactggcaaagactcatcaacaacaactggggattccggcccaagagactcagcttcaagctctttaacattcaagtcaaggaggtcacgcagaatgacggtgcgacgacgattgccaataaccttaccagcacggttcaggtctttactgactcggagtaccagctcccgtacgtcctcggctcggcgcatcaaggatgcctcccgccgttcccagcagacgtcttcatggtgccacagtatggatacctcaccctgaacaacgggagtcaggcggtaggacgctcttcattttactgcctggagtacttcccttctcagatgcttcgcacgggaaacaactttaccttcagctacacctttgaggacgtgccttttcacagcagctacgctcacagccaaagtctggaccgtctcatgaatcctctcatcgaccagtacctgtattacttgagcaaaacaaacgctccaagcggaaccaccacgatgtccaggcttcagttttctcaggccggagcaagtgacattcgggaccagtctagaaactggcttcctggaccctgttaccgccagcagcgagtatcaaagacagctgcggacaacaacaacagtgattactcgtggactggagctaccaagtaccacctcaatggaagagactctctggtgaacccgggcccagctatggccagccacaaggacgatgaagaaaaatattttcctcagagcggggttctcatcttcgggaaacaaggctcaaataaaactaatgtggacattgaaaaggttatgattacagacgaagaggaaatcaggaccaccaatcccgtggctacggagcagtatggttctgtatctaccaaccttcaaagcggcaacacacaagcagctacctcagatgtcaacacacaaggcgttcttcctggcatggtctggcaggacagagatgtgtacctgcaggggcccatctgggcaaagattccacacacggatggacactttcacccttctcctcttatgggaggatttggactgaagcaccctcccccgcagattctcatcaagaataccccggtacctgcgaatccttcgaccaccttcagtgcggcaaagtttgcttctttcatcacacagtactccacggggcaggtcagcgtggagatcgagtgggagctgcagaaggagaacagcaaacgctggaaccccgagatccagtatacttccaactacaacaaatctgttaatgtggactttactgtggacactaatggtgtgtattcagagcctcgccccattggcaccagatacctgactcgtaatctgtaa

SEQ ID NO: 3349 - DNA, 2205 bp, Artificial Sequence
  Description of Artificial Sequence: Synthetic polynucleotide
atggctgccgatggttatcttccagattggctcgaggacactctctctgaaggaataagacagtggtggaagctcaaacctggcccaccaccaaagcccgcagagcggcataaggacgacagcaggggtcttgtgcttcctgggtacaagtacctcggacccttcaacggactcgacaagggagagccggtcaacgaggcagacgccgcggccctcgagcacgacaaagcctacgaccggcagctcgacagcggagacaacccgtacctcaagtacaaccacgccgacgcggagtttcaggagcgccttaaagaagatacgtcttttgggggcaacctcggacgagcagtcttccaggcgaaaaagagggctcttgaacctctgggcctggttgaggaacctgttaagacggctccgggaaaaaagaggccggtagagcactctcctgtggagccagactcctcctcgggaaccggaaaggcgggccagcagcctgcaagaaaaagattgaattttggtcagactggagacgcagactcagtacctgacccccagcctctcggacagccaccagcagccccctctggtctgggaactaatacgatggctacaggcagtggcgcaccaatggcagacaataacgagggcgccgacggagtgggtaattcctcgggaaattggcattgcgattccacatggatgggcgacagagtcatcaccaccagcacccgaacctgggccctgcccacctacaacaaccacctctacaaacaaatttccagccaatcaggagcctcgaacgacaatcactactttggctacagcaccccttgggggtattttgacttcaacagattccactgccacttttcaccacgtgactggcaaagactcatcaacaacaactggggattccgacccaagagactcaacttcaagctctttaacattcaagtcaaagaggtcacgcagaatgacggtacgacgacgattgccaataaccttaccagcacggttcaggtgtttactgactcggagtaccagctcccgtacgtcctcggctcggcgcatcaaggatgcctcccgccgttcccagcagacgtcttcatggtgccacagtatggatacctcaccctgaacaacgggagtcaggcagtaggacgctcttcattttactgcctggagtactttccttctcagatgctgcgtaccggaaacaactttaccttcagctacacttttgaggacgttcctttccacagcagctacgctcacagccagagtctggaccgtctcatgaatcctctcatcgaccagtacctgtattacttgagcagaacaaacactccaagtggaaccaccacgcagtcaaggcttcagttttctcaggccggagcgagtgacattcgggaccagtctaggaactggcttcctggaccctgttaccgccagcagcgagtatcaaagacatctgcggataacaacaacagtgaatactcgtggactggagctaccaagtaccacctcaatggcagagactctctggtgaatccgggcccggccatggcaagccacaaggacgatgaagaaaagttttttcctcagagcggggttctcatctttgggaagcaaggctcagagaaaacaaatgtggacattgaaaaggtcatgattacagacgaagaggaaatcaggacaaccaatcccgtggctacggagcagtatggttctgtatctaccaacctccagagaggcaacagacaagcagctaccgcagatgtcaacacacaaggcgttcttccaggcatggtctggcaggacagagatgtgtaccttcaggggcccatctgggcaaagattccacacacggacggacattttcacccctctcccctcatgggtggattcggacttaaacaccctcctccacagattctcatcaagaacaccccggtacctgcgaatccttcgaccaccttcagtgcggcaaagtttgcttccttcatcacacagtactccacgggacaggtcagcgtggagatcgagtgggagctgcagaaggaaaacagcaaacgctggaatcccgaaattcagtacacttccaactacaacaagtctgttaatgtggactttactgtggacactaatggcgtgtattcagagcctcgccccattggcaccagatacctgactcgtaatctgtaa

SEQ ID NO: 3350 - DNA, 2208 bp, Artificial Sequence
  Description of Artificial Sequence: Synthetic polynucleotide
atggctgccgatggttatcttccagattggctcgaggacactctctctgaaggaataagacagtggtggaagctcaaacctggcccaccaccgccaaagcccgcagagcggcataaggacgacagcaggggtcttgtgcttcctgggtacaagtacctcggacccttcaacggactcgacaagggagagccggtcaacgaggcagacgccgcggccctcgagcacgacaaggcctacgaccggcagctcgacagcggagacaacccgtacctcaagtacaaccacgccgacgcggagtttcaggagcgccttaaagaagatacgtcttttgggggcaacctcgcaagagcagtattccaggcgaaaaagagggttcttgaacctctgggcctggttgaggagcctgttaagacggctccgggaaaaaagaggccggtagagcattctcctgcggagccagactcctcctcgggaaccggaaaagcgggccagcagcctgcgagaaagagattgaatttcggtcagactggagacgcagactccgtacctgacccccagcctctcggacagccaccagcagccccctctggtctgggaactaatacgatggctacaggcagtggcgcaccaatggcagacaataacgagggtgccgacggagtgggtaattcctcaggaaattggcattgcgattccacatggatgggcgacagagtcatcaccaccagcacccgcacctgggctctgcccacctacaacaaccatctgtacaagcagatctccagccaatctggagccagcaacgacaaccactactttggctacagcaccccttgggggtattttgacttcaacagattccactgccacttctccccacgtgactggcaaagactcatcaacaacaactggggattccggcccaagagactcagcttcaagctctttaacattcaagtcaaggaggtcacgcagaatgacggtacgacgacgattgccaataaccttaccagcacggttcaggtctttactgactcggagtaccagctcccgtacgtcctcggctcggcgcatcaaggatgcctcccgccgttcccagcagacgtcttcatggtgccacagtatggatacctcaccctgaacaacgggagtcaggcggtaggacgctcttcattttactgcctggagtacttcccttctcagatgcttcgcacgggaaacaactttaccttcagctacacctttgaggacgtgccttttcacagcagctacgctcacagccaaagtctggaccgtctcatgaatcctctcatcgaccagtacctgtattacttgagcaaaacaaacgctccaagcggaaccaccacgatgtccaggcttcagttttctcaggccggagcaagtgacattcgggaccagtctagaaactggcttcctggaccctgttaccgccagcagcgagtatcaaagacagctgcggacaacaacaacagtgattactcgtggactggagctaccaagtaccacctcaatggaagagactctctggtgaacccgggcccagctatggccagccacaaggacgatgaagaaaaatattttcctcagagcggggttctcatcttcgggaaacaaggctcaaataaaactaatgtggacattgaaaaggttatgattacagacgaagaggaaatcaggaccaccaatcccgtggctacggagcagtatggttctgtatctaccaaccttcaaagcggcaacacacaagcagctacctcagatgtcaacacacaaggcgttcttcctggcatggtctggcaggacagagatgtgtacctgcaggggcccatctgggcaaagattccacacacggatggacactttcacccttctcctcttatgggaggatttggactgaagcaccctcccccgcagattctcatcaagaataccccggtacctgcgaatccttcgaccaccttcagtgcggcaaagtttgcttctttcatcacacagtactccacggggcaggtcagcgtggagatcgagtgggagctgcagaaggagaacggcaaacgctggaaccccgagatccagtatacttccaactacaacaaatctgttaatgtggactttactgtggacactaatggtgtgtattcagagcctcgccccattggcaccagatacctgactcgtaatctgtaa

SEQ ID NO: 3351 - DNA, 2208 bp, Artificial Sequence
  Description of Artificial Sequence: Synthetic polynucleotide
atggctgccgatggttatcttccagattggctcgaggacactctctctgaaggaataagacagtggtggaagctcaaacctggcccaccaccaccaaagcccgcagagcggcataaggacgacagcaggggtcttgtgcttcctgggtacaagtacctcggacccttcaacggactcgacaagggagagccggtcaacgaggcagacgccgcggccctcgagcacgacaaagcctacgaccggcagctcgacagcggagacaacccgtacctcaagtacaaccacgccgacgcggagtttcaggagcgccttaaagaagatacgtcttttgggggcaacctcggacgagcagtcttccaggcgaaaaagagggttcttgaacctctgggcctggttgaggaacctgttaagacggctccgggaaaaaagaggccggtagagcactctcctgtggagccagactcctcctcgggaaccggaaaggcgggccagcagcctgcaagaaaaagattgaattttggtcagactggagacgcagactcagtacctgacccccagcctctcggacagccaccagcagccccctctggtctgggaactaatacgatggctacaggcagtggcgcaccaatggcagacaataacgagggcgccgacggagtgggtaattcctcgggaaattggcattgcgattccacatggatgggcgacagagtcatcaccaccagcacccgaacctgggccctgcccacctacaacaaccacctctacaaacaaatttccagccaatcaggggcctcgaacgacaatcactactttggctacagcaccccttgggggtattttgacttcaacagattccactgccacttttcaccacgtgactggcaaagactcatcaacaacaactggggattccgacccaagagactcaacttcaagctctttaacattcaagtcaaagaggtcacgcagaatgacggtacgacgacgattgccaataaccttaccagcacggttcaggtgtttactgactcggagtaccagctcccgtacgtcctcggctcggcgcatcaaggatgcctcccgccgttcccagcagacgtcttcatggtgccacagtatggatacctcaccctgaacaacgggagtcaggcagtaggacgctcttcattttactgcctggagtactttccttctcagatgctgcgtaccggaaacaactttaccttcagctacacttttgaggacgttcctttccacagcagctacgctcacagccagagtctggaccgtctcatgaatcctctcattgaccagtacctgtattacttgagcagaacaaacactccaagtggaaccaccacgcagtcaaggcttcagttttctcaggccggagcgagtgacattcgggaccagtctaggaactggcttcctagaccctgttaccgccagcagcgagtatcaaagacatctgcggataacaacaacagtgaatactcgtggactggagctaccaagtaccacctcaatggcagagactctctggtgaatccgggcccggccatggcaagccacaaggacgatgaagaaaagttttttcctcagagcggggttctcatctttgggaagcaaggctcagagaaaacaaatgtggacattgaaaaggtcatgattacagacgaagaggaaatcaggacaaccaatcccgtggctacggagcagtatggttctgtatctaccaacctccagagaggcaacagacaagcagctaccgcagatgtcaacacacaaggcgttcttccaggcacggtctggcaggacagagatgtgtaccttcaggggcccatctgggcaaagattccacacacggacggacattttcacccctctcccctcatgggtggattcggacttaaacaccctcctccacagattctcatcaagaacaccccggtacctgcgaatccttcgaccaccttcagtgcggcaaagtttgcttccttcatcacacagtactccacgggacaggtcagcgtggagatcgagtgggagctgcagaaggaaaacagcaaacgctggaatcccgaaattcagtacacttccaactacaacaagtctgttaatgtggactttactgtggacactaatggcgtgtattcagagcctcgccccattggcaccagatacctgactcgtaatctgtaa

SEQ ID NO: 3352 - DNA, 2208 bp, Artificial Sequence
  Description of Artificial Sequence: Synthetic polynucleotide
atggctgccgatggttatcttccagattggctcgaggacactctctctgaaggaataagacagtggtggaagctcaaacctggcccaccaccaccaaagcccgcagagcggcataaggacgacagcaggggtcttgtgcttcctgggtacaagtacctcggacccttcaacggactcgacaagggagagccggtcaacgaggcagacgccgcggccctcgagcacgacaaagcctacgaccggcagctcgacagcggagacaacccgtacctcaagtacaaccacgccgacgcggagtttcaggagcgccttaaagaagatacgtcttttgggggcaacctcggacgagcagtcttccaggcgaaaaagagggctcttgaacctctgggcctggttgaggaacctgttaagacggctccgggaaaaaagaggccggtagagcactctcctgtggagccagactcctcctcgggaaccggaaaggcgggccagcagcctgcaagaaaaagattgaattttggtcagactggagacgcagactcagtacctgacccccagcctctcggacagccaccagcagccccctctggtctgggaactaatacgatggctacaggcagtggcgcaccaatggcagacaataacgagggcgccgacggagtgggtaattcctcgggaaattggcattgcgattccacatggatgggcgacagagtcatcaccaccagcacccgaacctgggccctgcccacctacaacaaccacctctacaaacaaatttccagccaatcaggagcctcgaacgacaatcactactttggctacagcaccccttgggggtattttgacttcaacagattccactgccacttttcaccacgtgactggcaaagactcatcaacaacaactggggattccgacccaagagactcaacttcaagctctttaacattcaagtcaaagaggtcacgcagaatgacggtacgacgacgattgccaataaccttaccagcacggttcaggtgtttactgactcggagtaccagctcccgtacgtcctcggctcggcgcatcaaggatgcctcccgccgttcccagcagacgtcttcatggtgccacagtatggatacctcaccctgaacaacgggagtcaggcagtaggacgctcttcattttactgcctggagtactttccttctcagatgctgcgtaccggaaacaactttaccttcagctacacttttgaggacgttcctttccacagcagctacgctcacagccagagtctggaccgtctcatgaatcctctcatcgaccagtacctgtattacttgagcagaacaaacactccaagtggaaccaccacgcagtcaaggcttcagttttctcaggccggagcgagtgacattcgggaccagtctaggaactggcttcctggaccctgttaccgccagcagcgagtatcaaagacatctgcggataacaacaacagtgaatactcgtggactggagctaccaagtaccacctcaatggcagagactctctggtgaatccgggcccggccatggcaagccacaaggacgatgaagaaaagttttttcctcagagcggggttctcatctttgggaagcaaggctcagaggaaacaaatgtggacattgaaaaggtcatgattacagacgaagaggaaatcaggacaaccaatcccgtggctacggagcagtatggttctgtatctaccaacctccagagaggcaacagacaagcagctaccgcagatgtcaacacacaaggcgttcttccaggcatggtctggcaggacagagatgtgtaccttcaggggcccatctgggcaaagattccacacacggacggacattttcacccctctcccctcatgggtggattcggacttaaacaccctcctccacagattctcatcaagaacaccccggtacctgcgaatccttcgaccaccttcagtgcggcaaagtttgcttccttcatcacacagtactccacgggacaggtcagcgtggagatcgagtgggagctgcagaaggaaaacagcaaacgctggaatcccgaaattcagtacacttccaactacaacaagtctgttaatgtggactttactgtggacactaatggcgtgtattcagagcctcgccccattggcaccagatacctgactcgtaatctgtaa

SEQ ID NO: 3353 - DNA, 2208 bp, Artificial Sequence
  Description of Artificial Sequence: Synthetic polynucleotide
atggctgccgatggttatcttccagattggctcgaggacaccctctctgaaggaataagacagtggtggaagctcaaacctggcccaccaccaccgaagcccgcagagcggcataaggacgacagcaggggtcttgtgcttcctgggtacaagtacctcggacccttcaacggactcgacaagggagagccggccaacgaggcagacgccgcggccctcgagcacgacaaagcctacgaccggcagctcgacagcggagacaacccgtacctcaagtacaaccacgccgacgcggagtttcaggagcgccttaaagaagatacgtcttttgggggcaacctcggacgagcagtcttccaggcgaaaaagagggttcttgaacctctgggcctggttgaggaacctgttaagacggctccgggaaaaaagaggccggtagagcactctcctgtggagccagactcctcctcgggaaccggaaaggcgggccagcagcctgcaagaaaaagattgaattttggtcagactggagacgcagactcagtacctgacccccagcctctcggacagccaccagcagccccctctggtctgggaactaatacgatggctacaggcagtggcgcaccaatggcagacaataacgagggcgccgacggagtgggtaattcctcgggaaattggcattgcgattccacatggatgggcgacagagtcatcaccaccagcacccgaacctgggccctgcccacctacaacaaccacctctacaaacaaatttccagccaatcaggagcctcgaacgacaatcactactttggctacagcaccccttgggggtattttgacttcaacagattccactgccacttttcaccacgtgactggcaaagactcatcaacaacaactggggattccgacccaagagactcaacttcaagctctttaacattcaagtcaaagaggtcacgcagaatgacggtacgacgacgattgccaataaccttaccagcacggttcaggtgtttactgactcggagtaccagctcccgtacgtcctcggctcggcgcatcaaggatgcctcccgccgttcccagcagacgtcttcatggtgccacagtatggatacctcaccctgaacaacgggagtcaggcagtaggacgctcttcattttactgcctggagtactttccttctcagatgctgcgtaccggaaacaactttaccttcagctacacttttgaggacgttcctttccacagcagctacgctcacagccagagtctggaccgtctcatgaatcctctcatcgaccagtacctgtattacttgagcagaacaaacactccaagtggaaccaccacgcagtcaaggcttcagttttctcaggccggagcgagtgacattcgggaccagtctaggaactggcttcctggaccctgttaccgccagcagcgagtatcaaagacatctgcggataacaacaacagtgaatactcgtggactggagctaccaagtaccacctcaatggcagagactctctggtgaatccgggcccggccatggcaagccacaaggacgatgaagaaaagttttttcctcagagcggggttctcatctttgggaagcaaggctcagagaaaacaaatgtggacattgaaaaggtcatgattacagacgaagaggaaatcaggacaaccaatcccgtggctacggagcagtatggttctgtatctaccaacctccagagaggcaacagacaagcagctaccgcagatgtcaacacacaaggcgttcttccaggcacggtctggcaggacagagatgtgtaccttcaggggcccatctgggcaaagattccacacacggacggacattttcacccctctcccctcatgggtggattcggacttaaacaccctcctccacagattctcatcaagaacaccccggtacctgcgaatccttcgaccaccttcagtgcggcaaagtttgcttccttcatcacacagtactccacgggacaggtcagcgtggagatcgagtgggagctgcagaaggaaaacagcaaacgctggaatcccgaaattcagtacacttccaactacaacaagtctgttaatgtggactttactgtggacactaatggcgtgtattcagagcctcgccccattggcaccagatacctgactcgtaatctgtaa

SEQ ID NO: 3354 - DNA, 2208 bp, Artificial Sequence
  Description of Artificial Sequence: Synthetic polynucleotide
atggctgccgatggttatcttccagattggctcgaggacactctctctgaaggaataagacagtggtggaagctcaaacctggcccaccaccaccaaagcccgcagagcggcataaggacgacagcaggggtcttgtgcttcctgggtacaagtacctcggacccttcaacggactcgacaagggagagccggtcaacgaggcagacgccgcggccctcgagcacgacaaagcctacgaccggcagctcgacagcggagacaacccgtacctcaagtacaaccacgccgacgcggagtttcaggagcgccttaaagaagatacgtcttttgggggcaacctcggacgagcagtcttccaggcgaaaaagagggttcttgaacctctgggcctggttgaggaacctgttaagacggctccgggaaaaaagaggccggtagagcactctcctgtggagccagactcctcctcgggaaccggaaaggcgggccagcagcctgcaagaaaaagattgaattttggtcagactggagacgcagactcagtacctgacccccagcctctcggacagccaccagcagccccctctggtctgggaactaatacgatggctacaggcagtggcgcaccaatggcagacaataacgagggcgccgacggagtgggtaattcctcgggaaattggcattgcgattccacatggatgggcgacagagtcatcaccaccagcacccgaacctgggccctgcccacctacaacaaccacctctacaaacaaatttccagccaatcaggagcctcgaacgacaatcactactttggctacagcaccccttgggggtattttgacttcaacagattccactgccacttttcaccacgtgactggcaaagactcatcaacaacaactggggattccgacccaagagactcaacttcaagctctttaacattcaagtcaaagaggtcacgcagaatgacggtacgacgacgattgccaataaccttaccagcacggttcaggtgtttactgactcggagtaccagctcccgtacgtcctcggctcggcgcatcaaggatgcctcccgccgttcccagcagacgtcttcatggtgccacagtatggatacctcaccctgaacaacgggagtcaggcagtaggacgctcttcattttactgcctggagtactttccttctcagatgctgcgtaccggaaacaactttaccttcagctacacttttgaggacgttcctttccacagcagctacgctcacagccagagtctggaccgtctcatgaatcctctcatcgaccagtacctgtattacttgagcagaacaaacactccaagtggaaccaccacgcagtcaaggcttcagttttctcaggccggagcgagtgacattcgggaccagtctaggaactggcttcctggaccctgttaccgccagcagcgagtatcaaagacatctgcggataacaacaacagtgaatactcgtggactggagctaccaagtaccacctcaatggcagagactctctggtgaatccgggcccggccatggcaagccacaaggacgatgaagaaaagttttttcctcagagcggggttctcatctttgggaagcaaggctcagagaaaacaaatgtggacattgaaaaggtcatggttacagacgaagaggaaatcaggacaaccaatcccgtggctacggagcagtatggttctgtatctaccaacctccagagaggcaacagacaagcagctaccgcagatgtcaacacacaaggcgttcttccaggcacggtctggcaggacagagatgtgtaccttcaggggcccatctgggcaaagattccacacacggacggacattttcacccctctcccctcatgggtggattcggacttaaacaccctcctccacagattctcatcaagaacaccccggtacctgcgaatccttcgaccaccttcagtgcggcaaagtttgcttccttcatcacacagtactccacgggacaggtcagcgtggagatcgagtgggagctgcagaaggaaaacagcaaacgctggaatcccgaaattcagtacacttccaactacaacaagtctgttaatgtggactttactgtggacactaatggcgtgtattcagagcctcgccccattggcaccagatacctgactcgtaatctgtaa

SEQ ID NO: 3355 - DNA, 2208 bp, Artificial Sequence
  Description of Artificial Sequence: Synthetic polynucleotide
atggctgccgatggttatcttccagattggctcgaggacactctctctgaaggaataagacagtggtggaagctcaaacctggcccaccaccaccaaagcccgcagagcggcataaggacgacagcaggggtcttgtgcttcctgggtacaagtacctcggacccttcaacggactcgacaagggagagccggtcaacgaggcagacgccgcggccctcgagcacgacaaagcctacgaccggcagctcgacagcggagacaacccgtacctcaagtacaaccacgccgacgcggagtttcaggagcgccttaaagaagatacgtcttttgggggcaacctcggacgagcagtcttccaggcgaaaaagagggttcttgaacctctgggcctggttgaggaacctgttaagacggctccgggaaaaaagaggccggtagagcactctcctgtggagccagactcctcctcgggaaccggaaaggcgggccagcagcctgcaagaaaaagattgaattttggtcagactggagacgcagactcagtacctgacccccagcctctcggacagccaccagcagccccctctggtctgggaactaatacgatggctacaggcagtggcgcaccaatggcagacaataacgagggcgccgacggagtgggtaattcctcgggaaattggcattgcgattccacatggatgggcgacagagtcatcaccaccagcacccgaacctgggccctgcccacctacaacaaccacctctacaaacaaatttccagccaatcaggagcctcgaacgacaatcactactttggctacagcaccccttgggggtattttgacttcaacagattccactgccacttttcaccacgtgactggcaaagactcatcaacaacaactggggattccgacccaagagactcaacttcaagctctttaacattcaagtcaaagaggtcacgcagaatgacggtacgacgacgattgccaataaccttaccagcacggttcaggtgtttactgactcggagtaccagctcccgtacgtcctcggctcggcgcatcaaggatgcctcccgccgttcccagcagacgtcttcatggcgccacagtatggatacctcaccctgaacaacgggagtcaggcagtaggacgctcttcattttactgcctggagtactttccttctcagatgctgcgtaccggaaacaactttaccttcagctacacttttgaggacgttcctttccacagcagctacgctcacagccagagtctggaccgtctcatgaatcctctcatcgaccagtacctgtattacttgagcagaacaaacactccaagtggaaccaccacgcagtcaaggcttcagttttctcaggccggagcgagtgacattcgggaccagtctaggaactggcttcctggaccctgttaccgccagcagcgagtatcaaagacatctgcggataacaacaacagtgaatactcgtggactggagctaccaagtaccacctcaatggcagagactctctggtgaatccgggcccggccatggcaagccacaaggacgatgaagaaaagttttttcctcagagcggggttctcatctttgggaagcaaggctcagagaaaacaaatgtggacattgaaaaggtcatgattacagacgaagaggaaatcaggacaaccaatcccgtggctacggagcagtatggttctgtatctaccaacctccagagaggcaacagacaagcagctaccgcagatgtcaacacacaaggcgttcttccaggcacggtctggcaggacagagatgtgtaccttcaggggcccatctgggcaaagattccacacacggacggacattttcacccctctcccctcatgggtggattcggacttaaacaccctcctccacagattctcatcaagaacaccccggtacctgcgaatccttcgaccaccttcagtgcggcaaagtttgcttccttcatcacacagtactccacgggacaggtcagcgtggagatcgagtgggagctgcagaaggaaaacagcaaacgctggaatcccgaaattcagtacacttccaactacaacaagtctgttaatgtggactttactgtggacactaatggcgtgtattcagagcctcgccccattggcaccagatacctgactcgtaatctgtaa

SEQ ID NO: 3356 - DNA, 2208 bp, Artificial Sequence
  Description of Artificial Sequence: Synthetic polynucleotide
atggctgccgatggttatcttccagattggctcgaggacactctctctgaaggaataagacagtggtggaagctcaaacctggcccaccaccaccaaagcccgcagagcggcataaggacgacagcaggggtcttgtgcttcctgggtacaagtacctcggacccttcaacggactcgacaagggagagccggtcaacgaggcagacgccgcggccctcgagcacgacaaagcctacgaccggcagctcgacagcggagacaacccgtacctcaagtacaaccacgccgacgcggagtttcaggagcgccttaaagaagatacgtcttttgggggcaacctcggacgagcagtcttccaggcgaaaaagagggttcttgaacctctgggcctggttgaggaacctgttaagacggctccgggaaaaaagaggccggtagagcactctcctgtggagccagactcctcctcgggaaccggaaagacgggccagcagcctgcaagaaaaagattgaattttggtcagactggagacgcagactcagtacctgacccccagcctctcggacagccaccagcagccccctctggtctgggaactaatacgatggctacaggcagtggcgcaccaatggcagacaataacgagggcgccgacggagtgggtaattcctcgggaaattggcattgcgattccacatggatgggcgacagagtcatcaccaccagcacccgaacctgggccctgcccacctacaacaaccacctctacaaacaaatttccagccaatcaggagcctcgaacgacaatcactactttggctacagcaccccttgggggtattttgacttcaacagattccactgccacttttcaccacgtgactggcaaagactcatcaacaacaactggggattccgacccaagagactcaacttcaagctctttaacattcaagtcaaagaggtcacgcagaatgacggtacgacgacgattgccaataaccttaccagcacggttcaggtgtttactgactcggagtaccagctcccgtacgtcctcggctcggcgcatcaaggatgcctcccgccgttcccagcagacgtcttcatggtgccacagtatggatacctcaccctgaacaacgggagtcaggcagtaggacgctcttcattttactgcctggagtactttccttctcagatgctgcgtaccggaaacaactttaccttcagctacacttttgaggacgttcctttccacagcagctacgctcacagccagagtctggaccgtctcatgaatcctctcatcgaccagtacctgtattacttgagcagaacaaacactccaagtggaaccaccacgcagtcaaggcttcagttttctcaggccggagcgagtgacattcgggaccagtctaggaactggcttcctggaccctgttaccgccagcagcgagtatcaaagacatctgcggataacaacaacagtgaatactcgtggactggagctaccaagtaccacctcaatggcagagactctctggtgaatccgggcccggccatggcaagccacaaggacgatgaagaaaagttttttcctcagagcggggttctcatctttgggaagcaaggctcagagaaaacaaatgtggacattgaaaaggtcatgattacagacgaagaggaaatcaggacaaccaatcccgtggctacggagcagtatggttctgtatctaccaacctccagagaggcaacagacaagcagctaccgcagatgtcaacacacaaggcgttcttccaggcatggtctggcaggacagagatgtgtaccttcaggggcccatctgggcaaagattccacacacggacggacattttcacccctctcccctcatgggtggattcggacttaaacaccctcctccacagattctcatcaagaacaccccggtatctgcgaatccttcgaccaccttcagtgcggcaaagtttgcttccttcatcacacagtactccacgggacaggtcagcgtggagatcgagtgggagctgcagaaggaaaacagcaaacgctgggatcccgaaattcagtacacttccaactacaacaagtctgttaatgtggactttactgtggacactaatggcgtgtattcagagcctcgccccattggcaccagatacctgactcgtaatctgtaa

SEQ ID NO: 3357 - DNA, 2205 bp, Artificial Sequence
  Description of Artificial Sequence: Synthetic polynucleotide
atggctgccgatggttatcttccagattggctcgaggacactctctctgaaggaataagacagtggtggaagctcaaacctggcccaccaccaccaaagcccgcagagcggcataaggacgacagcaggggtcttgtgcttcctgggtacaagtacctcggacccttcaacggactcgacaagggagagccggtcaacgaggcagacgccgcggccctcgagcacgacaaagcctacgaccggcagctcgacagcggagacaacccgtacctcaagtacaaccacgccgacgcggagtttcaggagcgccttaaagaagatacgtcttttgggggcaacctcggacgagcagtcttccaggcgaaaaagagggttcttgaacctctgggcctggttgaggaacctgttaagacggctccgggaaaaaagaggccggtagagcactctcctgtggagccagactcctcctcgggaaccggaaaggcgggccagcagcctgcaagaaaaagattgaattttggtcagactggagacgcagactcagtacctgacccccagcctctcggacagccaccagcagccccctctggtctgggaactaatacgatggctacaggcagtggcgcaccaatggcagacaataacgagggcgccgacggagtgggtaattcctcgggaaattggcattgcgattccacatggatgggcgacagagtcatcaccaccagcacccgaacctgggccctgcccacctacaacaaccacctctacaaacaaatttccagccaatcaggagcctcgaacgacaatcactactttggctacagcaccccttgggggtattttgacttcaacagattccactgccacttttcaccacgtgactggcaaagactcatcaacaactggggattccgacccaagagactcaacttcaagctctttaacattcaagtcaaagaggtcacgcagaatgacggtacgacgacgattgccaataaccttaccagcacggttcaggtgtttactgactcggagtaccagctcccgtacgtcctcggctcggcgcatcaaggatgcctcccgccgttcccagcagacgtcttcatggtgccacagtatggatacctcaccctgaacaacgggagtcaggcagtaggacgctcttcattttactgcctggagtactttccttctcagatgctgcgtaccggaaacaactttaccttcagctacacttttgaggacgttcctttccacagcagctacgctcacagccagagtctggaccgtctcatgaatcctctcatcgaccagtacctgtattacttgagcagaacaaacactccaagtggaaccaccacgcagtcaaggcttcagttttctcaggccggagcgagtgacattcgggaccagtctaggaactggcttcctggaccctgttaccgccagcagcgagtatcaaagacatctgcggataacaacaacagtgaatactcgtggactggagctaccaagtaccacctcaatggcagagactctctggtgaatccgggcccggccatggcaagccacaaggacgatgaagaaaagttttttcctcagagcggggttctcatctttgggaagcaaggctcagagaaaacaaatgtggacattgaaaaggtcatgattacagacgaagaggaaatcaggacaaccaatcccgtggctacggagcagtatggttctgtatctaccaacctccagagaggcaacagacaagcagctaccgcagatgtcaacacacaaggcgttcttccaggcacggtctggcaggacagagatgtgtaccttcaggggcccatctgggcaaagattccacacacggacggacattttcacccctctcccctcatgggtggattcggacttaaacaccctcctccacagattctcatcaagaacaccccggtacctgcgaatccttcgaccaccttcagtgcggcaaagtttgcttccttcatcacacagtactccacgggacaggtcagcgtggagatcgagtgggagctgcagaaggaaaacagcaaacgctggaatcccgaaattcagtacacttccaactacaacaagtctgttaatgtggactttactgtggacactaatggcgtgtattcagagcctcgccccattggcaccagatacctgactcgtaatctgtaa

SEQ ID NO: 3358 - DNA, 2208 bp, Artificial Sequence
  Description of Artificial Sequence: Synthetic polynucleotide
atggctgccgatggttatcttccagattggctcgaggacactctctctgaaggaataagacagtggtggaagctcaaacctggcccaccaccaccaaagcccgcagagcggcataaggacgacagcaggggtcttgtgcttcctgggtacaagtacctcggacccttcaacggactcgacaagggagagccggtcaacgaggcagacgccgcggccctcgagcacgacaaagcctacgaccggcagctcgacagcggagacaacccgtacctcaagtacaaccacgccgacgcggagtttcaggagcgccttaaagaagatacgtcttttgggggcaacctcggacgagcagtcttccaggcgaaaaagagggttcttgaacctctgggcctggttgaggaacctgttaagacggctccgggaaaaaagaggccggtagagcactctcctgtggagccagactcctcctcgggaaccggaaaggcgggccagcagcctgcaagaaaaagattgaattttggtcagactggagacgcagactcagtacctgacccccagcctctcggacagccaccagcagccccctctggtctgggaactaatacgatggctacaggcagtggcgcaccaatggcagacaataacgagggcgccgacggagtgggtaattcctcgggaaattggcattgcgattccacatggatgggcgacagagtcatcaccaccagcacccgaacctgggccctgcccacctacaacaaccacctctacaaacaaatttccagccaatcaggagcctcgaacgacaatcactactttggctacagcaccccttgggggtattttgacttcaacagattccactgccacttttcaccacgtgactggcaaagactcatcaacaacaactggggattccgacccaagagactcaacttcaagctctttaacattcaagtcaaagaggtcacgcagaatgacggtacgacgacgattgccaataaccttaccagcacggttcaggtgtttactgactcggagtaccagctcccgtacgtcctcggctcggcgcatcaaggatgcctcccgccgttcccagcagacgtcttcatggtgccacagtatggatacctcaccctgaacaacgggagtcaggcagtaggacgctcttcattttactgcctggagtactttccttctcagatgctgcgtaccggaaacaactttaccttcagctacacttttgaggacgttcctttccacagcagctacgctcacagccagagtctggaccgtctcatgaatcctctcatcgaccagtacctgtattacttgagcagaacaaacactccaagtggaaccaccacgcagtcaaggcttcagttttctcaggccggagcgagtgacattcgggaccagtctaggaactggcttcctggaccctgttaccgccagcagcgagtatcaaagacatctgcggataacaacaacagtgaatactcgtggactggagctaccaagtaccacctcaatggcagagactctctggtgaatccgggcccggccatggcaagccacaaggacgatgaagaaaagttttttcctcagagcggggttctcatctttgggaagcaaggctcagagaaaacaaatgtggacattgaaaaggtcatgattacagacgaagaggaaatcaggacaaccaatcccgtggctacggagcagtatggttctgtatctaccaacctccagagaggcaacagacaagcagctaccgcagatgtcaacacacaaggcgttcttccaggcacggtctggcaggacagagatgtgtaccttcaggggcccatctgggcaaagattccacacacggacggacattttcacccctctcccctcatgggtggattcggacttaaacaccctcctccacagattctcatcaagaacaccccggtacctgcgaatccttcgaccaccttcagtgcggcaaagtttgcttccttcatcacacagtactccacgggacaggtcagcgtggagatcgagtgggagctgcagaaggaaaacggcaaacgctggaatcccgaaattcagtacacttccaactacaacaagtctgttaatgtggactttactgtggacactaatggcgtgtattcagagcctcgccccattggcaccagatacctgactcgtaatctgtaa

SEQ ID NO: 3359 - DNA, 2208 bp, Artificial Sequence
  Description of Artificial Sequence: Synthetic polynucleotide
atggctgccgatggttatcttccagattggctcgaggacactctctctgaaggaataagacagtggtggaagctcaaacctggcccaccaccaccaaagcccgcagagcggcataaggacgacagcaggggtcttgtgcttcctgggtacaagtacctcggacccttcaacggactcgacaagggagagccggtcaacgaggcagacgccgcggccctcgagcacgacaaagcctacgaccggcagctcgacagcggagacaacccgtacctcaagtacaaccacgccgacgcggagtttcaggagcgccctaaagaagatacgtcttttgggggcaacctcggacgagcagtcttccaggcgaaaaagagggttcttgaacctctgggcctggttgaggaacctgttaagacggctccgggaaaaaagaggccggtagagcactctcctgtggagccagactcctcctcgggaaccggaaaggcgggccagcagcctgcaagaaaaagattgaattttggtcagactggagacgcagactcagtacctgacccccagcctctcggacagccaccagcagccccctctggtctgggaactaatacgatggctacaggcagtggcgcaccaatggcagacaataacgagggcgccgacggagtgggtaattcctcgggaaattggcattgcgattccacatggatgggcgacagagtcatcaccaccagcacccgaacctgggccctgcccacctacaacaaccacctctacaaacaaatttccagccaatcaggagcctcgaacgacaatcactactttggctacagcaccccttgggggtattttgacttcaacagattccactgccacttttcaccacgtgactggcaaagactcatcaacaacaactggggattccgacccaagagactcaacttcaagctctttaacattcaagtcaaagaggtcacgcagaatgacggtacgacgacgattgccaataaccttaccagcacggttcaggtgtttactgactcggagtaccagctcccgtacgtcctcggctcggcgcatcaaggatgcctcccgccgttcccagcagacgtcttcatggtgccacagtatggatacctcaccctgaacaacgggagtcaggcagtaggacgctcttcattttactgcctggagtactttccttctcagatgctgcgtaccggaaacaactttaccttcagctacacttttgaggacgttcctttccacagcagctacgctcacagccagagtctggaccgtctcatgaatcctctcatcgaccagtacctgtattacttgagcagaacaaacactccaagtggaaccaccacgcagtcaaggcttcagttttctcaggccggagcgagtgacattcgggaccagtctaggaactggcttcctggaccctgttaccgccagcagcgagtatcaaagacatctgcggataacaacaacagtgaatacttgtggactggagctaccaagtaccacctcaatggcagagactctctggtgaatccgggcccggccatggcaagccacaaggacgatgaagaaaagttttttcctcagagcggggttctcatctttgggaagcaaggctcagagaaaacaaatgtggacattgaaaaggtcatgattacagacgaagaggaaatcaggacaaccaatcccgtggctacggagcagtatggttctgtatctaccaacctccagagaggcaacaggcaagcagctaccgcagatgtcaacacacaaggcgttcttccaggcacggtctggcaggacagagatgtgtaccttcaggggcccatctgggcaaagattccacacacggacggacattttcacccctctcccctcatgggtggattcggacttaaacaccctcctccacagattctcatcaagaacaccccggtacctgcgaatccttcgaccaccttcagtgcggcaaagtttgcttccttcatcacacagtactccacgggacaggtcagcgtggagatcgagtgggagctgcagaaggaaaacagcaaacgctggaatcccgaaattcagtacacttccaactacaacaagtctgttaatgtggactttactgtggacactaatggcgtgtattcagagcctcgccccattggcaccagatacctgactcgtaatctgtaa

SEQ ID NO: 3360 - DNA, 2208 bp, Artificial Sequence
  Description of Artificial Sequence: Synthetic polynucleotide
atggctgccgatggttatcttccagattggctcgaggacactctctctgaaggaataagacagtggtggaagctcaaacctggcccaccaccaccaaagcccgcagagcggcataaggacgacagcaggggtcttgtgcttcctgggtacaagtacctcggacccttcaacggactcgacaagggagagccggtcaacgaggcagacgccgcggccctcgagcacgacaaagcctacgaccggcagctcgacagcggagacaacccgtacctcaagtacaaccacgccgacgcggagtttcaggagcgccttaaagaagatacgtcttttgggggcaacctcggacgagcagtcttccaggcgaaaaagagggctcttgaacctctgggcctggttgaggaacctgttaagacggctccgggaaaaaagaggccggtagagcactctcctgtggagccagactcctcctcgggaaccggaaaggcgggccagcagcctgcaagaaaaagattggattttggtcagactggagacgcagactcagtacctgacccccagcctctcggacagccaccagcagccccctctggtctgggaactaatacgatggctacaggcagtggcgcaccaatggcagacaataacgagggcgccgacggagtgggtaattcctcgggaaattggcattgcgattccacatggatgggcgacagagtcatcaccaccagcacccggacctgggccctgcccacctacaacaaccacctctacaaacaaatttccagccaatcaggagcctcgaacgacaatcactactttggctacagcaccccttgggggtattttgacttcaacagattccactgccacttttcaccacgtgactggcaaagactcatcaacaacaactggggattccgacccaagagactcaacttcaagctctttaacattcaagtcaaagaggtcacgcagaatgacggtacgacgacgattgccaataaccttaccagcacggttcaggtgtttactgactcggagtaccagctcccgtacgtcctcggctcggcgcatcaaggatgcctcccgccgttcccagcagacgtcttcatggtgccacagtatggatacctcaccctgaacaacgggagtcaggcagtaggacgctcttcattttactgcctggagtactttccttctcagatgctgcgtaccggaaacaactttaccttcagctacacttttgaggacgttcctttccacagcagctacgctcacagccagagtctggaccgtctcatgaatcctctcatcgaccagtacctgtattacttgagcagaacaaacactccaagtggaaccaccacgcagtcaaggcttcagttttctcaggccggagcgagtgacattcgggaccagtctaggaactggcttcctggaccctgttaccgccagcagcgagtatcaaagacatctgcggataacaacaacagtgaatactcgtggactggagctaccaagtaccacctcaatggcagagactctctggtgaatccgggcccggccatggcaagccacaaggacgatgaagaaaagttttttcctcagagcggggttctcatctttgggaagcaaggctcagagaaaacaaatgtggacattgaaaaggtcatgattacagacgaagaggaaatcaggacaaccaatcccgtggctacggagcagtatggttctgtatctaccaacctccagagaggcaacagacaagcagctaccgcagatgtcaacacacaaggcgttcttccaggcatggtctggcaggacagagatgtgtaccttcaggggcccatctgggcaaagattccacacacggacggacattttcacccctctcccctcatgggtggattcggacttaaacaccctcctccacagattctcatcaagaacaccccggtacctgcgaatccttcgaccaccttcagtgcggcaaagtttgcttccttcatcacacagtactccacgggacaggtcagcgtggagatcgagtgggagctgcagaaggaaaacagcaaacgctggaatcccgaaattcagtacacttccaactacaacaagtctgttaatgtggactttactgtggacactaatggcgtgtattcagagcctcgccccattggcaccagatacctgactcgtaatctgtaa

SEQ ID NO: 3361 - DNA, 2208 bp, Artificial Sequence
  Description of Artificial Sequence: Synthetic polynucleotide
atggctgccgatggttatcttccagattggctcgaggacactctctctgaaggaataagacagtggtggaagctcaaacctggcccaccaccgccaaagcccgcagagcggcataaggacgacagcaggggtcttgtgcttcctgggtacaagtacctcggacccttcaacggactcgacaagggagagccggtcaacgaggcagacgccgcggccctcgagcacgacaaggcctacgaccggcagctcgacagcggagacaacccgtacctcaagtacaaccacgccgacgcggagtttcaggagcgccttaaagaagatacgtcttttgggggcaacctcgcaagagcagtattccaggcgaaaaagagggttcttgaacctctgggcctggttgaggagcctgttaagacggctccgggaaaaaagaggccggtagagcattctcctgcggagccagactcctcctcgggaaccggaaaagcgggccagcagcctgcgagaaagagattgaatttcggtcagactggagacgcagactccgtacctgacccccagcctctcggacagccaccagcagccccctctggtctgggaactaatacgatggctacaggcagtggcgcaccaatggcagacaataacgagggtgccgacggagtgggtaattcctcaggaaattggcattgcgattccacatggatgggcgacagagtcatcaccaccagcacccgcacctgggctctgcccacctacaacaaccatctgtacaagcagatctccagccaatctggagccagcaacgacaaccactactttggctacagcaccccttgggggtattttgacttcaacagattccactgccacttctccccacgtgactggcaaagactcatcaacaacaactggggattccggcccaagagactcagcttcaagctctttaacattcaagtcaaggaggtcacgcagaatgacggtacgacgacgattgccaataaccttaccagcacggttcaggtctttactgactcggagtaccagctcccgtacgtcctcggctcggcgcatcaaggatgcctcccgccgttcccagcagacgtcttcatggtgccacagtatggatacctcaccctgaacaacgggagtcaggcggtaggacgctcttcattttactgcctggagtacttcccttctcagatgcttcgcacgggaaacaactttaccttcagctacacctttgaggacgtgccttttcacagcagctacgctcacagccaaagtctggaccgtctcatgaatcctctcatcgaccagtacctgtattacttgagcaaaacaaacgctccaagcggaaccaccacgatgtccaggcttcagttttctcaggccggagcaagtgacattcgggaccagtctagaaactggcttcctggaccctgttaccgccagcagcgagtatcaaagacagctgcggacaacaacaacagtgattactcgtggactggagctaccaagtaccacctcaatggaagagactctctggtgaacccgggcccagctatggccagccacaaggacgatgaagaaaaatattttcctcagagcggggttctcatcttcgggaaacaaggctcaaataaaactaatgtggacattgaaaaggttatgattacagacgaagaggaaatcaggaccaccaatcccgtggctacggagcagtatggttctgtatctaccaaccttcaaagcggcaacacacaagcagctacctcagatgtcaacacacaaggcgttcttcctggcatggtctggcaggacagagatgtgtacctgcaggggcccatctgggcaaagattccacacacggatggacactttcacccttctcctcttatgggaggatttggactgaagcaccctcctccgcagattctcatcaagaataccccggtacctgcgaatccttcgaccaccttcagtgcggcaaagtttgcttctttcatcacacagtactccacggggcaggtcagcgtggagatcgagtgggagctgcagaaggagaacagcaaacgctggaaccccgagatccagtatacttccaactacaacaaatctgttaatgtggactttactgtggacactaatggtgtgtattcagagcctcgccccattggcaccagatacctgactcgtaatctgtaa

SEQ ID NO: 3362 - DNA, 2208 bp, Artificial Sequence
  Description of Artificial Sequence: Synthetic polynucleotide
atggctgccgatggttatcttccagattggctcgaggacactctctctgaaggaataagacagtggtggaagctcaaacctggcccaccaccaccaaagcccgcagagcggcataaggacgacagcaggggtcttgtgcttcctgggtacaagtacctcggacccttcaacggactcgacaagggagagccggtcaacgaggcagacgccgcggccctcgagcacgacaaagcctacgaccggcagctcgacagcggagacaacccgtacctcaagtacaaccacgccgacgcggagtttcaggagcgccttaaagaagatacgtcttttgggggcaacctcggacgagcagtcttccaggcgaaaaagagggttcttgaacctctgggcctggttgaggaacctgttaagacggctccgggaaaaaagaggccggtagagcactctcctgtggagccagactcctcctcgggaaccggaaaggcgggccagcagcctgcaagaaaaagattgaattttggtcagactggagacgcagactcagtacctgacccccagcctctcggacagccaccagcagccccctctggtctgggaactaatacgatggctacaggcagtggcgcaccaatggcagacaataacgagggcgccgacggagtgggtaattcctcgggaaattggcattgcgattccacatggatgggcgacagagtcatcaccaccagcacccgaacctgggccctgcccacctacaacaaccacctctacaaacaaatttccagccaatcaggagcctcgaacgacaatcactactttggctacagcaccccttgggggtattttgacttcaacagattccactgccacttttcaccacgtgactggcaaagactcatcaacaacaactggggattccgacccaagagactcaacttcaagctctttaacattcaagtcaaagaggtcacgcagaatgacggtacgacgacgattgccaataaccttaccagcacggttcaggtgtttactgactcggagtaccagctcccgtacgtcctcggctcggcgcatcaaggatgcctcccgccgttcccagcagacgtctccatggtgccacagtatggatacctcaccctgaacaacgggagtcaggcagtaggacgctcttcattttactgcctggagtactttccttctcagatgctgcgtaccggaaacaactttaccttcagctacacttttgaggacgttcctttccacagcagctacgctcacagccagagtctggaccgtctcatgaatcctctcatcgaccagtacctgtattacttgagcagaacaaacactccaagtggaaccaccacgcagtcaaggcttcagttttctcaggccggagcgagtgacattcgggaccagtctaggaactggcttcctggaccctgttaccgccagcagcgagtatcaaagacatctgcggataacaacaacagtgaatactcgtggactggagctaccaagtaccacctcaatggcagagactctctggtgaatccgggcccggccatggcaagccacaaggacgatgaagaaaagttttttcctcagagcggggttctcatctttgggaagcaaggctcagagaaaacaaatgtggacattgaaaaggtcatgattacagacgaagaggaaatcaggacaaccaatcccgtggctacggagcagtatggttctgtatctaccaacctccagagaggcaacagacaagcagctaccgcagatgtcaacacacaaggcgttcttccaggcacggtctggcaggacagagatgtgtaccttcaggggcccatctgggcaaagattccacacacggacggacattttcacccctctcccctcatgggtggattcggacttaaacaccctcctccacagattctcatcaagaacaccccggtacctgcgaatccttcgaccaccttcagtgcggcaaagtttgcttccttcatcacacagtactccacgggacaggtcagcgtggagatcgagtgggagctgcagaaggaaaacagcaaacgctggaatcccgaaattcagtacacttccaactacaacaagtctgttaatgtggactttactgtggacactaatggcgtgtattcagagcctcgccccattggcaccagatacctgactcgtaatctgtaa

SEQ ID NO: 3363 - DNA, 2208 bp, Artificial Sequence
  Description of Artificial Sequence: Synthetic polynucleotide
atggctgccgatggttatcttccagattggctcgaggacactctctctgaaggaataagacagtggtggaagctcaaacctggcccaccaccgccaaagcccgcagagcggcataaggacgacagcaggggtcttacgcttcctgggtacaagtacctcggacccttcaacggactcgacaaaggagagccggtcaacgaggcagacgccgcggccctcgagcacgacaaggcctacgaccggcagctcgacagcggagacaacccgtacctcaagtacaaccacgccgacgcggagtttcaggagcgccttaaagaagatacgtcttttgggggcaacctcgcaagagcagtattccaggcgaaaaagagggttcttgaacctctgggcctggttgaggagcctgttaagacggctccgggaaaaaagaggccggtagagcactctcctgcggagctagattcctcctccggaactggaaagtcgggccaacagcctgcaagaaagagattgaattttggtcagactggagacgcagactccgtacctgacccccagcctctcggacagccaccagcagccccctctggtctgggaactaatacgatggcttcaggcagtggcgcaccaatggcagacaataacgagggcgccgacggagtgggtaattcctcgggaaattggcattgcgattccacatggatgggcgacagagtcatcaccaccagcacccgcacctgggctctgcccacctacaacaaccatctgtacaagcaaatttccagccagtctggggccagcaacgacaaccactactttggctacagcaccccttgggggtattttgacttcaacagattccactgccacttctccccacgtgactggcaaagactcatcaacaacaattggggattccggcccaaaagactcaacttcaagctctttaacattcaagtcaaggaggtcacgcagaatgacggtacgacgacgattgccaataaccttaccagcacggttcaggtgtttactgactcggagtaccagctcccgtacgtcctcggctcggcgcatcaaggatgcctcccgccgttcccagcagacgtcttcatggtgccacagtatggatacctcaccctgaacaacgggagtcaggcggtaggacgctcttcattttactgcctggagtactttccttctcagatgctgcgtaccggaaacaactttaccttcagctacacctttgaggacgttccttttcacagcagctacgctcatagccagagtttggaccgtctcatgaatcctctcatcgaccagtacctgtattacttgagcagaacaaacactccaagcggaaccactacgcagtccaggcttcagttttctcaagccggagcgagtgacattcgggaccagtctaggaactggcttcctggaccctgttaccgccagcagcgagtatcaaagacagctgcggacaacaacaacagtgattactcgtggactggagctaccaagtatcacctcaatggaagagactctctggtgaatccgggcacagccatggccagccacaaggacgatgaagaaaagtattttcctcagagcggggttctcatcttcggaaaacaagactcgggaaaaactaatgtggacattgaaaaggtcatgattacagacgaagaggaaatcaggaccaccaatcccgtggctacggagcagtatggttctgtatctaccaatctccagagcggcaacacacaagcagctacctcagatgtcaacacacaaggcgttcttccaggcatggtctggcaggacagagacgtgtacctgcagggacccatctgggcaaagattccacacacggacggacattttcacccttctcctcttatgggaggatttggaccgaagcaccctcccccgcagattctcatcaagaataccccggtacctgcgaatccttctaccaccttcagcgcggcaaagtttgcttccttcatcacacagtactccacggggcaggtcagcgtggagatcgagtgggagctgcagaaagagaacagcaaacgctggaaccccgagatccagtatacctccaactacaacaagtctgttaatgtggactttactgtggacactaatggcgtgtattcagagcctcgccccattggcacaagatacctgactcgtaatctgtaa

SEQ ID NO: 3364 - DNA, 2208 bp, Artificial Sequence
  Description of Artificial Sequence: Synthetic polynucleotide
atggctgccgatggttatcttccagattggctcgaggacactctctctgaaggaataagacagtggtggaagctcaaacctggcccaccaccgccaaagcccgcagagcggcataaggacgacagcaggggtcttgtgcttcctgggtacaagtacctcggacccttcaacggactcgacaaaggagagccggtcaacgaggcagacgccgcggccctcgagcacgacaaggcctacgaccggcagctcgacagcggagacaacccgtacctcaagtacaaccacgccgacgcggagtttcaggagcgccttaaagaagatacgtcttttgggggcaacctcgcaagagcagtattccaggcgaaaaagagggttcttgaacctctgggcctggttgaggagcctgttaagacggctccgggaaaaaagaggccggtagagcactctcctgcggagccagattcctcctccggaactggagagtcgggccaacagcctgcaagaaagagattgaattttggtcagactggagacgcagactccgtacctgacccccagcctctcggacagccaccagcagccccctctggtctgggaactaatacgatggcttcaggcagtggcgcaccaatggcagacaataacgagggcgccgacggagtgggtaattcctcgggaaattggcattgcgattccacatggatgggcgacagagtcatcaccaccagcacccgcacctgggctctgcccacctacaacaaccatctgtacaagcaaatttccagccagtctggagccagcaacgacaaccactactttggctacagcaccccttgggggtattttgacttcaacagattccactgccacttctccccacgtgactggcaaagactcatcaacaacaattggggattccggcccaaaagactcaacttcaagctctttaacattcaagtcaaggaggtcacgcagaatgacggtacgacgacgattgccaataaccttaccagcacggttcaggtgtttactgactcggagtaccagctcccgtacgtcctcggctcggcgcatcaaggatgcctcccgccgttcccagcagacgtcttcatggtgccacagtatggatacctcaccctgaacaacgggagtcaggcggtaggacgctcttcattttactgcctggagtactttccttctcagatgctgcgtaccggaaacaactttaccttcagctacacctttgaggacgttccttttcacagcagctacgctcacagccagagtttggaccgtcttatgaatcctctcatcgaccagtacctgtattacttgagcagaacaaacactccaagcggaaccactacgcagtccaggcttcagttttctcaagccggagcgagtgacattcgggaccagtctaggaactggcttcctggaccctgttaccgccagcagcgagtatcaaagacagctgcggacaacaacaacagtgattactcgtggactggagctaccaagtatcacctcaatggaagagactctctggtgaatccgggcacagccatggccagccacaaggacgatgaagaaaagtattttcctcagagcggggttctcatcttcggaaaacaagactcgggaaaaactaatgtggacattgaaaaggtcatgattacagacgaagaggaaatcaggaccaccaatcccgtggctacggagcagtatggttctgtatctaccaatctccagagcggcaacacacaagcagctacctcagatgtcaacacacaaggcgttcttccaggcatggtccggcaggacagagacgtgtacctgcagggacccatctgggcaaagattccacacacggacggacattttcacccttctcctcttatgggaggatttggactgaagcaccctcccccgcagattctcatcaagaataccccggtacctgcgaatccttctaccaccttcagcgcggcaaagtttgcttccttcatcacacagtactccacggggcaggtcagcgtggagatcgagtgggagccgcagaaagagaacagcaaacgctggaaccccgagatccagtatacctccaactacaacaagtctgttaatgtggactttactgtggacactaatggcgtgtattcagagcctcgccccattggcacaagatacctgactcgtaatctgtaa

SEQ ID NO: 3365 - DNA, 2208 bp, Artificial Sequence
  Description of Artificial Sequence: Synthetic polynucleotide
atggctgccgatggttatcttccagattggctcgaggacactctctctgaaggaataagacagtggtggaagctcaaacctggcccaccaccgccaaagcccgcagagcggcataaggacgacagcaggggtcttgcgcttcctgggtacaagtacctcggacccttcaacggactcgacaaaggagagccggtcaacgaggcagacgccgcggccctcgagcacgacaaggcctacgaccggcagctcgacagcggagacaacccgtacctcaagtacaaccacgccgacgcggagtttcaggagcgccttaaagaagatacgtcttttgggggcaacctcgcaagagcagtattccaggcgaaaaagagggttcttgaacctctgggcctggttgaggagcctgttaagacggctccgggaaaaaagaggccggtagagcactctcctgcggagctagattcctcctccggaactggaaagtcgggccaacagcctgcaagaaagagattgaattttggtcagactggagacgcagactccgtacctgacccccagcctctcggacagccaccagcagccccctctggtctgggaactaatacgatggcttcaggcagtggcgcaccaatggcagacaataacgagggcgccgacggagtgggtaattcctcgggaaattggcattgcgattccacatggatgggcgacagagtcatcaccaccagcacccgcacctgggctctgcccacctacaacaaccatctgtacaagcaaatttccagccagtctggggccagcaacgacaaccactactttggctacagcaccccttgggggtattttgacttcaacagattccactgccacttctccccacgtgactggcaaagactcatcaacaacaattggggattccggcccaaaagactcaacttcaagctctttaacattcaagtcaaggaggtcacgcagaatgacggtacgacgacgattgccaataaccttaccagcacggttcaggtgtttactgactcggagtaccagctcccgtacgtcctcggctcggcgcatcaaggatgcctcccgccgttcccagcagacgtcttcatggtgccacagtatggatacctcaccctgaacaacgggagtcaggcggtaggacgctcttcattttactgcctggagtactttccttctcagatgctgcgtaccggaaacaactttaccttcagctacacctttgaggacgttccttttcacagcagctacgctcacagccagagtttggaccgtctcatgaatcctctcatcgaccagtacctgtattacttgagcagaacaaacactccaagcggaaccactacgcagtccgggcttcagttttctcaagccggagcgagtgacattcgggaccagtctaggaactggcttcctggaccctgttaccgccagcagcgagtatcaaagacagctgcggacaacaacaacagtgattactcgtggactggagctaccaagtatcacctcaatggaagagactctctggtgaatccgggcacagccatggccagccacaaggacgatgaagaaaagtattttcctcagagcggggttctcatcttcggaaaacaagactcgggaaaaactaatgtggacattgaaaaggtcatgattacagacgaagaggaaatcaggaccaccaatcccgtggctacggagcagtatggttctgtatctaccaatctccagagcggcaacacacaagcagctacctcagatgtcaacacacaaggcgttcttccaggcatggtctggcaggacagagacgtgtacctgcagggacccatctgggcaaagattccacacacggacggacattttcacccttctcctcttatgggagggtttggaccgaagcaccctcccccgcagattctcatcaagaataccccggtacctgcgaatccttctaccaccttcagcgcggcaaagtttgcttccttcatcacacagtactccacggggcaggtcagcgtggagatcgagtgggagctgcagaaagagaacagcaaacgctggaaccccgagatccagtatacctccaactacaacaagtctgttaatgtggactttactgtggacactaatggcgtgtattcagagcctcgccccattggcacaagatacctgactcgtaatctgtaa

SEQ ID NO: 3366 - DNA, 2208 bp, Artificial Sequence
  Description of Artificial Sequence: Synthetic polynucleotide
atggctgccgatggttatcttccagattggctcgaggacactctctctgaaggaataagacagtggtggaagctcaaacctggcccaccaccgccaaagcccgcagagcggcataaggacgacagcaggggtcttgtgcttcctgggtacaagtacctcggacccttcaacggactcgacaaaggagagccggtcaacgaggcagacgccgcggccctcgagcacgacaaggcctacgaccggcagctcgacagcggagacaacccgtacctcaagtacaaccacgccgacgcggagtttcaggagcgccttaaagaagatacgtcttttgggggcaacctcgcaagagcagtattccaggcgaaaaagagggttcttgaacctctgggcctggttgaggagcctgttaagacggctccgggaaaaaagaggccggtagagcactctcctgcggagccagattcctcctccggaactggaaagtcgggccaacagcctgcaagaaagagattgaattttggtcagactggagacgcagactccgtacctgacccccagcctctcggacagccaccagcagccccctctggtctgggaactaatacgatggcttcaggcagtggcgcaccaatggcagacaataacgagggcgccgacggagtgggtaattcctcgggaaattggcattgcgattccacatggatgggcgacagagtcatcaccaccagcacccgcacctgggctctgcccacctacaacaaccatctgtacaagcaaatttccagccagtctggagccagcaacgacaaccactactttggctacagcaccccttgggggtattttgacttcaacagattccactgccacttctccccacgtgactggcaaagactcatcaacaacaattggggattccggcccaaaagactcaacttcaagctctttaacattcaagtcaaggaggtcacgcagaatgacggtacgacgacggttgccaataaccttaccagcacggttcaggtgtttactgactcggagtaccagctcccgtacgtcctcggctcggcgcatcaaggatgcctcccgccgttcccagcagacgtcttcatggtgccacagtatggatacctcaccctgaacaacgggagtcaggcggtaggacgctcttcattttactgcctggagtacttcccttctcagatgctgcgtaccggaaacaactttaccttcagctacacctttgaggacgttccttttcacagcagctacgctcacagccagagtttggaccgtcttatgaatcctctcatcgaccagtacctgtattacttgagcagaacaaacactccaagcggaaccactacgcagtccaggcttcagttttctcaagccggagcgagtgacattcgggaccagtctaggaactggcttcctggaccctgttaccgccagcagcgagtatcaaagacagctgcggacaacaacaacagtgattactcgtggactggagctaccaagtatcacctcaatggaagagactctctggtgaatccgggcacagccatggccagccacaaggacgatgaagaaaagtattttcctcagagcggggttctcatcttcggaaaacaagactcgggaaaaactaatgtggacattgaaaaggtcatgattacagacgaagaggaaatcaggaccaccaatcccgtggctacggagcagtatggttctgtatctaccaatctccagagcggcaacacacaagcagctacctcagatgtcaacacacaaggcgttcttccaggcatggtccggcaggacagagacgtgtacctgcagggacccatctgggcaaagattccacacacggacggacattttcacccttctcctcttatgggaggatttggactgaagcaccctcccccgcagattctcatcaagaataccccggtacctgcgaatccttctaccaccttcagcgcggcaaagtttgcttccttcatcacacagtactccacggggcaggtcagcgtggagatcgagtgggagccgcagaaagagaacagcaaacgctggaaccccgagatccagtatacctccaactacaacaagtctgttaatgtggactttactgtggacactaatggcgtgtattcagagcctcgccccattggcacaagatacctgactcgtaatctgtaa

SEQ ID NO: 3367 - DNA, 2208 bp, Artificial Sequence
  Description of Artificial Sequence: Synthetic polynucleotide
atggctgccgatggttatcttccagattggctcgaggacactctctctgaaggaataagacagtggtggaagctcaaacctggcccaccaccgccaaagcccgcagagcggcataaggacgacagcaggggtcttgtgcttcctgggtacaagtacctcggacccttcaacggactcgacaaaggagagccggtcaacgaggcagacgccgcggccctcgagcacgacaaggcctacgaccggcagctcgacagcggagacaacccgtacctcaagtacaaccacgccgacgcggagtttcaggagcgccttaaagaagatacgtcttttgggggcaacctcgcaagagcagtattccaggcgaaaaagagggttcttgaacctctgggcctggttgaggagcctgttaagacggctccgggaaaaaagaggccggtagagcactctcctgcggagccagattcctcctccggaactggaaagtcgggccaacagcctgcaagaaagagattgaattttggtcagactggagacgcagactccgtacctgacccccagcctctcggacagccaccagcagccccctctggtctgggaactaatacgatggcttcaggcagtggcgcaccaatggcagacaataacgagggcgccgacggagtgggtaattcctcgggaaattggcattgcgattccacatggatgggcgacagagtcatcaccaccagcacccgcacctgggctctgcccacctacaacaaccatctgtacaagcaaatttccagccagtctggagccagcaacgacaaccactactttggctacagcaccccttgggggtattttgacttcaacagattccactgccacttctccccacgtgactggcaaagactcatcaacaacaattggggattccggcccaaaagactcaacttcaagctctttaacattcaagtcaaggaggtcacgcagaatgacggtacgacgacgattgccaataaccttaccagcacggttcaggtgtttactgactcggagtaccagctcccgtacgtcctcggctcggcgcatcaaggatgcctcccgccgttcccagcagacgtcttcatggtgccacagtatggatacctcaccctgaacaacgggagtcaggcggtaggacgctcttcattttactgcctggagtactttccttctcagatgctgcgtaccggaaacaactttaccttcagctacacctttgaggacgttccttttcacagcagctacgctcacagccagagtttggaccgtcttatgaatcctctcatcgaccagtacctgtattacttgagcagaacaaacactccaagcggaactactacgcagtccaggcttcagttttctcaagccggagcgagtgacattcgggaccagtctaggaactggcttcctggaccctgttaccgccagcagcgagtatcaaagacagctgcggacaacaacaacagtgattactcgtggactggagctaccaagtatcacctcaatggaagagactctctggtgaatccgggcacagccatggccagccacaaggacgatgaagaaaagtattttcctcagggcggggttctcatcttcggaaaacaagactcgggaaaaactaatgtggacattgaaaaggtcatgattacagacgaagaggaaatcaggaccaccaatcccgtggctacggagcagtatggttctgtatctaccaatctccagagcggcaacacacaagcagctacctcagatgtcaacacacaaggcgttcttccaggcatggtccggcaggacagagacgtgtacctgcagggacccatctgggcaaagattccacacacggacggacattttcacccttctcctcttatgggaggatttggactgaagcaccctcccccgcagattctcatcaagaataccccggtacctgcgaatccttctaccaccttcagcgcggcaaagtttgcttccttcatcacacagtactccacggggcaggtcagcgtggagatcgagtgggagccgcagaaagagaacagcaaacgctggaaccccgagatccagtatacctccaactacaacaagtctgttaatgtggactttactgtggacactaatggcgtgtattcagagcctcgccccattggcacaagatacctgactcgtaatctgtaa

SEQ ID NO: 3368 - DNA, 2208 bp, Artificial Sequence
  Description of Artificial Sequence: Synthetic polynucleotide
atggctgccgatggttatcttccagattggctcgaggacactctctctgaaggaataagacagtggtggaagctcaaacctggcccaccaccgccaaagcccgcagagcggcataaggacgacagcaggggtcttgcgcttcctgggtacaagtacctcggacccttcaacggactcgacaaaggagagccggtcaacgaggcagacgccgcggccctcgagcacgacaaggcctacgaccggcagctcgacagcggagacaacccgtacctcaagtacaaccacgccgacgcggagtttcaggagcgccttaaagaagatacgtcttttgggggcaacctcgcaagagcagtattccaggcgaaaaagagggttcttgaacctctgggcctggttgaggagcctgttaagacggctccgggaaaaaagaggccggtagagcactctcctgcggagctagattcctcctccggaactggaaagtcgggccaacagcctgcaagaaagagattgaattttggtcagactggagacgcagactccgtacctgacccccagcctctcggacagccaccagcagccccctctggtctgggaactaatacgatggcttcaggcagtggcgcaccaatggcagacaataacgagggcgccgacggagtgggtaattcctcgggaaattggcattgcgattccacatggatgggcgacagagtcatcaccaccagcacccgcacctgggctctgcccacctacaacaaccatctgtacaagcaaatttccagccagtctggggccagcaacgacaaccactactttggctacagcaccccttgggggtattttgacttcaacagattccactgccacttctccccacgtgactggcaaagactcatcaacaacaattggggattccggcccaaaagactcaacttcaagctctttaacattcaagtcaaggaggtcacgcagaatgacggtacgacgacgattgccaataaccttaccagcacggttcaggtgtttactgactcggagtaccagctcccgtacgtcctcggctcggcgcatcaaggatgcctcccgccgttcccagcagacgtcttcatggtgccacagtatggatacctcaccctgaacaacgggagtcaggcggtaggacgctcttcattttactgcctggagtactttccttctcagatgctgcgtaccggaaacaactttaccttcagctacacctttgaggacgttccttttcacagcagctacgctcacagccagagtttggaccgtctcatgaatcctctcatcgaccagtacctgtattacttgagcagaacaaacactccaagcggaaccactacgcagtccaggcttcagttttctcaagccggagcgagtgacattcgggaccagtctaggaactggcttcctggaccctgttaccgccagcagcgagtatcaaagacagctgcggacaacaacaacagtgattactcgtggactggagctaccaagtatcacctcaatggaagagactctctggtgaatccgggcacagccatggccggccacaaggacgatgaagaaaagtattttcctcagagcggggttctcatcttcggaaaacaagactcgggaaaaactaatgtggacattgaaaaggtcatgattacagacgaagaggaaatcaggaccaccaatcccgtggctacggagcagtatggttctgtatctaccaatctccagagcggcaacacacaagcagctacctcagatgtcaacacacaaggcgttcttccaggcatggtctggcaggacagagacgtgtacctgcagggacccatctgggcaaagattccacacacggacggacattttcacccttctcctcttatgggagggtttggaccgaagcaccctcccccgcagattctcatcaagaataccccggtacctgcgaatccttctaccaccttcagcgcggcaaagtttgcttccttcatcacacagtactccacggggcaggtcagcgtggagatcgagtgggagctgcagaaagagaacagcaaacgctggaaccccgagatccagtatacctccaactacaacaagtctgttaatgtggactttactgtggacactaatggcgtgtattcagagcctcgccccattggcacaagatacctgactcgtaatctgtaa

SEQ ID NO: 3369 - DNA, 2208 bp, Artificial Sequence
  Description of Artificial Sequence: Synthetic polynucleotide
atggctgccgatggttatcttccagattggctcgaggacactctctctgaaggaataagacagtggtggaagctcaaacctggcccaccaccgccaaagcccgcagagcggcataaggacgacagcaggggtcttgcgcttcctgggtacaagtacctcggacccttcaacggactcgacaaaggagagccggtcaacgaggcagacgccgcggccctcgagcacgacaaggcctacgaccggcagctcgacagcggagacaacccgtacctcaagtacaaccacgccgacgcggagtttcaggagcgccttaaagaagatacgtcttttgggggcaacctcgcaagagcagtattccaggcgaaaaagagggttcttgaacctctgggcctggttgaggagcctgttaagacggctccgggaaaaaagaggccggtagagcactctcctgcggagctagattcctcctccggaactggaaagtcgggccaacagcctgcaagaaagagattgaattttggtcagactggagacgcagactccgtacctgacccccagcctctcggacagccaccagcagccccctctggtctgggaactaatacgatggcttcaggcagtggcgcaccaatggcagacaataacgagggcgccgacggagtgggtaattcctcgggaaattggcattgcgattccacatggatgggcgacagagtcatcaccaccagcacccgcacctgggctctgcccacctacaacaaccatctgtacaagcaaatttccagccagtctggggccagcaacgacaaccactactttggctacagcaccccttgggggtattttgacttcaacagattccactgccacttctccccacgtgactggcaaagactcatcaacaacaattggggattccggcccaaaagactcaacttcaagctctttaacattcaagtcaaggaggtcacgcagaatgacggtacgacgacgattgccaataaccttaccagcacggttcaggtgtttactgactcggagtaccagctcccgtacgtcctcggctcggcgcatcaaggatgcctcccgccgttcccagcagacgtcttcatggtgccacagtatggatacctcaccctgaacaacgggagtcaggcggtaggacgctcttcattttactgcctggagtactttccttctcagatgctgcgtaccggaaacaactttaccttcagctacacctttgaggacgttccttttcacagcagctacgctcacagccagagtttggaccgtctcatgaatcctctcatcgaccagtacctgtattacttgagcagaacaaacactccaagcggaaccactacgcagtccaggcttcagttttctcaagccggagcgagtgacattcgggaccagtctaggaactggcttcctggaccctgttaccgccagcagcgagtatcaaagacagctgcggacaacaacaacagtgattactcgtggactggagctaccaagtatcacctcaatggaagagactctctggtgaatccgggcacagccatggccagccacaaggacgatgaagaaaagtattttcctcagagcggggttctcatcttcggaaaacaagactcgggaaaaactaatgtggacattgaaaaggtcatgattacagacgaagaggaaatcaggaccaccaatcccgtggctacggagcagtatggttctgtatctaccaatctccagagcggcaacacacaagcagctacctcagatgtcaacacacaaggcgttcttccaggcatggtctggcaggacagagacgtgtacctgcagggacccatctgggcaaagattccacacacggacggacattttcacccttctcctcttatgggaggatttggaccgaagcaccctcccccgcagattctcatcaagaataccccggtacctgcgaatccttctaccaccttcagcgcggcaaagtttgcttccttcatcacacagtactccacggggcaggtcagcgtggagatcgagtgggagctgcagaaagagaacagcaaacgctggaaccccgagatccagtatacctccaactacaacaagtctgttaatgtggactttactgtggacactaatggcgtgtattcagagcctcgccccattggcacaagatacctgactcgtaatctgtaa

SEQ ID NO: 3370 - DNA, 2208 bp, Artificial Sequence
  Description of Artificial Sequence: Synthetic polynucleotide
atggctgccgatggttatcttccagattggctcgaggacactctctctgaaggaataagacagtggtggaagctcaaacctggcccaccaccgccaaagcccgcagagcggcataaggacgacagcaggggtcttgtgcttcctgggtacaagtacctcggacccttcaacggactcgacaaaggagagccggtcaacgaggcagacgccgcggccctcgagcacgacaaggcctacgaccggcagctcgacagcggagacaacccgtacctcaagtacaaccacgccgacgcggagtttcaggagcgccttaaagaagatacgtcttttgggggcaacctcgcaagagcagtattccaggcgaaaaagagggttcttgaacctctgggcctggttgaggagcctgttaagacggctccgggaaaaaagaggccggtagagcactctcctgcggagccagattcctcctccggaactggaaagtcgggccaacagcctgcaagaaagagattgaattttggtcagactggagacgcagactccgtacctggcccccagcctctcggacagccaccagcagccccctctggtctgggaactaatacgatggcttcaggcagtggcgcaccaatggcagacaataacgagggcgccgacggagtgggtaattcctcgggaaattggcattgcgattccacatggatgggcgacagagtcatcaccaccagcacccgcacctgggctctgcccacctacaacaaccatctgtacaagcaaatttccagccagtctggagccagcaacgacaaccactactttggctacagcaccccttgggggtattttgacttcaacagattccactgccacttctccccacgtgactggcaaagactcatcaacaacaattggggattccggcccaaaagactcaacttcaagctctttaacattcaagtcaaggaggtcacgcagaatgacggtacgacgacggttgccaataaccttaccagcacggttcaggtgtttactgactcggagtaccagctcccgtacgtcctcggctcggcgcatcaaggatgcctcccgccgttcccagcagacgtcttcatggtgccacagtatggatacctcaccctgaacaacgggagtcaggcggtaggacgctcttcattttactgcctggagtactttccttctcagatgctgcgtaccggaaacaactttaccttcagctacacctttgaggacgttccttttcacagcagctacgctcacagccagagtttggaccgtcttatgaatcctctcatcgaccagtacctgtattacttgagcagaacaaacactccaagcggaaccactacgcagtccaggcttcagttttctcaagccggagcgagtgacattcgggaccagtctaggaactggcttcctggaccctgttaccgccagcagcgagtatcaaagacagctgcggacaacaacaacagtgattactcgtggactggagctaccaagtatcacctcaatggaagagactctctggtgaatccgggcacagccatggccagccacaaggacgatgaagaaaagtattttcctcagagcggggttctcatcttcggaaaacaagactcgggaaaaactaatgtggacattgaaaaggtcatgattacagacgaagaggaaatcaggaccaccaatcccgtggctacggagcagtatggttctgtatctaccaatctccagagcggcaacacacaagcagctacctcagatgtcaacacacaaggcgttcttccaggcatggtccggcaggacagagacgtgtacctgcagggacccatctgggcaaagattccacacacggacggacattttcacccttctcctcttatgggaggatttggactgaagcaccctcccccgcagattctcatcaagaataccccggtacctgcgaatccttctaccaccttcagcgcggcaaagtttgcttccttcatcacacagtactccacggggcaggtcagcgtggagatcgagtgggagccgcagaaagagaacagcaaacgctggaaccccgagatccagtatacctccaactacaacaagtctgttaatgtggactttactgtggacactaatggcgtgtattcagagcctcgccccattggcacaagatacctgactcgtaatctgtaa

SEQ ID NO: 3371 - DNA, 2208 bp, Artificial Sequence
  Description of Artificial Sequence: Synthetic polynucleotide
atggctgccgatggttatcttccagattggctcgaggacactctctctgaaggaataagacagtggtggaagctcaaacctggcccaccaccgccaaagcccgcagagcggcataaggacgacagcaggggtcttgtgcttcctgggtacaagtacctcggacccttcaacggactcgacaaaggagagccggtcaacgaggcagacgccgcggccctcgagcacgacaaggcctacgaccggcagctcgacagcggagacaacccgtacctcaagtacaaccacgccgacgcggagtttcaggagcgccttaaagaagatacgtcttttgggggcaacctcgcaagagcagtattccaggcgaaaaagagggttcttgaacctctgggcctggttgaggagcctgttaagacggctccgggaaaaaagaggccggtagagcactctcctgcggagccagattcctcctccggaactggaaagtcgggccaacagcctgcaagaaagagattgaattttggtcagactggagacgcagactccgtacctgacccccagcctctcggacagccaccagcagccccctctggtctgggaactaatacgatggcttcaggcagtggcgcaccaatggcagacaataacgagggcgccgacggagtgggtaattcctcgggaaattggcattgcgattccacatggatgggcgacagagtcatcaccaccagcacccgcacctgggctctgcccacctacaacaaccatctgtacaagcaaatttccagccagtctggagccagcaacgacaaccactactttggctacagcaccccttgggggtattttgacttcaacagattccactgccacttctccccacgtgactggcaaagactcatcaacaacaattggggattccggcccaaaagactcaacttcaagctctttaacattcaagtcaaggaggtcacgcagaatgacggtacgacgacgattgccaataaccttaccagcacggttcaggtgtttactgactcggagtaccagctcccgtacgtcctcggctcggcgcatcaaggatgcctcccgccgttcccagcagacgtcttcatggtgccacagtatggatacctcaccctgaacaacgggagtcaggcggtaggacgctcttcattttactgcctagagtactttccttctcagatgctgcgtaccggaaacaactttaccttcagctacacctttgaggacgctccttttcacagcagctacgctcacagccagagtttggaccgtcttatgaatcctctcatcgaccagtacctgtactacttgagcagaacaaacactccaagcggaaccactacgcagtccaggcttcagttttctcaagccggagcgagtgacattcgggaccagtctaggaactggcttcctggaccctgttaccgccagcagcgagtatcaaagacagctgcggacaacaacaacagtgattactcgtggactggagctaccaagtatcacctcaatggaagagactctctggtgaatccgggcacagccatggccagccacaaggacgatgaagaaaagtattttcctcagagcggggttctcatcttcggaaaacaagactcgggaaaaactaacgtggacattgaaaaggtcatgattacagacgaagaggaaatcaggaccaccaatcccgtggctacggagcagtatggttctgtatctaccaatctccagagcggcaacacacaagcagctacctcagatgtcaacacacaaggcgttcttccaggcatggtccggcaggacagagacgtgtacctgcagggacccatctgggcaaagattccacacacggacggacattttcacccttctcctcttatgggaggatttggactgaagcaccctcccccgcagattctcatcaagaataccccggtacctgcgaatccttctaccaccttcagcgcggcaaagtttgcttccttcatcacacagtactccacggggcaggtcagcgtggagatcgagtgggagccgcagaaagagaacagcaaacgctggaaccccgagatccagtatacctccaactacaacaagtctgttaatgtggactttactgtggacactaatggcgtgtattcagagcctcgccccattggcacaagatacctgactcgtaatctgtaa

SEQ ID NO: 3372 - DNA, 2208 bp, Artificial Sequence
  Description of Artificial Sequence: Synthetic polynucleotide
atggctgccgatggttatcttccagattggctcgaggacactctctctgaaggaataagacagtggtggaagctcaaacctggcccaccaccgccaaagcccgcagagcggcataaggacgacagcaggggtcttgtgcttcctgggtacaagtacctcggacccttcaacggactcgacaaaggagagccggtcaacgaggcagacgccgcggccctcgagcacgacaaggcctacgaccggcagctcgacagcggagacaacccgtacctcaagtacaaccacgccgacgcggagtttcaggagcgccttaaagaagatacgtcttttgggggcaacctcgcaagagcagtattccaggcgaaaaagagggttcttgaacctctgggcctggttgaggagcctgttaagacggctccgggaaaaaagaggccggtagagcactctcctgcggagccagattcctcctccggaactggaaagtcgggccaacagcctgcaagaaagagattgaattttggtcagactggagacgcagactccgtacctgacccccagcctctcggacagccaccagcagccccctctggtctgggaactaatacgatggcttcaggcagtggcgcaccaatggcagacaataacgagggcgccgacggagtgggtaattcctcgggaaattggcattgcgattccacatggatgggcgacagagtcatccccaccagcacccgcacctgggctctgcccacctacaacaaccatctgtacaagcaaatttccagccagtctggagccagcaacgacaaccactactttggctacagcaccccttgggggtattttgacttcaacagattccactgccacttctccccacgtgactggcaaagactcatcaacaacaattggggattccggcccaaaagactcaacttcaagctctttaacattcaagtcaaggaggtcacgcagaatgacggtacgacgacgattgccaataaccttaccagcacggttcaggtgtttactgactcggagtaccagctcccgtacgtcctcggctcggcgcatcaaggatgcctcccgccgttcccagcagacgtcttcatggtgccacagtatggatacctcaccctgaacaacgggagtcaggcggtaggacgctcttcattttactgcctggagtactttccttctcagatgctgcgtaccggaaacaactttaccttcagctacacctttgaggacgttccttttcacagcagctacgctcacagccagagtttggaccgtcttatgaatcctctcatcgaccagtacctgtattacttgagcagaacaaacactccaagcggaaccactacgcagtccaggcttcagttttctcaagccggagcgagtgacattcgggaccagtctaggaactggcttcctggaccctgttaccgccagcagcgagtatcaaagacagctgcggacaacaacaacagtgattactcgtggactggagctaccaagtatcacctcaatggaagagactctctggtgaatccgggcacagccatggccagccacaaggacgatgaagaaaagtattttcctcagagcggggttctcatcttcggaaaacaagactcgggaaaaactaatgtggacattgaaaaggtcatgattacagacgaagaggaaatcaggaccaccaatcccgtggctacggagcagtatggttctgtatctaccaatctccagagcggcaacacacaagcagctacctcagatgtcaacacacaaggcgttcttccaggcatggtccggcaggacagagacgtgtacctgcagggacccatctgggcaaagattccacacacggacggacattttcacccttctcctcttatgggaggatttggactgaagcaccctcccccgcagattctcatcaagaataccccggtacctgcgaatccttctaccaccttcagcgcggcaaagtttgcttccttcatcacacagtactccacggggcaggtcagcgtggagatcgagtgggagccgcagaaagagaacagcaaacgctggaaccccgagatccagtatacctccaactacaacaagtctgttaatgtggactttactgtggacactaatggcgtgtattcagagcctcgccccattggcacaagatacctgactcgtaatctgtaa

SEQ ID NO: 3373 - DNA, 2208 bp, Artificial Sequence
  Description of Artificial Sequence: Synthetic polynucleotide
atggctgccgatggttatcttccagattggctcgaggacactctctctgaaggaataagacagtggtggaagctcaaacctggcccaccaccgccaaagcccgcagagcggcataaggacgacagcaggggtcttgtgcttcctgggtacaagtacctcggacccttcaacggactcgacaaaggagagccggtcaacgaggcagacgccgcggccctcgagcacgacaaggcctacgaccggcagctcgacagcggagacaacccgtacctcaagtacaaccacgccgacgcggagtttcaggagcgccttaaagaagatacgtcttttgggggcaacctcgcaagagcagtattccaggcgaaaaagagggttcttgaacctctgggcctggttgaggagcctgttaagacggctccgggaaaaaagaggccggcagagcactctcctgcggagccagattcctcctccggaactggaaagtcgggccaacagcctgcaagaaagagattgaattttggtcagactggagacgcagactccgtacctgacccccagcctctcggacagccaccagcagccccctctggtctgggaactaatacgatggcttcaggcagtggcgcaccaatggcagacaataacgagggcgccgacggagtgggtaattcctcgggaaattggcattgcgattccacatggatgggcgacagagtcatcaccaccagcacccgcacctgggctctgcccacctacaacaaccatctgtacaagcaaatttccagccagtctggagccagcaacgacaaccactactttggctacagcaccccttgggggtattttgacttcaacagattccactgccacttctccccacgtgactggcaaagactcatcaacaacaattggggattccggcccaaaagactcaacttcaagctctttaacattcaagtcaaggaggtcacgcagaatgacggtacgacgacgattgccaataaccttaccagcacggttcaggtgtttactgactcggagtaccagctcccgtacgtcctcggctcggcgcatcaaggatgcctcccgccgttcccagcagacgtcttcatggtgccacagtatggatacctcaccctgaacaacgggagtcaggcggtaggacgctcttcattttactgcctagagtactttccttctcagatgctgcgtaccggaaacaactttaccttcagctacacctttgaggacgttccttttcacagcagctacgctcacagccagagtttggaccgtcttatgaatcctctcatcgaccagtacctgtattacttgagcagaacaaacactccaagcggaaccactacgcagtccaggcttcagttttctcaagccggagcgagtgacattcgggaccagtctaggaactggcttcctggaccctgttaccgccagcagcgagtatcaaagacagctgcggacaacaacaacagtgattactcgtggactggagctaccaagtatcacctcaatggaagagactctctggtgaatccgggcacagccatggccagccacaaggacgatgaagaaaagtattttcctcagagcggggttctcatcttcggaaaacaagactcgggaaaaactaatgtggacattgaaaaggtcatgattacagacgaagaggaaatcaggaccaccaatcccgtggctacggagcagtatggttctgtatctaccaatctccagagcggcaacacacaagcagctacctcagatgtcaacacacaaggcgttcttccaggcatggtccggcaggacagagacgtgtacctgcagggacccatctgggcaaagattccacacacggacggacattttcacccttctcctcttatgggaggatttggactgaagcaccctcccccgcagattctcatcaagaataccccggtacctgcgaatccttctaccaccttcagcgcggcaaagtttgcttccttcatcacacagtactccacggggcaggtcagcgtggagatcgagtgggagccgcagaaagagaacagcaaacgctggaaccccgagatccagtatacctccaactacaacaagtctgttaatgtggactttactgtggacactaatggcgtgtattcagagcctcgccccattggcacaagatacctgactcgtaatctgtaa

SEQ ID NO: 3374 - DNA, 2208 bp, Artificial Sequence
  Description of Artificial Sequence: Synthetic polynucleotide
atggctgccgatggttatcttccagattggctcgaggacactctctctgaaggaataagacagtggtggaagctcaaacctggcccaccaccgccaaagcccgcagagcggcataaggacgacagcaggggtcttgtgcttcctgggtacaagtacctcggacccttcaacggactcgacaaaggagagccggtcaacgaggcagacgccgcggccctcgagcacgacaaggcctacgaccggcagctcgacagcggagacaacccgtacctcaagtacaaccacgccgacgcggagtttcaggagcgccttaaagaagatacgtcttttgggggcaacctcgcaagagcagtattccaggcgaaaaagagggttcttgaacctctgggcctggttgaggagcctgttaagacggctccgggaaaaaagaggccggtagagcactctcctgcggagccagattcctcctccggaactggaaagtcgggccaacagcctgcaagaaagagattgaattttggtcagactggagacgcagactccgtacctgacccccagcctctcggacagccaccagcagccccctctggtctgggaactaatacgatggcttcaggcagtggcgcaccaatggcagacaataacgagggcgccgacggagtgggtaattcctcgggaaattggcattgcgattccacatggatgggcgacagagtcatcaccaccagcacccgcacctgggctctgcccacctacaacaaccatctgtacaagcaaatttccagccagtctggagccagcaacgacaaccactactttggctacagcaccccttgggggtattttgacttcaacagattccactgccacttctccccacgtgactggcaaagactcatcaacaacaattggggattccggcccaaaagactcaacttcaagctctttaacattcaagtcaaggaggtcacgcagaatgacggtacgacgacgattgccaataaccttaccagcacggttcaggtgtttactgactcggagtaccagctcccgtacgtcctcggctcggcgcatcaaggatgcctcccgccgttcccagcagacgtcttcatggtgccacagtatggatacctcaccctgaacaacgggagtcaggcggtaggacgctcttcattttactgcctggagtactttccttctcagatgctgcgtaccggaaacaactttaccttcagctacacctttgaggacgttccttttcacagcagctacgctcacagccagagtttggaccgtcttatgaatcctctcatcgaccagtacctgtattacttgagcagaacaaacactccaagcggaaccactacgcagtccaggcttcagttttctcaagccggagcgagtgacattcgggaccagtctaggaactggcttcctggaccctgttaccgccagcagcgagtatcaaggacagctgcggacaacaacaacagtgattactcgtggactggagctaccaagtatcacctcaatggaagagactctctggtgaatccgggcacagccatggccagccacaaggacgatgaagaaaagtattttcctcagagcggggttctcatcttcggaaaacaagactcgggaaaaactaatgtggacattgaaaaggtcatgattacagacgaagaggaaatcaggaccaccaatcccgtggctacggagcagtatggttctgtatctaccaatctccagagcggcaacacacaagcagctacctcagatgtcaacacacaaggcgttcttccaggcatggtccggcaggacagagacgtgtatctgcagggacccatctgggcaaagattccacacacggacggacattttcacccttctcctcttatgggaggatttggactgaagcaccctcccccgcagattctcatcaagaataccccggtacctgcgaatccttctaccaccttcagcgcggcaaagtttgcttccttcatcacacagtactccacggggcaggtcagcgtggagatcgagtgggagccgcagaaagagaacagcaaacgctggaaccccgagatccagtatacctccaactacaacaagtctgttaatgtggactttactgtggacactaatggcgtgtattcagagcctcgccccattggcacaagatacctgactcgtaatctgtaa

SEQ ID NO: 3375 - DNA, 2208 bp, Artificial Sequence
  Description of Artificial Sequence: Synthetic polynucleotide
atggctgccgatggttatcttccagattggctcgaggacactctctctgaaggaataagacagtggtggaagctcaaacctggcccaccaccgccaaagcccgcagagcggcataaggacgacagcaggggtcttgtgcttcctgggtacaagtacctcggacccttcaacggactcgacaaaggagagccggtcaacgaggcagacgccgcggccctcgagcacgacaaggcctacgaccggcagctcgacagcggagacaacccgtacctcaagtacaaccacgccgacgcggagtttcaggagcgccttaaagaagatacgtcttttgggggcaacctcgcaagagcagtattccaggcgaaaaagagggttcttgaacctctgggcctggttgaggagcctgttaagacggctccgggaaaaaagaggccggtagagcactctcctgcggggccagattcctcctccggaactggaaagtcgggccaacagcctgcaagaaagagattgaattttggtcagactggagacgcagactccgtacctgacccccagcctctcggacagccaccagcagccccctctggtctgggaactaatacgatggcttcaggcagtggcgcaccaatggcagacaataacgagggcgccgacggagtgggtaattcctcgggaaattggcattgcgattccacatggatgggcgacagagtcatcaccaccagcacccgcacctgggctctgcccacctacaacaaccatctgtacaagcaaatttccagccagtctggagccagcaacgacaaccactactttggctacagcaccccttgggggtattttgacttcaacagattccactgccacttctccccacgtgactggcaaagactcatcaacaacaattggggattccgggccaaaagactcaacttcgagctctttaacattcaagtcaaggaggtcacgcagaatgacggtacgacgacgattgccaataaccttaccagcacggttcaggtgtttactgactcggagtaccagctcccgtacgtcctcggctcggcgcatcaaggatgcctcccgccgttcccagcagacgtcttcatggtgccacagtatggatacctcaccctgaacaacgggagtcaggcggtaggacgctcttcattttactgcctggagtactttccttctcagatgctgcgtaccggaaacaactttaccttcagctacacctttgaggacgttccttttcacagcagctacgctcacagccagagtttggaccgtctcatgaatcctctcatcgaccagtacctgtattacttgagcagaacaaacactccaagcggaaccactacgcagtccaggcttcagttttctcaagccggagcgagtgacattcgggaccagtctaggaactggcttcctggaccctgttaccgccagcagcgagtatcaaagacagctgcggacaacaacaacagtgattactcgtggactggagctaccaagtatcacctcaatggaagagactctctggtgaatccgggcacagccatggccagccacaaggacgatgaagaaaagtattttcctcagagcggggttctcatcttcggaaaacaagactcgggaaaaactaatgtggacattgaaaaggtcatgattacagacgaagaggaaatcaggaccaccaatcccgtggctacggagcagtatggttctgtatctaccaatctccagagcggcaacacacaagcagctacctcagatgtcaacacacaaggcgttcttccaggcatggtctggcaggacagagacgtgtacctgcagggacccatctgggcaaagattccacacacggacggacactttcacccttctcctcttatgggaggatttggactgaagcaccctcccccgcagattctcatcaagagtaccccggtacctgcgaatccttctaccaccttcagcgcggcaaagtttgcttccttcatcacacagtactccacggggcaggtcagcgtggagatcgagtgggagctgcagaaagagaacagcaaacgctggaaccccgagatccagtatacctccaactacaacaagtctgttaatgtggactttactgtggacactaatggcgtgtattcagagcctcgccccattggcacaagatacctgactcgtaatctgtaa

SEQ ID NO: 3376 - DNA, 2208 bp, Artificial Sequence
  Description of Artificial Sequence: Synthetic polynucleotide
atggctgccgatggttatcttccagattggctcgaggacactctctctgaaggaataagacagtggtggaagctcaaacctggcccaccaccgccaaagcccgcagagcggcataaggacgacagcaggggtcttgtgcttcctgggtacaagtacctcggacccttcaacggactcgacaaaggagagccggtcaacgaggcagacgccgcggccctcgagcacgacaaggcctacgaccggcagctcgacagcggagacaacccgtacctcaagtacaaccacgccgacgcggagtttcaggagcgccttaaagaagatacgtcttttgggggcaacctcgcaagagcagtattccaggcgaaaaagagggttcttgaacctctgggcctggttgaggagcctgttaagacggctccgggaaaaaagaggccggtagagcactctcctgcggagccagattcctcctccggaactggaaagtcgggccaacagcctgcaagaaagagattgaattttggtcagactggagacgcagactccgtacctgacccccagcctctcggacagccaccagcagccccctctggtctgggaactaatacgatggcttcaggcagtggcgcaccaatggcagacaataacgagggcgccgacggagtgggtaattcctcgggaaattggcattgcgattccacatggatgggcgacagagtcatcaccaccagcacccgcacctgggctctgcccacctacaacaaccatctgtacaagcaaatttccagccagtctggagccagcaacgacaaccactactttggctacagcaccccttgggggtattttgacttcaacagattccactgccacttctccccacgtgactggcaaagactcatcaacaacaattggggattccggcccaaaagactcaacttcaagctctttaacattcaagtcaaggaggtcacgcagaatgacggtacgacgacgattgccaataaccttaccagcacggttcaggtgtttactgactcggagtaccagctcccgtacgtcctcggctcggcgcatcaaggatgcctcccgccgttcccagcagacgtcttcatggtgccacagtatggatacctcaccctgaacaacgggagtcaggcggtaggacgctcttcattttactgcctggagtactttccttctcagatgctgcgtaccggaaacaactttaccttcagctacacctttgaggacgttccttttcacagcagctacgctcacagccagagtttggaccgtctcatgaatcctctcatcgaccagtacctgtattacttgagcagaacaaacactccaagcggaaccactacgcagtccaggcttcggttttctcaagccggagcgagtgacattcgggaccagtctaggaactggcttcctggaccctgttaccgccagcagcgagtatcaaagacagctgcggacaacaacaacagtgattactcgtggactggagctaccaagtatcacctcaatggaagagactctctggtgaatccgggcacagccatggccagccacaaggacgatgaagaaaagtattttcctcagagcggggttctcatcttccggaaacaagactcgggaaaaactaatgtggacattgaaagggtcatgattacagacgaagaggaaatcaggaccaccaatcccgtggctacggagcagtatggttctgtatctaccaatctccagagcggcaacacacaagcagctacctcagatgtcaacacacaaggcgttcttccaggcatggtctggcaggacagagacgtgtacctgcagggacccatctgggcaaagattccacacacggacggacattttcacccttctcctcttatgggaggatttggactgaagcaccctcccccgcagattctcatcaagaataccccggtacctgcgaatccttctaccaccttcagcgcggcaaagtttgcttccttcatcacacagtactccacggggcaggtcagcgtggagatcgagtgggagctgcagaaagagaacagcaaacgctggaaccccgagatccagtatacctccaactacaacaagtctgttaatgtggactttactgtggacactaatggcgtgtattcagagcctcgccccattggcacaagatacctgactcgtaatctgtaa

SEQ ID NO: 3377 - DNA, 2208 bp, Artificial Sequence
  Description of Artificial Sequence: Synthetic polynucleotide
atggctgccgatggttatcttccagattggctcgaggacactctctctgaaggaataagacagtggtggaagctcaaacctggcccaccaccgccaaagcccgcagagcggcataaggacgacagcaggggtcttgtgcttcctgggtacaagtacctcggacccttcaacggactcgacaaaggagagccggtcaacgaggcagacgccgcggccctcgagcacgacaaggcctacgaccggcagctcgacagcggagacaacccgtacctcaagtacaaccacgccgacgcggagtttcaggagcgccttaaagaagatacgtcttttgggggcaacctcgcaagagcagtattccaggcgaaaaagagggttcttgaacctctgggcctggttgaggagcctgttaagacggctccgggaaaaaagaggccggtagagcactctcctgcggagccagattcctcctccggaactggaaagtcgggccaacagcctgcaagaaagagattgaattttggtcagactggagacgcagactccgtacctgacccccagcctctcggacagccaccagcagccccctctggtctgggaactaatacgatggcttcaggcagtggcgcaccaatggcagacaataacgagggcgccgacggagtgggtaattcctcgggaaattggcattgcgattccacatggatgggcgacagagtcatcaccaccagcacccgcacctgggctctgcccacctacaacaaccatctgtacaagcaaatttccagccagtctggagccagcaacgacaaccactactttggctacagcaccccttgggggtattttgacttcaacagattccactgccacttctccccacgtgactggcaaagactcatcaacaacaattggggattccgggccaaaagactcaacttcaagctctttaacattcaagtcaaggaggtcacgcagaatgacggtacgacgacgattgccaataaccttaccagcacggttcaggtgtttactgactcggagtaccagctcccgtacgtcctcggctcggcgcatcaaggatgcctcccgccgttcccagcagacgtcttcatggtgccacagtatggatacctcaccctgaacaacgggagtcaggcggtaggacgctcttcattttactgcctggagtactttccttctcagatgctgcgtaccggaaacaactttaccttcagctacacctttgaggacgttccttttcacagcagctacgctcacagccagagtttggaccgtctcatgaatcctctcatcgaccagtacctgtattacttgagcagaacaaacactccaagcggaaccactacgcagtccaggcttcggttttctcaagccggagcgagtgacattcgggaccagtctaggaactggcttcctggaccctgttaccgccagcagcgagtatcaaagacagctgcggacaacaacaacagtgattactcgtggactggagctaccaagtatcacctcaatggaagagactctctggtgaatccgggcacagccatggccagccacaaggacgatgaagaaaagtattttcctcagagcggggttctcatcttcggaaaacaagactcgggaaaaactaatgtggacattgaaagggtcatgattacagacgaagaggaaatcaggaccaccaatcccgtggctacggagcagtatggttctgtatctaccaatctccagagcggcaacacacaagcagctacctcagatgtcaacacacaaggcgttcttccaggcatggtctggcaggacagagacgtgtacctgcagggacccatctgggcaaagattccacacacggacggacattttcacccttctcctcttatgggaggatttggactgaagcaccctcccccgcagattctcatcaagaataccccggtacctgcgaatccttctaccaccttcagcgcggcaaagtttgcttccttcatcacacagtactccacggggcaggtcagcgtggagatcgagtgggagctgcagaaagagaacagcaaacgctggaaccccgagatccagtatacctccaactacaacaagtctgttaatgtggactttactgtggacactaatggcgtgtattcagagcctcgccccattggcacaagatacctgactcgtaatctgtaa

SEQ ID NO: 3378 - DNA, 2208 bp, Artificial Sequence
  Description of Artificial Sequence: Synthetic polynucleotide
atggctgccgatggttatcttccagattggctcgaggacactctctctgaaggaataagacagtggtggaagctcaaacctggcccaccaccaccaaggcccgcagagcggcatcaggacgacagcaggggtcttgtgcttcctgggtacaagtacctcggacccttcaacggactcgacaaaggagagccggtcaacgaggcagacgctgcggccctcgagcacgacaaggcctacgaccggcagctcgacagcggagacaacccgtacctcaagtacaaccacgccgacgcggagtttcaggagcgtcttaaagaagatacgtcttttgggggcaacctcggacgagcagtcttccaggcgaaaaagagggttcttgaacctctgggcctggttgaggaacctgttaagacggctccgggaaaaaagaggccggtagagcactctcctgcggagccagactcctcctcgggaaccggaaaagcgggccagcagcctgcaagaaagagattgaatttcggtcagactggagacgcagactccgtacctgacccccagcctctcggacagccaccagcagcccccacaagtttgggatctactacaatggctacaggcagtggcgcaccaatggcagacaataacgagggtgccgatggagtgggtaattcctcaggaaattggcattgcgattcccaatggctgggcgacagagtcatcaccaccagcacccgaacctgggccctgcccacctacaacaaccacctctacaagcaaatctccagccaatcaggagcatcgaacgacaaccactactttggctacagcaccccttgggggtattttgacttcaacagattccactgccacttctccccacgtgactggcaaagactcatcaacaacaattggggattccggcccaaaagactcaacttcgagctctttaacattcaagtcaaggaggtcacgcagaatgacggtacgacgacgattgccaataaccttaccagcacggttcaggtgtttactgactcggagtaccagctcccgtacgtcctcggctcggcgcatcaaggatgcctcccgccgttcccagcagacgtcttcatggtgccacagtatggatacctcaccctgaacaacgggagtcaggcggtaggacgctcttcattttactgcctggagtactttccttctcagatgctgcgtaccggaaacaactttaccttcagctacacctttgaggacgttccttttcacagcagctacgctcacagccagagtttggaccgtctcatgaatcctctcatcgaccagtacctgtattacttgagcagaacaaacactccaagcggaaccactacgcagtccaggcttcagttttctcaagccggagcgagtgacattcgggaccagtctaggaactggcttcctggaccctgttaccgccagcagcgagtatcaaagacagctgcggacaacaacaacagtgattactcgtggactggagctaccaagtatcacctcaatggaagagactctctggtgaatccgggcacagccatggccagccacaaggacgatgaagaaaagtattttcctcagagcggggttctcatcttcggaaaacaagactcgggaaaaactaatgtggacattgaaaaggtcatgattacagacgaagaggaaatcaggaccaccaatcccgtggctacggagcagtatggttctgtatctaccaatctccagagcggcaacacacaagcagctacctcagatgtcaacacacaaggcgttcttccaggcatggtctggcaggacagagacgtgtacctgcagggacccatctgggcaaagattccacacacggacggacactttcacccttctcctcttatgggaggatttggactgaagcaccctcccccgcagattctcatcaagagtaccccggtacctgcgaatccttctaccaccttcagcgcggcaaagtttgcttccttcatcacacagtactccacggggcaggtcagcgtggagatcgagtgggagctgcagaaagagaacagcaaacgctggaaccccgagatccagtatacctccaactacaacaagtctgttaatgtggactttactgtggacactaatggcgtgtattcagagcctcgccccattggcacaagatacctgactcgtaatctgtaa

SEQ ID NO: 3379 - DNA, 2208 bp, Artificial Sequence
  Description of Artificial Sequence: Synthetic polynucleotide
atggctgccgatggttatcttccagattggctcgaggacactctctctgaaggaataagacagtggtggaagctcaaacctggcccaccaccgccaaagcccgcagagcggcataaggacgacagcaggggtcttgtgcttcctgggtacaagtacctcggacccttcaacggactcgacaaaggagagccggtcaacgaggcagacgccgcggccctcgagcacgacaaggcctacgaccggcagctcgacagcggagacaacccgtacctcaagtacaaccacgccgacgcggagtttcaggagcgccttaaagaagatacgtcttttgggggcaacctcgcaagagcagtattccaggcgaaaaagagggttcttgaacctctgggcctggttgaggagcctgttaagacggctccgggaaaaaagaggccggtagagcactctcctgcggggccagattcctcctccggaactggaaagtcgggccaacagcctgcaagaaagagattgaattttggtcagactggagacgcagactccgtacctgacccccagcctctcggacagccaccagcagccccctctggtctgggaactaatacgatggcttcaggcagtggcgcaccaatggcagacaataacgagggcgccgacggagtgggtaattcctcgggaaattggcattgcgattccacatggatgggcgacagagtcatcaccaccagcacccgcacctgggctctgcccacctacaacaaccatctgtacaagcaaatttccagccagtctggagccagcaacgacaaccactactttggctacagcaccccttgggggtattttgacttcaacagattccactgccacttctccccacgtgactggcatagactcatcaacaacaattggggattccggcccaaaagactcaacttcgagctctttaacattcaagtcaaggaggtcacgcagaatgacggtacgacgacgattgccaataaccttaccagcacggttcaggtgtttactgactcggagtaccagctcccgtacgtcctcggctcggcgcatcaaggatgcctcccgccgttcccagcagacgtcttcatggtgccacagtatggatacctcaccctgaacaacgggagtcaggcggtaggacgctcttcattttactgcctggagtactttccttctcagatgctgcgtaccggaaacaactttaccttcagctacacctttgaggacgttccttttcacagcagctacgctcgcagccagagtttggaccgtctcatgaatcctctcatcgaccagtacctgtattacttgagcagaacaaacactccaagcggaaccactacgcagtccaggcttcagttttctcaagccggagcgagtgacattcgggaccagtctaggaactggcttcctggaccctgttaccgccagcagcgagtatcaaagacagctgcggacaacaacaacagtgattactcgtggactggagctaccaagtatcacctcaatggaagagactctctggtgaatccgggcacagccatggccagccacaaggacgatgaagaaaagtattttcctcagagcggggttctcatcttcggaaaacaagactcgggaaaaactaatgtggacattgaaaaggtcatgattacagacgaagaggaaatcaggaccaccaatcccgtggctacggagcagtatggttctgtatctaccaatctccagagcggcaacacacaagcagctacctcagatgtcaacacacaaggcgttcttccaggcatggtctggcaggacagagacgtgtacctgcagggacccatctgggcaaagattccacacacggacggacactttcacccttctcctcttatgggaggatttggactgaagcaccctcccccgcagattctcatcaagagtaccccggtacctgcgaatccttctaccaccttcagcgcggcaaagtttgcttccttcatcacacagtactccacggggcaggtcagcgtggagatcgagtgggagctgcagaaagagaacagcaaacgctggaaccccgagatccagtatacctccaactacaacaagtctgttaatgtggactttactgtggacactaatggcgtgtattcagagcctcgccccattggcacaagatacctgactcgtaatctgtaa

SEQ ID NO: 3380 - DNA, 2208 bp, Artificial Sequence
  Description of Artificial Sequence: Synthetic polynucleotide
atggctgccgatggttatcttccagattggctcgaggacactctctctgaaggaataagacagtggtggaagctcaaacctggcccaccaccgccaaagcccgcagagcggcataaggacgacagcaggggtcttgtgcttcctgggtacaagtacctcggacccttcaacggactcgacaaaggagagccggtcaacgaggcagacgccgcggccctcgagcacgacaaggcctacgaccggcagctcgacagcggagacaacccgtacctcaagtacaaccacgccgacgcggagtttcaggagcgccttaaagaagatacgtcttttgggggcaacctcgcaagagcagtattccaggcgaaaaagagggttcttgaacctctgggcctggttgaggagcctgttaagacggctccgggaaaaaagaggccggtagagcactctcctgcggggccagattcctcctccggaactggaaagtcgggccaacagcctgcaagaaagagattgaattttggtcagactggagacgcagactccgtacctgacccccagcctctcggacagccaccagcagccccctctggtctgggaactaatacgatggcttcaggcagtggcgcaccaatggcagacaataacgagggcgccgacggagtgggtaattcctcgggaaattggcattgcgattccacatggatgggcgacagagtcatcaccaccagcacccgcacctgggctctgcccacctacaacaaccatctgtacaagcaaatttccagccagtctggagccagcaacgacaaccactactttggctacagcaccccttgggggtattttgacttcaacagattccactgccacttctccccacgtgactggcaaagactcatcaacaacaattggggattccggcccaaaagactcaacttcgagctctttaacattcaagtcaaggaggtcacgcagaatgacggtacgacgacgattgccaataaccttaccagcacggttcaggtgtttactgactcggagtaccagctcccgtacgtcctcggctcggcgcatcaaggatgcctcccgccgttcccagcagacgtcttcatggtgccacagtatggatacctcaccctgaacaacgggagtcaggcggtaggacgctcttcattttactgcctggagtactttccttctcagatgctgcgtaccggaaacaactttaccttcagctacacctttgaggacgttccttttcacagcagctacgctcacagccagagtttggaccgtctcatgaatcctctcatcgaccagtacctgtattacttgagcagaacaaacactccaagcggaaccactacgcagtccaggcttcagttttctcaagccggagcgagtgacattcgggaccagtctaggaactggcttcctggaccctgttaccgccagcagcgagtatcaaagacagctgcggacaacaacaacagtgattactcgtggactggagctaccaagtatcacctcaatggaagagactctctggtgaatccgggcacagccatggccagccacaaggacgatgaagaaaagtattttcctcagagcggggttctcatcttcggaaaacaagactcgggaaaaactaatgtggacattgaaaaggtcatgattacagacgaagaggaaatcaggaccaccaatcccgtggctacggagcagtatggttctgtatctaccaatctccagagcggcaacacacaagcagctacctcagatgtcaacacacaaggcgttcttccaggcatggtctggcaggacagagacgtgtacctgcagggacccatctgggcaaagattccacacacggacggacactttcacccttctcctcttatgggaggatttggactgaagcaccctcccccgcagattctcatcaagagtaccccggtacctgcgaatccttctaccaccttcagcgcggcaaagtttgcttccttcatcacacagtactccacggggcaggtcagcgtggagatcgagtgggagctgcagaaggagaacagcaaacgctggaaccccgagatccagtacacttccaactacaacaaatctgttaatgtggactttactgtggacgctaatggtgtgtattcagagcctcgccccattggcaccagatacctgactcgtaatctgtaa

SEQ ID NO: 3381 - DNA, 2208 bp, Artificial Sequence
  Description of Artificial Sequence: Synthetic polynucleotide
atggctgccgatggttatcttccagattggctcgaggacactctctctgaaggaataagacagtggtggaagctcaaacctggcccaccaccgccaaagcccgcagagcggcataaggacgacagcaggggtcttgtgcttcctgggtacaagtacctcggacccttcaacggactcgacaaaggagagccggtcaacgaggcagacgccgcggccctcgagcacgacaaggcctacgaccggcagctcgacagcggagacaacccgtacctcaagtacaaccacgccgacgcggagtttcaggagcgccttaaagaagatacgtcttttgggggcaacctcgcaagagcagtattccaggcgaaaaagagggttcttgaacctctgggcctggttgaggagcctgttaagacggctccgggaaaaaagaggccggtagagcactctcctgcggggccagattcctcctccggaactggaaagtcgggccaacagcctgcaagaaagagattgaattttggtcagactggagacgcagactccgtacctgacccccagcctctcggacagccaccagcagccccctctggtctgggaactaatacgatggcttcaggcagtggcgcaccaatggcagacaataacgagggcgccgacggagtgggtaattcctcgggaaattggcattgcgattccacatggatgggcgacagagtcatcaccaccagcacccgcacctgggctctgcccacctacaacaaccatctgtacaagcaaatttccagccagtctggagccagcaacgacaaccactactttggctacagcaccccttgggggtattttgacttcaacagattccactgccacttctccccacgtgactggcaaagactcatcaacaacaatttgggattccgggccaaaagactcaacttcgagctctttaacattcaagtcaaggaggtcacgcagaatgacggtacgacgacgattgccaataaccttaccagcacggttcaggtgtttactgactcggagtaccagctcccgtacgtcctcggctcggcgcatcaaggatgcctcccgccgttcccagcagacgtcttcatggtgccacagtatggatacctcaccctgaacaacgggagtcaggcggtaggacgctcttcattttactgcctggagtactttccttctcagatgctgcgtaccggaaacaactttaccttcagctacacctttgaggacgttccttttcacagcagctacgctcacagccagagtttggaccgtctcatgaatcctctcatcgaccagtacctgtattacttgagcagaacaaacactccaagcggaaccactacgcagtccaggcttcagttttctcaagccggagcgagtgacattcgggaccagtctaggaactggcttcctggaccctgttaccgccagcagcgagtatcaaagacagctgcggacaacaacaacagtgattactcgtggactggagctaccaagtatcacctcaatggaagagactctctggtgaatccgggcacagccatggccagccacaaggacgatgaagaaaagtattttcctcagagcggggttctcatcttcggaaaacaagactcgggaaaaactaatgtggacattgaaaaggtcatgattacagacgaagaggaaatcaggaccaccaatcccgtggctacggagcagtatggttctgtatctaccaatctccagagcggcaacacacaagcagctacctcagatgtcaacacacaaggcgttcttccaggcatggtctggcaggacagagacgtgtacctgcagggacccatctgggcaaagattccacacacggacggacactttcacccttctcctcttatgggaggatttggactgaagcaccctcccccgcagattctcatcaagagtaccccggtacctgcgaatccttctaccaccttcagcgcggcaaagtttgcttccttcatcacacagtactccacggggcaggtcagcgtggagatcgagtgggagctgcagaaagagaacagcaaacgctggaaccccgagatccagtatacctccaactacaacaagtctgttaatgtggactttactgtggacactaatggcgtgtattcagagcctcgccccattggcacaagatacctgactcgtaatctgtaa

SEQ ID NO: 3382 - DNA, 2208 bp, Artificial Sequence
  Description of Artificial Sequence: Synthetic polynucleotide
atggctgccgatggttatcttccagattggctcgaggacactctctctgaaggaataagacagtggtggaagctcaaacctggcccaccaccgccaaagcccgcagagcggcataaggacgacagcaggggtcttgtgcttcctgggtacaagtacctcggacccttcaacggactcgacaaaggagagccggtcaacgaggcagacgccgcggccctcgagcacgacaaggcctacgaccggcagctcgacagcggagacaacccgtacctcaagtacaaccacgccgacgcggagtttcaggagcgccttaaagaagatacgtcttttgggggcaacctcgcaagagcagtattccaggcgaaaaagagggttcttgaacctctgggcctggttgaggagcctgttaagacggctccgggaaaaaagaggccggtagagcactctcctgcggagccagattcctcctccggaactggaaagtcgggccaacagcctgcaagaaagagattgaattttggtcagactggagacgcagactccgtacctgacccccagcctctcggacagccaccagcagccccctctggtctgggaactaatacgatggcttcaggcagtggcgcaccaatggcagacaataacgagggcgccgacggagtgggtaattcctcgggaaattggcattgcgattccacatggatgggcgacagagtcatcaccaccagcacccgcacctgggctctgcccacctacaacaaccatctgtacaagcaaatttccagccagtctggagccagcaacgacaaccactactttggctacagcaccccttgggggtattttgacttcaacagattccactgccacttctccccacgtgactggcaaagactcatcaacaacaattggggattccggcccaaaagactcaacttcgagctctttaacattcaagtcaaggaggtcacgcagaatgacggtacgacgacgattgccaataaccttaccagcacggttcaggtgtttactgactcggagtaccagctcccgtacgtcctcggctcggcgcatcaaggatgcctcccgccgttcccagcagacgtcttcatggtgccacagtatggatacctcaccctgaacaacgggagtcaggcggtaggacgctcttcattttactgcctggagtactttccttctcagatgctgcgtaccggaaacaactttaccttcagctacacctttgaggacgttccttttcacagcagctacgctcacagccagagtttggaccgtctcatgaatcctctcatcgaccagtacctgtattacttgagcagaacaaacactccaagcggaaccactacgcagtccaggcttcagttttctcaagccggagcgagtgacattcgggaccagtctaggaactggcttcctggaccctgttaccgccagcagcgagtatcaaagacagctgcggacaacaacaacagtgattactcgtggactggagctaccaagtatcacctcaatggaagagactctctggtgaatccgggcacagccatggccagccacaaggacgatgaagaaaagtattttcctcagagcggggttctcatcttccggaaacaagactcgggaaaaactaatgtggacattgaaaaggtcatgattacagacgaagaggaaatcaggaccaccaatcccgtggctacggagcagtatggttctgtatctaccaatctccagagcggcaacacacaagcagctacctcagatgtcaacacacaaggcgttcttccaggcatggtctggcaggacagagacgtgtacctgcagggacccatctgggcaaagattccacacacggacggacactttcacccttctcctcttatgggaggatttggactgaagcaccctcccccgcagattctcatcaagagtaccccggtacctgcgaatccttctaccaccttcagcgcggcaaagtttgcttccttcatcacacagtactccacggggcaggtcagcgtggagatcgagtgggagctgcagaaagagaacagcaaacgctggaaccccgagatccagtatacctccaactacaacaagtctgttaatgtggactttactgtggacactaatggcgtgtattcagagcctcgccccattggcacaagatacctgactcgtaatctgtaa

SEQ ID NO: 3383 - DNA, 2208 bp, Artificial Sequence
  Description of Artificial Sequence: Synthetic polynucleotide
atggctgccgatggttatcttccagattggctcgaggacactctctctgaaggaataagacagtggtggaagctcaaacctggcccaccaccaccaaagcccgcagagcggcatcaggacgacagcaggggtcttgtgcttcccgggcacaagtacctcggacccttcaacggactcgacaaaggagagccggtcaacgaggcagacgctgcggccctcgagcacgacaaggcctacgaccggcagctcgacagcggagacaacccgtacctcaagtacaaccacgccgacgcggagtttcaggagcgtcttaaagaagatacgtcttttgggggcaacctcggacgagcagtcttccaggcgaaaaagagggttcttgaacctctgggcctggttgaggagcctgttaagacggctccgggaaaaaagaggccggtagagcactctcctgcggggccagattcctcctccggaactggaaagtcgggccaacagcctgcaagaaagagattgaattttggtcagactggagacgcagactccgtacctgacccccagcctctcggacagccaccagcagccccctctggtctgggaactaatacgatggcttcaggcagtggcgcaccaatggcagacaataacgagggcgccgacggagtgggtaattcctcgggaaattggcattgcgattccacatggatgggcgacagagtcatcaccaccagcacccgcacctgggctctgcccacctacaacaaccatctgtacaagcaaatttccagccagtctggagccagcaacgacaaccactactttggctacagcaccccttgggggtattttgacttcaacagattccactgccacttctccccacgtgactggcaaagactcatcaacaacaattggggattccggcccaaaagactcaacttcgagctctttaacattcaagtcaaggaggtcacgcagaatgacggtacgacgacgattgccaataaccttaccagcacggttcaggtgtttactgactcggagtaccagctcccgtacgtcctcggctcggcgcatcaaggatgcctcccgccgttcccagcagacgtcttcatggtgccacagtatggatacctcaccctgaacaacgggagtcaggcggtaggacgctcttcattttactgcctggagtactttccttctcagatgctgcgtaccggaaacaactttaccttcagctacacctttgaggacgttccttttcacagcagctacgctcacagccagagtttggaccgtctcatgaatcctctcatcgaccagtacctgtattacttgagcagaacaaacactccaagcggaaccactacgcagtccaggcttcagttttctcaagccggagcgagtgacattcgggaccagtctaggaactggcttcctggaccctgttaccgccagcagcgagtatcaaagacagctgcggacaacaacaacagtgattactcgtggactggagctaccaagtatcacctcaatggaagagactctctggtgaatccgggcacagccatggccagccacaaggacgatgaagaaaagtattttcctcagagcggggttctcatcttcggaaaacaagactcgggaaaaactaatgtggacattgaaaaggtcatgattacagacgaagaggaaatcaggaccaccaatcccgtggctacggagcagtatggttctgtatctaccaatctccagagcggcaacacacaagcagctacctcagatgtcaacacacaaggcgttcttccaggcatggtctggcaggacagagacgtgtacctgcagggacccatctgggcaaagattccacacacggacggacactttcacccttctcctcttatgggaggatttggactgaagcaccctcccccgcagattctcatcaagagtaccccggtacctgcgaatccttctaccaccttcagcgcggcaaagtttgcttccttcatcacacagtactccacggggcaggtcagcgtggagatcgagtgggagctgcagaaagagaacagcaaacgctggaaccccgagatccagtatacctccaactacaacaagtctgttaatgtggactttactgtggacactaatggcgtgtattcagagcctcgccccattggcacaagatacctgactcgtaatctgtaa

SEQ ID NO: 3384 - DNA, 2208 bp, Artificial Sequence
  Description of Artificial Sequence: Synthetic polynucleotide
atggctgccgatggttatcttccagattggctcgaggacactctctctgaaggaataagacagtggtggaagctcaaacctggcccaccaccgccaaagcccgcagagcggcataaggacgacagcaggggtcttgtgcttcctgggtacaagtacctcggacccttcaacggactcgacaaaggagagccggtcaacgaggcagacgccgcggccctcgagcacgacaaggcctacgaccggcagctcgacagcggagacaacccgtacctcaagtacaaccacgccgacgcggagtttcaggagcgccttaaagaagatacgtcttttgggggcaacctcgcaagagcagtattccaggcgaaaaagagggttcttgaacctctgggcctggttgaggagcctgttaagacggctccgggaaaaaagaggccggtagagcactctcctgcggggccagattcctcctccggaactggaaagtcgggccaacagcctgcaagaaagagattgaattttggtcagactggagacgcagactccgtacctgacccccagcctctcggacagccaccagcagccccctctggtctgggaactaatacgatggcttcaggcagtggcgcaccaatggcagacaataacgagggcgccgacggagtgggtaattcctcgggaaattggcattgcgattccacatggatgggcgacagagtcatcaccaccagcacccgcacctgggctctgcccacctacaacaaccatctgtacaagcaaatttccagccagtctggagccagcaacgacaaccactactttggctacagcaccccttgggggtattttgacttcaacagattccactgccacttctccccacgtgactggcatagactcatcaacaacaattggggattccggcccaaaagactcaacttcgagctctttaacattcaagtcaaggaggtcacgcagaatgacggtacgacgacgattgccaataaccttaccagcacggttcaggtgtttactgactcggagtaccagctcccgtacgtcctcggctcggcgcatcaaggatgcctcccgccgttcccagcagacgtcttcatggtgccacagtatggatacctcaccctgaacaacgggagtcaggcggtaggacgctcttcattttactgcctggagtactttccttctcagatgctgcgtaccggaaacaactttaccttcagctacacctttgaggacgttccttttcacagcagctacgctcacagccagagtttggaccgtctcatgaatcctctcatcgaccagtacctgtattacttgagcagaacaaacactccaagcggaaccactacgcagtccaggcttcagttttctcaagccggagcgagtgacattcgggaccagtctaggaactggcttcctggaccctgttaccgccagcagcgagtatcaaagacagctgcggacaacaacaacagtgattactcgtggactggagctaccaagtatcacctcaatggaagagactctctggtgaatccgggcacagccatggccagccacaaggacgatgaagaaaagtattttcctcagagcggggttctcatcttcggaaaacaagactcgggaaaaactaatgtggacattgaaaaggtcatgattacagacgaagaggaaatcaggaccaccaatcccgtggctacggagcagtatggttctgtatctaccaatctccagagcggcaacacacaagcagctacctcagatgtcaacacacaaggcgttcttccaggcatggtctggcaggacagagacgtgtacctgcagggacccatctgggcaaagattccacacacggacggacactttcacccttctcctcttatgggaggatttggactgaagcaccctcccccgcagattctcatcaagagtaccccggtacctgcgaatccttctaccaccttcagcgcggcaaagtttgcttccttcatcacacagtactccacggggcaggtcagcgtggagatcgagtgggagctgcagaaagagaacagcaaacgctggaaccccgagatccagtatacctccaactacaacaagtctgttaatgtggactttactgtggacactaatggcgtgtattcagagcctcgccccattggcacaagatacctgactcgtaatctgtaa

SEQ ID NO: 3385 - DNA, 2208 bp, Artificial Sequence
  Description of Artificial Sequence: Synthetic polynucleotide
atggctgccgatggttatcttccagattggctcgaggacactctctctgaaggaataagacagtggtggaagctcaaacctggcccaccaccgccaaagcccgcagagcggcataaggacgacagcaggggtcttgtgcttcctgggtacaagtacctcggacccttcaacggactcgacaagggggagccggtcaacgaggcagacgccgcggccctcgagcacgacaaggcctacgaccggcagctcgacagcggagacaacccgtacctcaagtacaaccacgccgacgcggagtttcaggagcgtcttaaagaagatacgtcttttgggggcaacctcggacgagcagtcttccaggcgaaaaagagggttcttgaacctctgggcctggttgaggaacctgttaagacggctccgggaaaaaagaggccggtagagcactctcctgtggagccagactcctcctcgggaaccggaaaggcgggccagcagcctgcaagaaaaagattgaatttcggtcagactggagacgcagactccgtacctgacccccagcctctcggacagccaccagcagccccctctggtctgggaactaatacgatggctacaggcagtggcgcaccaatggcagacaataacgagggcgccgacggagtgggtaattcctcgggaaattggcattgcgattccacatggatgggcgacagagtcatcaccaccagcacccgcacctgggctctgcccacctacaacaaccatctgtacaagcaaatttccagccaatcaggagcatcgaacgacaaccactactttggctacagcaccccctgggggtattttgacttcaacagattccactgccacttttcgccacgtgactggcaaagactcatcaacaacaactggggattccggcccaagagactcagcttcaagctctttaacattcaagtcaaggaggtcacgcagaatgacggtacgacgacgattgccaataaccttaccagcacggttcaggtctttactgactcggagtaccagctcccgtacgtcctcggctcggcgcatcaaggatgcctcccgccgttcccagcagacgtcttcatggtgccacagtatggatacctcaccctgaacaacgggagtcaggcggtaggacgctcttcattttactgcctggagtacttcccttctcagatgcttcgcacgggaaacaactttaccttcagctacacctttgaggacgtgccttttcacagcggctacgctcacagccaaagtctggaccgtctcatgaatcctctcatcgaccaatacctgtattacttgagcaaaacaaacgctccaagcggaaccaccacgatgtccaggcttcagttttctcaggccggagcgagtgacattcgggaccagtctagaaactggcttcctggaccctgttaccgccagcagcgagtatcaaagacagctgcggacaacaacaacagtgattactcgtggactggagctaccaagtaccacctcaatggaagagactctctggtgaacccgggcccagctatggccagccacaaggatgatgaagaaaaatattttcctcagagcggggttctcatcttcgggaaacaaggctcaaataaaactaatgtggacattgaaaaggttatgattacagacgaagaggaaatcaggaccaccaatcccgtggctacggagcagtatggttctgtatctaccaaccttcaaagcggcaacacacaagcagctacctcagatgtcaacacacaaggcgttcttcctggcatggtctggcaggacagagatgtgtacctgcaggggcccatctgggcaaagattcctcacacggacggacactttcacccttctcccctcatgggcggatttggattgaagcaccctcccccacagattctcatcaagaataccccggtacctgcgaatccttcgaccaccttcagtgcggcaaagtttgcttccttcatcacacagtattccacgggacaggtcagcgtggagatagagtgggagctgcagaaggagaacagcaaacgctggaaccccgagatccagtatacttccaactacaacaaatctgttaatgtggactttactgtggacactaatggtgtgtattcagagcctcgccccattggcaccagatacctgactcgtaatctgtaa

SEQ ID NO: 3386 - DNA, 2208 bp, Artificial Sequence
  Description of Artificial Sequence: Synthetic polynucleotide
atggctgccgatggttatcttccagattggctcgaggacactctctctgaaggaataagacagtggtggaagctcaaacctggcccaccaccaccaaggcccgcagagcggcatcaggacgacagcaggggtcttgtgcttcctgggtacaagtacctcggacccttcaacggactcgacaaaggagagccggtcaacgaggcagacgctgcggccctcgagcacgacaaggcctacgaccggcagctcgacagcggagacaacccgtacctcaagtacaaccacgccgacgcggagtttcaggagcgtcttaaagaagatacgtcttttgggggcaacctcggacgagcagtcttccaggcgaaaaagagggttcttgaacctctgggcctggttgaggaacctgttaagacggctccgggaaaaaagaggccggtagagcactctcctgcggagccagactcctcctcgggaaccggaaaagcgggccagcagcctgcaagaaagagattgaatttcggtcagactggagacgcagactccgtacctgacccccagcctctcggacagccaccagcagcccccacaagtttgggatctactacaatggctacaggcagtggcgcaccaatggcagacaataacgagggcgccgacggagtgggtaattcctcgggaaattggcattgcgattccacatggatgggcgacagagtcatcaccaccagcacccgcacctgggctctgcccacctacaacaaccatctgtacaagcaaatttccagccagtctggagccagcaacgacaaccactactttggctacagcaccccttgggggtattttgacttcaacagattccactgccacttctccccacgtgactggcaaagactcatcaacaacaattggggattccggcccaaaagactcaacttcgagctctttaacattcaagtcaaggaggtcacgcagaatgacggtacgacgacgattgccaataaccttaccagcacggttcaggtgtttactgactcggagtaccagctcccgtacgtcctcggctcggcgcatcaaggatgcctcccgccgttcccagcagacgtcttcatggtgccacagtatggatacctcaccctgaacaacgggagtcaggcggtaggacgctcttcattttactgcctggagtactttccttctcagatgctgcgtaccggaaacaactttaccttcagctacacctttgaggacgttccttttcacagcagctacgctcacagccagagtttggaccgtctcatgaatcctctcatcgaccagtacctgtattacttgagcagaacaaacactccaagcggaaccactacgcagtccaggcttcagttttctcaagccggagcgagtgacattcgggaccagtctaggaactggcttcctggaccctgttaccgccagcagcgagtatcaaagacagctgcggacaacaacaacagtgattactcgtggactggagctaccaagtatcacctcaatggaagagactctctggtgaatccgggcacagccatggccagccacaaggacgatgaagaaaagtattttcctcagagcggggttctcatcttcggaaaacaagactcgggaaaaactaatgtggacattgaaaaggtcatgattacagacgaagaggaaatcaggaccaccaatcccgtggctacggagcagtatggttctgtatctaccaatctccagagcggcaacacacaagcagctacctcagatgtcaacacacaaggcgttcttccaggcatggtctggcaggacagagacgtgtacctgcagggacccatctgggcaaagattccacacacggacggacactttcacccttctcctcttatgggaggatttggactgaagcaccctcccccgcagattctcatcaagagtaccccggtacctgcgaatccttctaccaccttcagcgcggcaaagtttgcttccttcatcacacagtactccacggggcaggtcagcgtggagatcgagtgggagctgcagaaagagaacagcaaacgctggaaccccgagatccagtatacctccaactacaacaagtctgttaatgtggactttactgtggacactaatggcgtgtattcagagcctcgccccattggcacaagatacctgactcgtaatctgtaa

SEQ ID NO: 3387 - DNA, 2208 bp, Artificial Sequence
  Description of Artificial Sequence: Synthetic polynucleotide
atggctgccgatggttatcttccagattggctcgaggacactctctctgaaggaataagacagtggtggaagctcaaacctggcccaccaccaccaaagcccgcagagcggcatcaggacgacagcaggggtcttgtgcttcccgggcacaagtacctcggacccttcaacggactcgacaaaggagagccggtcaacgaggcagacgctgcggccctcgagcacgacaaggcctacgaccggcagctcgacagcggagacaacccgtacctcaagtacaaccacgccgacgcggagtttcaggagcgtcttaaagaagatacgtcttttgggggcaacctcggacgagcagtcttccaggcgaaaaagagggttcttgaacctctgggcctggttgaggaacctgttaagacggctccgggaaaaaagaggccggtagagcactctcctgcggagccagactcctcctcgggaaccggaaaagcgggccagcagcctgcaagaaagagattgaatttcggtcagactggagacgcagactccgtacctgacccccagcctctcggacagccaccagcagccccctctggtctgggaactaatacgatggcttcaggcagtggcgcaccaatggcagacaataacgagggcgccgacggagtgggtaattcctcgggaaattggcattgcgattccacatggatgggcgacagagtcatcaccaccagcacccgcacctgggctctgcccacctacaacaaccatctgtacaagcaaatttccagccagtctggagccagcaacgacaaccactactttggctacagcaccccttgggggtattttgacttcaacagattccactgccacttctccccacgtgactggcaaagactcatcaacaacaattggggattccggcccaaaagactcaacttcgagctctttaacattcaagtcaaggaggtcacgcagaatgacggtacgacgacgattgccaataaccttaccagcacggttcaggtgtttactgactcggagtaccagctcccgtacgtcctcggctcggcgcatcaaggatgcctcccgccgttcccagcagacgtcttcatggtgccacagtatggatacctcaccctgaacaacgggagtcaggcggtaggacgctcttcattttactgcctggagtactttccttctcagatgctgcgtaccggaaacaactttaccttcagctacacctttgaggacgttccttttcacagcagctacgctcacagccagagtttggaccgtctcatgaatcctctcatcgaccagtacctgtattacttgagcagaacaaacactccaagcggaaccactacgcagtccaggcttcagttttctcaagccggagcgagtgacattcgggaccagtctaggaactggcttcctggaccctgttaccgccagcagcgagtatcaaagacagctgcggacaacaacaacagtgattactcgtggactggagctaccaagtatcacctcaatggaagagactctctggtgaatccgggcacagccatggccagccacaaggacgatgaagaaaagtattttcctcagagcggggttctcatcttcggaaaacaagactcgggaaaaactaatgtggacattgaaaaggtcatgattacagacgaagaggaaatcaggaccaccaatcccgtggctacggagcagtatggttctgtatctaccaatctccagagcggcaacacacaagcagctacctcagatgtcaacacacaaggcgttcttccaggcatggtctggcaggacagagacgtgtacctgcagggacccatctgggcaaagattccacacacggacggacactttcacccttctcctcttatgggaggatttggactgaagcaccctcccccgcagattctcatcaagagtaccccggtacctgcgaatccttctaccaccttcagcgcggcaaagtttgcttccttcatcacacagtactccacggggcaggtcagcgtggagatcgagtgggagctgcagaaagagaacagcaaacgctggaaccccgagatccagtatacctccaactacaacaagtctgttaatgtggactttactgtggacactaatggcgtgtattcagagcctcgccccattggcacaagatacctgactcgtaatctgtaa

SEQ ID NO: 3388 - DNA, 2208 bp, Artificial Sequence
  Description of Artificial Sequence: Synthetic polynucleotide
atggctgccgatggttatcttccagattggctcgaggacactctctctgaaggaataagacagtggtggaagctcaaacctggcccaccaccgccaaagcccgcagagcggcataaggacgacagcaggggtcttgtgcttcctgggtacaagtacctcggacccttcaacggactcgacaaaggagagccggtcaacgaggcagacgccgcggccctcgagcacgacaaggcctacgaccggcagctcgacagcggagacaacccgtacctcaagtacaaccacgccgacgcggagtttcaggagcgccttaaagaagatacgtcttttgggggcaacctcgcaagagcagtattccaggcgaaaaagagggttcttgaacctctgggcctggttgaggagcctgttaagacggctccgggaaaaaagaggccggtagagcactctcctgcggagccagattcctcctccggaactggaaagtcgggccaacagcctgcaagaaagagattgaattttggtcagactggagacgcagactccgtacctgacccccagcctctcggacagccaccagcagccccctctggtctgggaactaatacgatggcttcaggcagtggcgcaccaatggcagacaataacgagggcgccgacggagtgggtaattcctcgggaaattggcattgcgattccacatggatgggcgacagagtcatcaccaccagcacccgcacctgggctctgcccacctacaacaaccatctgtacaagcaaatttccagccagtctggagccagcaacgacaaccactactttggctacagcaccccttgggggtattttgacttcaacagattccactgccacttctccccacgtgactggcaaagactcatcaacaacaattggggattccggcccaaaagactcaacttcaagctctttaacattcaagtcaaggaggtcacgcagaatgacggtacgacgacgattgccaataaccttaccagcacggttcaggtgtttactgactcggagtaccagctcccgtacgtcctcggctcggcgcatcaaggatgcctcccgccgttcccagcagacgtcttcatggtgccacagtatggatacctcaccctgaacaacgggagtcaggcggtaggacgctcttcattttactgcctggagtactttccttctcagatgctgcgtaccggaaacaactttaccttcagctacacctttgaggacgttccttttcacagcagctacgctcacagccagagtttggaccgtctcatgaatcctctcatcgaccagtacctgtattacttgagcagaacaaacactccaagcggaaccactacgcagtccaggcttcggttttctcaagccggagcgagtgacattcgggaccagtctaggaactggcttcctggaccctgttaccgccagcagcgagtatcaaagacagctgcggacaacaacaacagtgattactcgtggactggagctaccaagtatcacctcaatggaagagactctctggtgaatccgggcacagccatggccagccacaaggacgatgaagaaaagtattttcctcagagcggggttctcatcttcggaaaacaagactcggaaaaaactaatgtggacattgaaagggtcatgattacagacgaagaggaaatcaggaccaccaatcccgtggctacggagcagtatggttctgtatctaccaatctccagagcggcaacacacaagcagctacctcagatgtcaacacacaaggcgttcttccaggcatggtctggcaggacagagacgtgtacctgcagggacccatctgggcaaagattccacacacggacggacattttcacccttctcctcttatgggaggatttggactgaagcaccctcccccgcagattctcatcaagaataccccggtacctgcgaatccttctaccaccttcagcgcggcaaagtttgcttccttcatcacacagtactccacggggcaggtcagcgtggagatcgagtgggagctgcagaaagagaacagcaaacgctggaaccccgagatccagtatacctccaactacaacaagtctgttaatgtggactttactgtggacactaatggcgtgtattcagagcctcgccccattggcacaagatacctgactcgtaatctgtaa

SEQ ID NO: 3389 - DNA, 2208 bp, Artificial Sequence
  Description of Artificial Sequence: Synthetic polynucleotide
atggctgccgatggttatcttccagattggctcgaggacactctctctgaaggaataagacagtggtggaagctcaaacctggcccaccaccaccaaagcccgcagagcggcatcaggacgacagcaggggtcttgtgcttcctgggtacaagtacctcggacccttcaacggactcgacaaaggagagccggtcaacgaggcagacgccgcggccctcgagcacgacaaggcctacgaccggcagctcgacagcggagacaacccgtacctcaagtacaaccacgccgacgcggagtttcaggagcgtcttaaagaagatacgtcttttgggggcaacctcggacgagcagtcttccaggcgaaaaagagggttcttgaacctctgggcctggttgaggaacctgttaagacggctccgggaaaaaagaggccggtagagcactctcctgtggagccagactcctcctcgggaaccggaaaggcgggccagcagcctgcaagaaaaagattgaatttcggtcagactggagacgcagactccgtacctgacccccagcctctcggacagccaccagcagccccctctggtctgggaactaatacgatggctacaggcagtggcgcaccaatggcagacaataacgagggcgccgacggagtgggtaattcctcgggaaattggcattgcgattccacatggatgggcgacagagtcatcaccaccagcacccgcacctgggctctgcccacctacaacaaccatctgtacaagcaaatttccagccaatcaggagcatcgaacgacaaccactactttggctacagcaccccctgggggtattttgacttcaacagattccactgccacttttcgccacgtgactggcaaagactcatcaacaacaactggggattccggcccaagagactcagcttcaagctctttaacattcaagtcaaggaggtcacgcagaatgacggtacgacgacgattgccaataaccttaccagcacggttcaggtctttactgactcggagtaccagctcccgtacgtcctcggctcggcgcatcaaggatgcctcccgccgttcccagcagacgtcttcatggtgccacagtatggatacctcaccctgaacaacgggagtcaggcggtaggacgctcttcattttactgcctggagtacttcccttctcagatgcttcgcacgggaaacaactttaccttcagctacacctttgaggacgtgccttttcacagcagctacgctcacagccaaagtctggaccgtctcatgaatcctctcatcgaccaatacctgtattacttgagcaaaacaaacgctccaagcggaaccaccacgatgtccaggcttcagttttctcaggccggagcgagtgacattcgggaccagtctagaaactggcttcctggaccctgttaccgccagcagcgagtatcaaagacagctgcggacaacaacaacagtgattactcgtggactggagctaccaagtaccacctcaatggaagagactctctggtgaacccgggcccagctatggccagccacaaggatgatgaagaaaaatattttcctcagagcggggttctcatcttcgggaaacaaggctcaaataaaactaatgtggacattgaaaaggttatgattacagacgaagaggaaatcaggaccaccaatcccgtggctacggagcagtatggttctgtatctaccaaccttcaaagcggcaacacacaagcagctacctcagatgtcaacacacaaggcgttcttcctggcatggtctggcaggacagagatgtgtacctgcaggggcccatctgggcaaagattcctcacacggacggacactttcacccttctcccctcatgggcggatttggattgaagcaccctcccccacagattctcatcaagaataccccggtacctgcgaatccttcgaccaccttcagtgcggcaaagtttgcttccttcatcacacagtattccacgggacaggtcagcgtggagatagagtgggagctgcagaaggagaacagcaaacgctggaaccccgagatccagtatacttccaactacaacaaatctgttaatgtggactttactgtggacactaatggtgtgtattcagagcctcgccccattggcaccagatacctgactcgtaatctgtaa

SEQ ID NO: 3390 - DNA, 2208 bp, Artificial Sequence
  Description of Artificial Sequence: Synthetic polynucleotide
atggctgccgatggttatcttccagattggctcgaggacactctctctgaaggaataagacagtggtggaagctcaaacctggcccaccaccaccaaggcccgcagagcggcatcaggacgacagcaggggtcttgtgcttcctgggtacaagtacctcggacccttcaacggactcgacaaaggagagccggtcaacgaggcagacgctgcggccctcgagcacgacaaggcctacgaccggcagctcgacagcggagacaacccgtacctcaagtacaaccacgccgacgcggagtttcaggagcgtcttaaagaagatacgtcttttgggggcaacctcggacgagcagtcttccaggcgaaaaagagggttcttgaacctctgggcctggttgaggaacctgttaagacggctccgggaaaaaagaggccggtagagcactctcctgcggggccagattcctcctccggaactggaaagtcgggccaacagcctgcaagaaagagattgaattttggtcagactggagacgcagactccgtacctgacccccagcctctcggacagccaccagcagccccctctggtctgggaactaatacgatggcttcaggcagtggcgcaccaatggcagacaataacgagggcgccgacggagtgggtaattcctcgggaaattggcattgcgattccacatggatgggcgacagagtcatcaccaccagcacccgcacctgggctctgcccacctacaacaaccatctgtacaagcaaatttccagccagtctggagccagcaacgacaaccactactttggctacagcaccccttgggggtattttgacttcaacagattccactgccacttctccccacgtgactggcaaagactcatcaacaacaattggggattccgggccaaaagactcaacttcgagctctttaacattcaagtcaaggaggtcacgcagaatgacggtacgacgacgattgccaataaccttaccagcacggttcaggtgtttactgactcggagtaccagctcccgtacgtcctcggctcggcgcatcaaggatgcctcccgccgttcccagcagacgtcttcatggtgccacagtatggatacctcaccctgaacaacgggagtcaggcggtaggacgctcttcattttactgcctggagtactttccttctcagatgctgcgtaccggaaacaactttaccttcagctacacctttgaggacgttccttttcacagcagctacgctcacagccagagtttggaccgtctcatgaatcctctcatcgaccagtacctgtattacttgagcagaacaaacactccaagcggaaccactacgcagtccaggcttcagttttctcaagccggagcgagtgacattcgggaccagtctaggaactggcttcctggaccctgttaccgccagcagcgagtatcaaagacagctgcggacaacaacaacagtgattactcgtggactggagctaccaagtatcacctcaatggaagagactctctggtgaatccgggcacagccatggccagccacaaggacgatgaagaaaagtattttcctcagagcggggttctcatcttcggaaaacaagactcgggaaaaactaatgtggacattgaaaaggtcatgattacagacgaagaggaaatcaggaccaccaatcccgtggctacggagcagtatggttctgtatctaccaatctccagagcggcaacacacaagcagctacctcagatgtcaacacacaaggcgttcttccaggcatggtctggcaggacagagacgtgtacctgcagggacccatctgggcaaagattccacacacggacggacactttcacccttctcctcttatgggaggatttggactgaagcaccctcccccgcagattctcatcaagagtaccccggtacctgcgaatccttctaccaccttcagcgcggcaaagtttgcttccttcatcacacagtactccacggggcaggtcagcgtggagatcgagtgggagctgcagaaagagaacagcaaacgctggaaccccgagatccagtatacctccaactacaacaagtctgttaatgtggactttactgtggacactaatggcgtgtattcagagcctcgccccattggcacaagatacctgactcgtaatctgtaa

SEQ ID NO: 3391 - DNA, 2208 bp, Artificial Sequence
  Description of Artificial Sequence: Synthetic polynucleotide
atggctgccgatggttatcttccagattggctcgaggacactctctctgaaggaataagacagtggtggaagctcaaacctggcccaccaccgccaaagcccgcagagcggcataaggacgacagcaggggtcttgtgcttcctgggtacaagtacctcggacccttcaacggactcgacaaaggagagccggtcaacgaggcagacgccgcggccctcgagcacgacaaggcctacgaccggcagctcgacagcggagacaacccgtacctcaagtacaaccacgccgacgcggagtttcaggagcgccttaaagaagatacgtcttttgggggcaacctcgcaagagcagtattccaggcgaaaaagagggttcttgaacctctgggcctggttgaggagcctgttaagacggctccgggaaaaaagaggccggtagagcactctcctgcggggccagattcctcctccggaactggaaagtcgggccaacagcctgcaagaaagagattgaattttggtcagactggagacgcagactccgtacctgacccccagcctctcggacagccaccagcagccccctctggtctgggaactaatacgatggcttcaggcagtggcgcaccaacggcagacaataacgagggcgccgacggagtgggtaattcctcgggaaattggcattgcgattccacatggatgggcgacagagtcatcaccaccagcacccgcacctgggctctgcccacctacaacaaccatctgtacaagcaaatttccagccagtctggagccagcaacgacaaccactactttggctacagcaccccttgggggtattttgacttcaacagattccactgccacttctccccacgtgactggcaaagactcatcaacaacaattggggattccggcccaaaagactcaacttcgagctctttaacattcaagtcaaggaggtcacgcagaatgacggtacgacgacgattgccaataaccttaccagcacggttcaggtgtttaccgactcggagtaccagctcccgtacgtcctcggctcggcgcatcaaggatgcctcccgccgttcccagcagacgtcttcatggtgccacagtatggatacctcaccctgaacaacgggagtcaggcggtaggacgctcttcattttactgcctggagtactttccttctcagatgctgcgtaccggaaacaactttaccttcagctacacctttgaggacgttccttttcacagcagctacgctcacagccagagtttggaccgtctcatgaatcctctcatcgaccagtacctgtattacttgagcagaacaaacactccaagcggaaccactacgcagtccaggcttcagttttctcaagccggagcgagtgacattcgggaccagtctaggaactggcttcctggaccctgttaccgccagcagcgagtatcaaagacagctgcggacaacaacaacagtgattactcgtggactggagctaccaagtatcacctcaatggaagagactctctggtgaatccgggcacagccatggccagccacaaggacgatgaagaaaagtattttcctcagagcggggttctcatcttcggaaaacaagactcgggaaaaactaatgtggacattgaaaaggtcatgattacagacgaagaggaaatcaggaccaccaatcccgtggctacggagcagtatggttctgtatctaccaatctccagagcggcaacacacaagcagctacctcagatgtcaacacacaaggcgttcttccaggcatggtctggcaggacagagacgtgtacctgcagggacccatctgggcaaagattccacacacggacggacactttcacccttctcctcttatgggaggatttggactgaagcaccctcccccgcagattctcatcaagagtaccccggtacctgcgaatccttctaccaccttcagcgcggcaaagtttgcttccttcatcacacagtactccacggggcaggtcagcgtggagatcgagtgggagctgcagaaagagaacagcaaacgctggaaccccgagatccagtatacctccaactacaacaagtctgttaatgtggactttactgtggacactaatggcgtgtattcagagcctcgccccattggcacaagatacctgactcgtaatctgtaa

SEQ ID NO: 3392 - DNA, 2208 bp, Artificial Sequence
  Description of Artificial Sequence: Synthetic polynucleotide
atggctgccgatggttatcttccagattggctcgaggacactctctctgaaggaataagacagtggtggaagctcaaacctggcccaccaccgccaaagcccgcagagcggcataaggacgacagcaggggtcttgtgcttcctgggtacaagtacctcggacccttcaacggactcgacaaaggagagccggtcaacgaggcagacgccgcggccctcgagcacgacaaggcctacgaccggcagctcgacagcggagacaacccgtacctcaagtacaaccacgccgacgcggagtttcaggagcgccttaaagaagatacgtcttttgggggcaacctcgcaagagcagtattccaggcgaaaaagagggttcttgaacctctgggcctggttgaggagcctgttaagacggctccgggaaaaaagaggccggtagagcactctcctgcggggccagattcctcctccggaactggaaagtcgggccaacagcctgcaagaaagagattgaattttggtcagactggagacgcagactccgtacctgacccccagcctctcggacagccaccagcagccccctctggtctgggaactaatacgatggcttcaggcagtggcgcaccaatggcagacaataacgagggcgccgacggagtgggtaattcctcgggaaattggcattgcgattccacatggatgggcgacagagtcatcaccaccagcacccgcacctgggctctgcccacctacaacaaccatctgtacaagcaaatttccagccagtctggagccagcaacgacaaccactactttggctacagcaccccttgggggtattttgacttcaacagattccactgccacttctccccacgtgactggcaaagactcatcaacaacaattggggattccggcccaaaagactcaacttcgagctctttaacattcaagtcaaggaggtcacgcagaatgacggtacgacgacgattgccaataaccttaccagcacggttcaggtgtttactgactcggagtaccagctcccgtacgtcctcggctcggcgcatcaaggatgcctcccgccgttcccagcagacgtcttcatggtgccacagtatggatacctcaccctgaacaacgggagtcaggcggtaggacgctcttcattttactgcctggagtactttccttctcagatgctgcgtaccggaaacaactttaccttcagctacacctttgaggacgttccttttcacagcagctacgctcacagccagagtttggaccgtctcatgaatcctctcatcgaccagtacctgtattacttgagcagaacaaacactccaagcggaaccactacgcagtccaggcttcagttttctcaagccggagcgagtgacattcgggaccagtctaggaactggcttcctggaccctgttaccgccagcagcgagtatcaaagacagctgcggacaacaacaacagtgattactcgtggactggagctaccaagtatcacctcaatggaagagactctctggtgaatccgggcacagccatggccagccacaaggacgatgaagaaaagtattttcctcagagcggggttctcatcttccggaaacaagactcgggaaaaactaatgtggacattgaaaaggtcatgattacagacgaagaggaaatcaggaccaccaatcccgtggctacggagcagtatggttctgtatctaccaatctccagagcggcaacacacaagcagctacctcagatgtcaacacacaaggcgttcttccaggcatggtctggcaggacagagacgtgtacctgcagggacccatctgggcaaagattccacacacggacggacactttcacccttctcctcttatgggaggatttggactgaagcaccctcccccgcagattctcatcaagagtaccccggtacctgcgaatccttctaccaccttcagcgcggcaaagtttgcttccttcatcacacagtactccacggggcaggtcagcgtggagatcgagtgggagctgcagaaagagaacagcaaacgctggaaccccgagatccagtatacctccaactacaacaagtctgttaatgtggactttactgtggacactaatggcgtgtattcagagcctcgccccattggcacaagatacctgactcgtaatctgtaa

SEQ ID NO: 3393 - DNA, 2208 bp, Artificial Sequence
  Description of Artificial Sequence: Synthetic polynucleotide
atggctgccgatggttatcttccagattggctcgaggacactctctctgaaggaataagacagtggtggaagctcaaacctggcccaccaccgccaaagcccgcagagcggcataaggacgacagcaggggtcttgtgcttcctgggtacaagtacctcggacccttcaacggactcgacaaaggagagccggtcaacgaggcagacgccgcggccctcgagcacgacaaggcctacgaccggcagctcgacagcggagacaacccgtacctcaagtacaaccacgccgacgcggagtttcaggagcgccttaaagaagatacgtcttttgggggcaacctcgcaagagcagtattccaggcgaaaaagagggttcttgaacctctgggcctggttgaggagcctgttaagacggctccgggaaaaaagaggccggtagagcactctcctgcggagccagattcctcctccggaactggaaagtcgggccaacagcctgcaagaaagagattgaattttggtcagactggagacgcagactccgtacctgaccctcagcctctcggacagccaccagcagccccctctggtctgggaactaatacgatggcttcaggcagtggcgcaccaatggcagacaataacgagggcgccgacggagtgggtaattcctcgggaaattggcattgcgattccacatggatgggcgacagagtcatcaccaccagcacccgcacctgggctctgcccacctacaacaaccatctgtacaagcaaatttccagccagtctggagccagcaacgacaaccactactttggctacagcaccccttgggggtattttgacttcaacagattccactgccacttctccccacgtgactggcaaagactcatcaacaacaattggggattccggcccaaaagactcaacttcaagctctttaacattcaagtcaaggaggtcacgcagaatgacggtacgacgacgattgccaataaccttaccagcacggttcaggtgtttactgactcggagtaccagctcccgtacgtcctcggctcggcgcatcaaggatgcctcccgccgttcccagcagacgtcttcatggtgccacagtatggatacctcaccctgaacaacgggagtcaggcggtaggacgctcttcattttactgcctggagtactttccttctcagatgctgcgtaccggaaacaactttaccttcagctacacctttgaggacgttccttttcacagcagctacgctcacagccagagtttggaccgtctcatgaatcctctcatcgaccagtacctgtattacttgagcagaacaaacactccaagcggaaccactacgcagtccaggcttcagttttctcaagccggagcgagtgacattcgggaccagtctaggaactggcttcctggaccctgttaccgccagcagcgagtatcaaagacagctgcggacaacaacaacagtgattactcgtggactggagctaccaagtatcacctcaatggaagagactctctggtgaatccgggcacagccatggccagccacaaggacgatgaagaaaagtattttcctcagagcggggctctcatcttcggaaaacaagactcgggaaaaactaatgtggacattgaaaaggtcatgattacagacgaagaggaaatcaggaccaccaatcccgtggctacggagcagtatggttctgtatctaccaatctccagagcggcaacacacaagcagctacctcagatgtcaacacacaaggcgttcttccaggcatggtctggcaggacagagacgtgtacctgcagggacccatctgggcaaagattccacacacggacggacattttcacccttctcctcttatgggaggatttggactgaagcaccctcccccgcagattctcatcaagaataccccggtacctgcgaatccttctaccaccttcagcgcggcaaagtttgcttccttcatcacacagtactccacggggcaggtcagcgtggagatcgagtgggagctgcagaaagagaacagcaaacgctggaaccccgagatccagtatacctccaactacaacaagtctgttaatgtggactttactgtggacactaatggcgtgtattcagagcctcgccccattggcacaagatacctgactcgtaatctgtaa

SEQ ID NO: 3394 - DNA, 2208 bp, Artificial Sequence
  Description of Artificial Sequence: Synthetic polynucleotide
atggctgccgatggttatcttccagattggctcgaggacactctctctgaaggaataagacagtggtggaagctcaaacctggcccaccaccgccaaagcccgcagagcggcataaggacgacagcaggggtcttgtgcttcctgggtacaagtacctcggacccttcaacggactcgacaaaggagagccggtcaacgaggcagacgccgcggccctcgagcacgacaaggcctacgaccggcagctcgacagcggagacaacccgtacctcaagtacaaccacgccgacgcggagtttcaggagcgccttaaagaagatacgtcttttgggggcaacctcgcaagagcagtattccaggcgaaaaagagggttcttgaacctctgggcctggttgaggagcctgttaagacggctccgggaaaaaagaggccggtagagcactctcctgcggagccaggttcctcctccggaactggaaagtcgggccaacagcctgcaagaaagagattgaattttggtcagactggagacgcagactccgtacctgacccccagcctctcggacagccaccagcagccccctctggtctgggaactaatacgatggcttcaggcagtggcgcaccaatggcagacaataacgagggcgccgacggagtgggtaattcctcgggaaattggcattgcgattccacatggatgggcgacagagtcatcaccaccagcacccgcacctgggctctgcccacctacaacaaccatctgtacaagcaaatttccagccagtctggagccagcaacgacaaccactactttggctacagcaccccttgggggtattttgacttcaacagattccactgccacttctccccacgtgactggcaaagactcatcaacaacaattggggattccggcccaaaagactcaacttcaagctctttaacattcaagtcaaggaggtcacgcagaatgacggtacgacgacgattgccaataaccttaccagcacggttcaggtgtttactgactcggagtaccagctcccgtacgtcctcggctcggcgcatcaaggatgcctcccgccgttcccagcagacgtcttcatggtgccacagtatggatacctcaccctgaacaacgggagtcaggcggtaggacgctcttcattttactgcctggagtactttccttctcagatgctgcgtaccggaaacaactttaccttcagctacacctttgaggacgttccttttcacagcagctacgctcgcagccagagtttggaccgtctcatgaatcctctcatcgaccagtacctgtattacttgagcagaacaaacactccaagcggaaccactacgcagtccaggcttcggttttctcaagccggagcgagtgacattcgggaccagtctaggaactggcttcctggaccctgttaccgccagcagcgagtatcaaagacagctgcggacaacaacaacagtgattactcgtggactggagctaccaagtatcacctcaatggaagagactctctggtgaatccgggcacagccatggccagccacaaggacgatgaagaaaagtattttcctcagagcggggttctcatcttcggaaaacaagactcgggaaaaactaatgtggacattgaaagggtcatgattacagacgaagaggaaatcaggaccaccaatcccgtggctacggagcagtatggttctgtatctaccaatctccagagcggcaacacacaagcagctacctcagatgtcaacacacaaggcgttcttccaggcatggtctggcaggacagagacgtgtacctgcagggacccatctgggcaaagattccacacacggacggacattttcacccttctcctcttatgggaggatttggactgaagcaccctcccccgcagattctcatcaagaataccccggtacctgcgaatccttctaccaccttcagcgcggcaaagtttgcttccttcatcacacagtactccacggggcaggtcagcgtggagatcgagtgggagctgcagaaagagaacagcaaacgctggaaccccgagatccagtatacctccaactacaacaagtctgttaatgtggactttactgtggacactaagggcgtgtattcagagcctcgccccattggcacaagatacctgactcgtaatctgtaa

SEQ ID NO: 3395 - DNA, 2208 bp, Artificial Sequence
  Description of Artificial Sequence: Synthetic polynucleotide
atggctgccgatggttatcttccagattggctcgaggacactctctctgaaggaataagacagtggtggaagctcaaacctggcccaccaccgccaaagcccgcagagcggcataaggacgacagcaggggtcttgtgcttcctgggtacaagtacctcggacccttcaacggactcgacaaaggagagccggtcaacgaggcagacgccgcggccctcgagcacgacaaggcctacgaccggcagctcgacagcggagacaacccgtacctcaagtacaaccacgccgacgcggagtttcaggagcgccttaaagaagatacgtcttttgggggcaacctcgcaagagcagtattccaggcgaaaaagagggttcttgaacctctgggcctggttgaggagcctgttaagacggctccgggaaaaaagaggccggtagagcactctcctgcggagccagattcctcctccggaactggaaagtcgggccaacagcctgcaagaaagagattgaattttggtcagactggagacgcagactccgtacctgacccccagcctctcggacagccaccagcagccccctctggtctgggaactaatacgatggcttcaggcagtggcgcaccaatggcagacaataacgagggcgccgacggagtgggtaattcctcgggaaattggcattgcgattccacatggatgggcgacagagtcatcaccaccagcacccgcacctgggctctgcccacctacaacaaccatctgtacaagcaaatttccagccagtctggagccagcaacgacaaccactactttggctacagcaccccttgggggtattttgacttcaacagattccactgccacttctccccacgtgactggcaaagactcatcaacaacaattggggattccggcccaaaagactcaacttcaagctctttaacattcaagtcaaggaggtcacgcagaatgacggtacgacgacgattgccaataaccttaccagcacggttcaggtgtttactgactcggagtaccagctcccgtacgtcctcggctcggcgcatcaaggatgcctcccgccgttcccagcagacgtcttcatggtgccacagtatggatacctcaccctgaacaacgggagtcaggcggtaggacgctcttcattttactgcctggagtactttccttctcagatgctgcgtaccggaaacaactttaccttcagctacacctttgaggacgttccttttcacagcagctacgctcacagccagagtttggaccgtctcatgaatcctctcatcgaccagtacctgtattacttgagcagaacaaacactccaagcggaaccactacgcagtccaggcttcagttttctcaagccggagcgagtgacattcgggaccagtctaggaactggcttcctggaccctgttaccgccagcagcgagtatcaaagacagctgcggacaacaacaacagtgattactcgtggactggagctaccaagtatcacctcaatggaagagactctctggtgaatccgggcacagccatggccagccacaaggacgatgaagaaaagtattttcctcagagcggggttctcatcttcggaaaacaagactcgggaaaaactaatgtggacattgaaaaggtcatgattacagacgaagaggaaatcaggaccaccaatcccgtggctacggagcagtatggttctgtatctaccaatctccagagcggcaacacacaagcagctacctcagatgtcaacacacaaggcgttcttccaggcatggtctggcaggacagagacgtgtacctgcagggacccatctgggcaaagattccacacacggacggacactttcacccttctcctcttatgggaggatttggactgaagcaccctcccccgcagattctcatcaagagtaccccggtacctgcgaatccttctaccaccttcagcgcggcaaagtttgcttccttcatcacacagtactccacggggcaggtcagcgtggagatcgagtgggagctgcagaaagagaacagcaaacgctggaaccccgagatccagtatacctccaactacaacaagtctgttaatgtggactttactgtggacactaatggcgtgtattcagagcctcgccccattggcacaagatacctgactcgtaatctgtaa

SEQ ID NO: 3396 - DNA, 2208 bp, Artificial Sequence
  Description of Artificial Sequence: Synthetic polynucleotide
atggctgccgatggttatcttccagattggctcgaggacactctctctgaaggaataagacagtggtggaagctcaaacctggcccaccaccgccaaagcccgcagagcggcataaggacgacagcaggggtcttgtgcttcctgggtacaagtacctcggacccttcaacggactcgacaaaggagagccggtcaacgaggcagacgccgcggccctcgagcacgacaaggcctacgaccggcagctcgacagcggagacaacccgtacctcaagtacaaccacgccgacgcggagtttcaggagcgccttaaagaagatacgtcttttgggggcaacctcgcaagagcagtattccaggcgaaaaagagggttcttgaacctctgggcctggttgaggagcctgttaagacggctccgggaaaaaagaggccggtagagcactctcctgcggagctagattcctcctccggaactggaaagtcgggccaacagcctgcaagaaagagattgaattttggtcagactggagacgcagactccgtacctgacccccagcctctcggacagccaccagcagccccctctggtctgggaactaatacgatggcttcaggcagtggcgcaccaatggcagacaataacgagggcgccgacggagtgggtaattcctcgggaaattggcattgcgattccacatggatgggcgacagagtcatcaccaccagcacccgcacctgggctctgcccacctacaacaaccatctgtacaagcaaatttccagccagtctggggccagcaacgacaaccactactttggctacagcaccccttgggggtattttgacttcaacagattccactgccacttctccccacgtgactggcaaagactcatcaacaacaattggggattccggcccaaaagactcaacttcaagctctttaacattcaagtcaaggaggtcacgcagaatgacggtacgacgacgattgccaataaccttaccagcacggttcaggtgtttactgactcggagtaccagctcccgtacgtcctcggctcggcgcatcaaggatgcctcccgccgttcccagcagacgtcttcatggtgccacagtatggatacctcaccctgaacaacgggagtcaggcggtaggacgctcttcattttactgcctggagtactttccttctcagatgctgcgtaccggaaacaactttaccttcagctacacctttgaggacgttccttttcacagcagctacgctcacagccagagtttggaccgtctcatgaatcctctcatcgaccagtacctgtattacttgagcagaacaaacactccaagcggaaccactacgcagtccaggcttcagttttctcaagccggagcgagtgacattcgggaccagtctaggaactggcttcctggaccctgttaccgccagcagcgagtatcaaagacagctgcggacaacaacaacagtgattactcgtggactggagctaccaagtatcacctcaatggaagagactctctggtgaatccgggcacagccatggccagccacaaggacgatgaagaaaagtattttcctcagagcggggttctcatcttcggaaaacaagactcgggaaaaactaatgtggacattgaaaaggtcatgattacagacgaagaggaaatcaggaccaccaatcccgtggctacggagcagtatggttctgtatctaccaatctccagagcggcaacacacaagcagctacctcagatgtcaacacacaaggcgttcttccaggcatggtctggcaggacagagacgtgtacctgcagggacccatctgggcaaagattccacacacggacggacattttcacccttctcctcttatgggaggatttggaccgaagcaccctcccccgcagattctcatcaagaataccccggtacctgcgaatccttctaccaccttcagcgcggcaaagtttgcttccttcatcacacagtactccacggggcaggtcagcgtggagatcgagtgggagctgcagaaagagaacagcaaacgctggaaccccgagatccagtatacctccaactacaacaagtctgttaatgtggactttactgtggacgctaatggcgtgtattcagagcctcgccccattggcacaagatacctgactcgtaatctgtaa

SEQ ID NO: 3397 - DNA, 2208 bp, Artificial Sequence
  Description of Artificial Sequence: Synthetic polynucleotide
atggctgccgatggttatcttccagattggctcgaggacactctctctgaaggaataagacagtggtggaagctcaaacctggcccaccaccgccaaagcccgcagagcggcataaggacgacagcaggggtcttgtgcttcctgggtacaagtacctcggacccttcaacggactcgacaaaggagagccggtcaacgaggcagacgccgcggccctcgagcacgacaaggcctacgaccggcagctcgacagcggagacaacccgtacctcaagtacaaccacgccgacgcggagtttcaggagcgccttaaagaagatacgtcttttgggggcaacctcgcaagagcagtattccaggcgaaaaagagggttcttgaacctctgggcctggttgaggagcctgttaagacggctccgggaaaaaagaggccggtagagcactctcctgcggagctagattcctcctccggaactggaaagtcgggccaacagcctgcaagaaagagattgaattttggtcagactggagacgcagactccgtacctgacccccagcctctcggacagccaccagcagccccctctggtctgggaactaatacgatggcttcaggcagtggcgcaccaatggcagacaataacgagggcgccgacggagtgggtaattcctcgggaaattggcattgcgattccacatggatgggcgacagagtcatcaccaccagcacccgcacctgggctctgcccacctacaacaaccatctgtacaagcaaatttccagccagtctggggccagcaacgacaaccactactttggctacagcaccccttgggggtattttgacttcaacagattccactgccacttctccccacgtgactggcaaagactcatcaacaacaattggggattccggcccaaaagactcaacttcaagctctttaacattcaagtcaaggaggtcacgcagaatgacggtacgacgacgattgccaataaccttaccagcacggttcaggtgtttactgactcggagtaccagctcccgtacgtcctcggctcggcgcatcaaggatgcctcccgccgttcccagcagacgtcttcatggtgccacagtatggatacctcaccctgaacaacgggagtcaggcggtaggacgctcttcattttactgcctggagtactttccttctcagatgctgcgtaccggaaacaactttaccttcagctacacctttgaggacgttccttttcacagcagctacgctcacagccagagtttggaccgtctcatgaatcctctcatcgaccagtacctgtattacttgagcagaacaaacactccaagcggaaccactacgcagtccaggcttcagttttctcaagccggagcgagtgacattcgggaccagtctaggaactggcttcctggaccctgttaccgccagcagcgagtatcaaagacagctgcggacaacaacaacagtgattactcgtggactggagctaccaagtatcacctcaatggaagagactctctggtgaatccgggcacagccatggccagccacaaggacgatgaagaaaagtattttcctcagagcggggttctcatcttcggaaaacaagactcgggaaaaactaatgtggacattgaaaaggtcatgattacagacgaagaggaaatcaggaccaccaatcccgtggctacggagcagtatggttctgtatctaccaatctccggagcggcaacacacaagcagctacctcagatgtcaacacacaaggcgttcttccaggcatggtctggcaggacagagacgtgtacctgcagggacccatctgggcaaagattccacacacggacggacattttcacccttctcctcttatgggaggatttggaccgaagcaccctcccccgcagattctcatcaagaataccccggtacctgcgaatccttctaccaccttcagcgcggcaaagtttgcttccttcatcacacagtactccacggggcaggtcagcgtggagatcgagtgggagctgcagaaagagaacagcaaacgctggaaccccgagatccagtatacctccaactacaacaagtctgttaatgtggactttactgtggacactaatggcgtgtattcagagcctcgccccattggcacaagatacctgactcgtaatctgtaa

SEQ ID NO: 3398 - DNA, 2208 bp, Artificial Sequence
  Description of Artificial Sequence: Synthetic polynucleotide
atggctgccgatggttatcttccagattggctcgaggacactctctctgaaggaataagacagtggtggaagctcaaacctggcccaccaccgccaaagcccgcagagcggcataaggacgacagcaggggtcttgtgcttcctgggtacaagtacctcggacccttcaacggactcgacaaaggagagccggtcaacgaggcagacgccgcggccctcgagcacgacaaggcctacgaccggcagctcgacagcggagacaacccgtacctcaagtacaaccacgccgacgcggagtttcaggagcgccttaaagaagatacgccttttgggggcaacctcgcaagagcagtattccaggcgaaaaagagggttcttgaacctctgggcctggttgaggagcctgttaagacggctccgggaaaaaagaggccggtagagcactctcctgcggagctagattcctcctccggaactggaaagtcgggccaacagcctgcaagaaagagattgaattttggtcagactggagacgcagactccgtacctgacccccagcctctcggacagccaccagcagccccctctggtctgggaactaatacgatggcttcaggcagtggcgcaccaatggcagacaataacgagggcgccgacggagtgggtaattcctcgggaaattggcattgcgattccacatggatgggcgacagagtcatcaccaccagcacccgcacctgggctctgcccacctacaacaaccatctgtacaagcaaatttccagccagtctggggccagcaacgacaaccactactttggctacagcaccccttgggggtattttgacttcaacagattccactgccacttctccccacgtgactggcaaagactcatcaacaacaattggggattccggcccaaaggactcaacttcaagctctttaacattcaagtcaaggaggtcacgcagaatgacggtacgacgacgattgccaataaccttaccagcacggttcaggtgtttactgactcggagtaccagctcccgtacgtcctcggctcggcgcatcaaggatgcctcccgccgttcccagcagacgtcttcatggtgccacagtatggatacctcaccctgaacaacgggagtcaggcggtaggacgctcttcattttactgcctggagtactttccttctcagatgctgcgtaccggaaacaactttaccttcagctacacctttgaggacgttccttttcacagcagctacgctcacagccagagtttggaccgtctcatgaatcctctcatcgaccagtacctgtattacttgagcagaacaaacactccaagcggaaccactacgcagtccaggcttcagttttctcaagccggagcgagtgacattcgggaccagtctaggaactggcttcctggaccctgttaccgccagcagcgagtatcaaagacagctgcggacaacaacaacagtgattactcgtggactggagctaccaagtatcacctcaatggaagagactctctggtgaatccgggcacagccatggccagccacaaggacgatgaagaaaagtattttcctcagagcggggttctcatcttcggaaaacaagactcgggaaaaactaatgtggacattgaaaaggtcatgattacagacgaagaggaaatcaggaccaccaatcccgtggctacggagcagtatggttctgtatctaccaatctccagagcggcaacacacaagcagctacctcagatgtcaacacacaaggcgttcttccaggcatggtctggcaggacagagacgtgtacctgcagggacccatctgggcaaagattccacacacggacggacattttcacccttctcctcttatgggaggatttggaccgaagcaccctcccccgcagattctcatcaagaataccccggtacctgcgaatccttctaccaccttcagcgcggcaaagtttgcttccttcatcacacagtactccacggggcaggtcagcgtggagatcgagtgggagctgcagaaagagaacagcaaacgctggaaccccgagatccagtatacctccaactacaacaagtctgttaatgtggactttactgtggacactaatggcgtgtattcagagcctcgccccattggcacaagatacctgactcgtaatctgtaa

SEQ ID NO: 3399 - DNA, 2208 bp, Artificial Sequence
  Description of Artificial Sequence: Synthetic polynucleotide
atggctgccgatggttatcttccagattggctcgaggacactctctctgaaggaataagacagtggtggaagctcaaacctggcccaccaccgccaaagcccgcagagcggcataaggacgacagcaggggtcttgtgcttcctgggtacaagtacctcggacccttcaacggactcgacaaaggagagccggtcaacgaggcagacgccgcggccctcgagcacgacaaggcctacgaccggcagctcgacagcggagacaacccgtacctcaagtacaaccacgccgacgcggagtttcaggagcgccttaaagaagatacgtcttttgggggcaacctcgcaagagcagtattccaggcgaaaaagagggttcttgaacctctgggcctggttgaggagcctgttaagacggctccgggaaaaaagaggccggtagagcactctcctgcggagctagattcctcctccggaactggaaagtcgggccaacagcctgcaagaaagagattgaattttggtcagactggagacgcagactccgtacctgacccccagcctctcggacagccaccagcagccccctctggtctgggaactaatacgatggcttcaggcagtggcgcaccaatggcagacaataacgagggcgccgacggggtgggtaattcctcgggaaattggcattgcgattccacatggatgggcgacagagtcatcaccaccagcacccgcacctgggctctgcccacctacaacaaccatctgtacaagcaaatttccagccagtctggggccagcaacgacaaccactaccttggctacagcaccccttgggggtattttgacttcaacagattccactgccacttctccccacgtgactggcaaagactcatcaacaacaattggggattccggcccaaaagactcaacttcaagctctttaacattcaagtcaaggaggtcacgcagaatgacggtacgacgacgattgccaataaccttaccagcacggttcaggtgtttactgactcggagtaccagctcccgtacgtcctcggctcggcgcatcaaggatgcctcccgccgttcccagcagacgtcttcatggtgccacagtatggatacctcaccctgaacaacgggagtcaggcggtaggacgctcttcattttactgcctggagtactttccttctcagatgctgcgtaccggaaacaactttaccttcagctacacctttgaggacgttccttttcacagcagctacgctcacagccagagtttggaccgtctcatgaatcctctcatcgaccagtacctgtattacttgagcagaacaaacactccaagcggaaccactacgcagtccaggcttcagttttctcaagccggagcgagtggcattcgggaccagtctaggaactggcttcctggaccctgttaccgccagcagcgagtatcaaagacagctgcggacaacaacaacagtgattactcgtggactggagctaccaagtatcacctcaatggaagagactctctggtgaatccgggcacagccatggccagccacaaggacgatgaagaaaagtattttcctcagagcggggttctcatcttcggaaaacaagactcgggaaaaactaatgtggacattgaaaaggtcatgattacagacgaagaggaaatcaggaccaccaatcccgtggctacggagcagtatggttctgtatctaccaatctccagagcggcaacacacaagcagctacctcagatgtcaacacacaaggcgttcttccaggcatggtctggcaggacagagacgtgtacctgcagggacccatctgggcaaagattccacacacggacggacattttcacccttctcctcttatgggaggatttggaccgaagcaccctcccccgcagattctcatcaagaataccccggtacctgcgaatccttctaccaccttcagcgcggcaaagtttgcttccttcatcacacagtactccacggggcaggtcagcgtggagatcgagtgggagctgcagaaagggaacagcaaacgctggaaccccgagatccagtatacctccaactacaacaagtctgttaatgtggactttactgtggacactaatggcgtgtattcagagcctcgccccattggcacaagatacctgactcgtaatctgtaa

SEQ ID NO: 3400 - DNA, 2208 bp, Artificial Sequence
  Description of Artificial Sequence: Synthetic polynucleotide
atggctgccgatggttatcttccagattggctcgaggacactctctctgaaggaataagacagtggtggaagctcaaacctggcccaccaccgccaaagcccgcagagcggcataaggacgacagcaggggtcttgtgcttcctgggtacaagtacctcggacccttcaacggactcgacaaaggagagccggtcaacgaggcagacgccgcggccctcgagcacgacaaggcctacgaccggcagctcgacagcggagacaacccgtacctcaagtacaaccacgccgacgcggagtttcaggagcgccttaaagaagatacgtcttttgggggcaacctcgcaagagcagtattccaggcgaaaaagagggttcttgaacctctgggcctggttgaggagcctgttaagacggctccgggaaaaaagaggccggtagagcactctcctgcggagctagattcctcctccggaactggaaagtcgggccaacagcctgcaagaaagagattgaattttggtcagactggagacgcagactccgtacctgacccccagcctctcggacagccaccagcagccccctctggtctgggaactaatacgatggcttcaggcagtggcgcaccaatggcagacaataacgagggcgccgacggagtgggtaattcctcgggaaattggcattgcgattccacatggatgggcgacagagtcatcaccaccagcacccgcacctgggctctgcccacctacaacaaccatctgtacaagcaaatttccagccagtctggggccagcaacgacaaccactactttggctacagcaccccttgggggtattttgacttcaacagattccactgccacttctccccacgtgactggcaaagactcatcaacaacaattggggattccggcccaaaagactcaacttcaagctctttaacattcaagtcaaggaggtcacgcagaatgacggtacgacgacgattgccaataaccttaccagcacggttcaggtgtttactgactcggagtaccagctcccgtacgtcctcggctcggcgcatcaaggatgcctcccgccgttcccagcagacgtcttcatggtgccacagtatggatacctcaccctgaacaacgggagtcaggcggtaggacgctcttcattttactgcctggagtactttccttctcagatgctgcgtaccggaaacaactttaccttcagctacacctttgaggacgttccttttcacagcagctacgctcacagccagagtttggaccgtctcatgaatcctctcatcgaccagtacctgtattacttgagcagaacaaacactccaagcggaaccactacgcagtccaggcttcagttttctcaagccggagcgagtgacattcgggaccagtctaggaactggcttcctggaccctgttaccgccagcagcgagtatcaaagacagctgcggacaacaacaacagtgattactcgtggactggagctaccaagtatcacctcaatggaagagactctctggtgaatccgggcacagccatggccagccacaaggacgatgaagaaaagtattttcctcagagcggggttctcatcttcggaaaacaagactcgggaaaaactaatgtggacattgaaaaggtcatgattacagacgaagaggaaatcaggaccaccaatcccgtggctacggagcagtatggttctgtatctaccaatctccagagcggcaacacacaagcagctacctcagatgtcaacacacaaggcgttcttccaggcatggtctggcaggacagagacgtgtacctgcagggacccatctgggcaaagattccacacacggacggacattttcacccttctcctcttatgggaggatttggaccgaagcaccctcccccgcagattctcatcaagaataccccggtacctgcgaatccttctaccaccttcagcgcggcaaagtttgcttccttcatcacacagtactccacggggcaggtcagcgtggagatcgagtgggagctgcagaaagagaacagcaaacgctggaaccccgagatccagtatacctccaactacaacaagtctgttaatgtggactttactgtggacactaatggcgtgtattcagagcctcgccccattggcacaagatacccgactcgtaatctgtaa

SEQ ID NO: 3401 - DNA, 2208 bp, Artificial Sequence
  Description of Artificial Sequence: Synthetic polynucleotide
atggctgccgatggttatcttccagattggctcgaggacactctctctgaaggaataagacagtggtggaagctcaaacctggcccaccaccgccaaagcccgcagagcggcataaggacgacagcaggggtcttgtgcttcctgggtacaagtacctcggacccttcaacggactcgacaaaggagagccggtcaacgaggcagacgccgcggccctcgagcacgacaaggcctacgaccggcagctcgacagcggagacaacccgtacctcaagtacaaccacgccgacgcggagtttcaggagcgccttaaagaagatacgtcttttgggggcaacctcgcaagagcagtattccaggcgaaaaagagggttcttgaacctctgggcctggttgaggagcctgttaagacggctccgggaaaaaagaggccggtagagcactctcctgcggagctagattcctcctccggaactggaaagtcgggccaacagcctgcaagaaagagattgaattttggtcagactggagacgcagactccgtacctgacccccagcctctcggacagccaccagcagccccctctggtctgggaactaatacgatggcttcaggcagtggcgcaccaatggcagacaataacgagggcgccgacggagtgggtaattcctcgggaaattggcattgcgattccacatggatgggcgacagagtcatcaccaccagcacccgcacctgggctctgcccacctacaacaaccatctgtacaagcaaatttccagccagtctggggccagcaacgacaaccactactttggctacagcaccccttgggggtattttgacttcaacagattccactgccacttctccccacgtgactggcaaagactcatcaacaacaattggggattccggcccaaaagactcaacttcaagctctttaacattcaagtcaaggaggtcacgcagaatgacggtacgacgacgattgccaataaccttaccagcacggttcaggtgtttactgactcggagtaccagctcccgtacgtcctcggctcggcgcatcaaggatgcctcccgccgttcccagcagacgtcttcatggtgccacagtatggatacctcaccctgaacaacgggagtcaggcggtaggacgctcttcattttactgcctggagtactttccttctcagatgctgcgtaccggaaacaactttaccttcagctacacctttgaggacgttccttttcacagcagctacgctcacagccagagtttggaccgtctcatgaatcctctcatcgaccagtacctgtattacttgagcagaacaaacactccaagcggaaccactacgcagtccaggcttcagttttctcaagccggagcgagtgacattcgggaccagtctaggaactggcttcctggaccctgttaccgccagcagcgagtatcaaagacagctgcggacaacaacaacagtgattactcgtggactggagctaccaagtatcacctcaatggaagagactctctggtgaatccgggcacagccatggccagccacaaggacgatgaagaaaagtattttcctcagagcggggttctcatcttcggaaaacaagactcgggaaaaactaatgtggacattgaaaaggtcatgattacagacgaagaggaaatcaggaccaccaatcccgtggctacggagcagtatggttctgtatctaccaatctccagagcggcaacacacaagcagctacctcagatgtcaacacacaaggcgttcttccaggcatggtctggcaggacagagacgtgtacctgcagggacccatctgggcaaagattccacacacggacggacattttcacccttctcctcttatgggaggatttggaccgaagcaccctcccccgcagattctcatcaagaataccccggtacctgcgaatccttctaccaccttcagcgcggcaaagcttgcttccttcatcacacagtactccacggggcaggtcagcgtggagatcgagtgggagctgcagaaagagaacagcaaacgctggaaccccgagatccagtatacctccaactacaacaagtctgttaatgtggactttactgtggacactaatggcgtgtattcagagcctcgccccattggcacaagatacctgactcgtaatctgtaa

SEQ ID NO: 3402 - DNA, 2208 bp, Artificial Sequence
  Description of Artificial Sequence: Synthetic polynucleotide
atggctgccgatggttatcttccagattggctcgaggacactctctctgaaggaataagacagtggtggaagctcaaacctggcccaccaccgccaaagcccgcagagcggcataaggacgacagcaggggtcttgtgcttcctgggtacaagtacctcggacccttcaacggactcgacaaaggagagccggtcaacgaggcagacgccgcggccctcgagcacgacaaggcctacgaccggcagctcgacagcggagacaacccgtacctcaagtacaaccacgccgacgcggagtttcaggagcgccttaaagaagatacgtcttttgggggcaacctcgcaagagcagtattccaggcgaaaaagagggttcttgaacctctgggcctggttgaggagcctgttaagacggctccgggaaaaaagaggccggtagagcactctcctgcggagctagattcctcctccggaactggaaagtcgggccaacagcctgcaagaaagagattgaattttggtcagactggagacgcagactccgtacctgacccccagcctctcggacagccaccagcagccccctctggtctgggaactaatacgatggcttcaggcagtggcgcaccaatggcagacaataacgagggcgccgacggagtgggtaattcctcgggaaattggcattgcgattccacatggatgggcgacagagtcatcaccaccagcacccgcacctgggctctgcccacctacaacaaccatctgtacaagcaaatttccagccagtctggggccagcaacgacaaccactactttggctacagcaccccttgggggtattttgacttcaacagattccactgccacttctccccacgtgactggcaaagactcatcaacaacaattggggattccggcccaaaagactcaacttcaagctctttaacattcaagtcaaggaggtcacgcagaatgacggtacgacgacgattgccaataaccttaccagcacggttcaggtgtttactgactcggagtaccagctcccgtacgtcctcggctcggcgcatcaaggatgcctcccgccgttcccagcagacgtcttcatggtgccacagtatggatacctcaccctgaacaacgggagtcaggcggtaggacgctcttcattttactgcctggagtactttccttctcagatgctgcgtaccggaaacaactttaccttcagctacacctttgaggacgttccttttcacagcagctacgctcacagccagagtttggaccgtctcatgaatcctctcatcgaccagtacctgtattacttgagcagaacaaacactccaagcggaaccactacgcagtccaggcttcagttttctcaagccggagcgagtgacattcgggaccagtctaggaactggcttcctggaccctgttaccgccagcagcgagtatcaaagacagctgcggacaacaacaacagtgattactcgtggactggagctaccaagtatcacctcaatggaagagactctctggtgaatccgggcacagccatggccagccacaaggacgatgaagaaaagtattttcctcagagcggggttctcatcttcggaaaacaagactcgggaaaaactaatgtggacattgaaaaggtcatgattacagacgaagaggaaatcaggaccaccaatcccgtggctacggagcagtatggttctgtatctaccaatctccagagcggcaacacacaagcagctacctcagatgtcaacacacaaggcgttcttccaggcatggtctggcaggacagagacgtgtacctgcagggacccatctgggcaaagattccacacacggacggacattttcacccttctcctcttatgggaggatttggaccgaagcaccctcccccgcagattctcatcaagaataccccggtacctgcgaatccttctaccaccttcagcgcggcaaagtttgcttccttcaccacacagtactccacggggcaggtcagcgtggagatcgagtgggagctgcagaaagagaacagcaaacgctggaaccccgagatccagtatacctccaactacaacaagtctgttaatgtggactttactgtggacactaatggcgtgtattcagagcctcgccccattggcacaagatacctgactcgtaatctgtaa

SEQ ID NO: 3403 - DNA, 2208 bp, Artificial Sequence
  Description of Artificial Sequence: Synthetic polynucleotide
atggctgccgatggttatcttccagattggctcgaggacactctctctgaaggaataagacagtggtggaagctcaaacctggcccaccaccgccaaagcccgcagagcggcataaggacgacagcaggggtcttgtgcttcctgggtacaagtacctcggacccttcaacggactcgacaaaggagagccggtcaacgaggcagacgccgcggccctcgagcacgacaaggcctacgaccggcagctcgacagcggagacaacccgtacctcaagtacaaccacgccgacgcggagtttcaggagcgccttaaagaagatacgtcttttgggggcaacctcgcaagagcagtattccaggcgaaaaagagggttcttgaacctctgggcctggttgaggagcctgttaagacggctccgggaaaaaagaggccggtagagcactctcctgcggagctagattcctcctccggaactggaaagtcgggccaacagcctgcaagaaagagattgaattttggtcagactggagacgcagactccgtacctgacccccagcctctcggacagccaccagcagccccctctggtctgggaactaatacgatggcttcaggcagtggcgcaccaatggcagacaataacgagggcgccgacggagtgggtaattcctcgggaaattggcattgcgattccacatggatgggcgacagagtcatcaccaccagcacccgcacctgggctctgcccacctacaacaaccatctgtacaagcaaatttccagccagtctggggccagcaacgacaaccactactttggctacagcaccccttgggggtattttgacttcaacagattccactgccacttctccccacgtgactggcaaagactcatcaacaacaattggggattccggcccaaaagactcaacttcaagctctttaacattcaagtcaaggaggtcacgcagaatgacggtacgacgacgattgccaataaccttaccagcacggttcaggtgtttactgactcggagtaccagctcccgtacgtcctcggctcggcgcatcaaggatgcctcccgccgttcccagcagacgtcttcatggtgccacagtatggatacctcaccctgaacaacgggagtcaggcggtaggacgctcttcattttactgcctggagtactttccttctcagatgctgcgtaccggaaacaactttaccttcagctacacctttgaggacgttccttttcacagcagctacgctcacagccagagtttggaccgtctcatgaatcctctcatcgaccagtacctgtattacttgagcagaacaaacactccaagcggaaccactacgcagtccaggcttcagttttctcaagccggagcgagtgacattcgggaccagtctaggaactggcttcctggaccctgttaccgccagcagcgagtatcaaagacagctgcggacaacaacaacagtgattactcgtggactggagctaccaagtatcacctcaatggaagagactctctggtgaatccgggcacagccatggccagccacaaggacgatgaagaaaagtattttcctcggagcggggttctcatcttcggaaaacaagactcgggaaaaactaatgtggacattgaaaaggtcatgattacagacgaagaggaaatcaggaccaccaatcccgtggctacggagcagtatggttctgtatctaccaatctccagagcggcaacacacaagcagctacctcagatgtcaacacacaaggcgttcttccaggcatggtctggcaggacagagacgtgtacctgcagggacccatctgggcaaagattccacacacggacggacattttcacccttctcctcttatgggaggatttggaccgaagcaccctcccccgcagattctcatcaagaataccccggtacctgcgaatccttctaccaccttcagcgcggcaaagtttgcttccttcatcacacagtactccacggggcaggtcagcgtggagatcgagtgggagctgcagaaagagaacagcaaacgctggaaccccgagatccagtatacctccaactacaacaagtctgttaatgtggactttactgtggacactaatggcgtgtattcagagcctcgccccattggcacaagatacctgactcgtaatctgtaa

SEQ ID NO: 3404 - DNA, 2208 bp, Artificial Sequence
  Description of Artificial Sequence: Synthetic polynucleotide
atggctgccgatggttatcttccagattggctcgaggacactctctctgaaggaataagacagtggtggaagctcaaacctggcccaccaccgccaaagcccgcagagcggcataaggacgacagcaggggtcttgtgcttcctgggtacaagtacctcggacccttcaacggactcgacaaaggagagccggtcaacgaggcagacgccgcggccctcgagcacgacaaggcctacgaccggcagctcgacagcggagacaacccgtacctcaagtacaaccacgccgacgcggagtttcaggagcgccttaaagaagatacgtcttttgggggcaacctcgcaagagcagtattccaggcgaaaaagagggttcttgaacctctgggcctggttgaggagcctgttaagacggctccgggaaaaaagaggccggtagagcactctcctgcggagctagattcctcctccggaactggaaagtcgggccaacagcctgcaagaaagagattgaattttggtcagactggagacgcagactccgtacctgacccccagcctctcggacagccaccagcagccccctctggtctgggaactaatacgatggcttcaggcagtggcgcaccaatggcagacaataacgagggcgccgacggagtgggtaattcctcgggaaattggcattgcgattccacatggatgggcgacagagtcatcaccaccagcacccgcacctgggctctgcccacctacaacaaccatctgtacaagcaaatttccagccagtctggggccagcaacgacaaccactactttggctacagcaccccttgggggtattttgacttcaacagattccactgccacttctccccacgtgactggcaaagactcatcaacaacaattggggattccggcccaaaagactcaacttcaagctctttaacattcaagtcaaggaggtcacgcagaatgacggtacggcgacgattgccaataaccttaccagcacggttcaggtgtttactgactcggagtaccagctcccgtacgtcctcggctcggcgcatcaaggatgcctcccgccgttcccagcagacgtcttcatggtgccacagtatggatacctcaccctgaacaacgggagtcaggcggtaggacgctcttcattttactgcctggagtactttccttctcagatgctgcgtaccggaaacaactttaccttcagctacacctttgaggacgttccttttcacagcagctacgctcacagccagagtttggaccgtctcatgaatcctctcatcgaccagtacctgtattacttgagcagaacaaacactccaagcggaaccactacgcagtccaggcttcagttttctcaagccggagcgagtgacattcgggaccagtctaggaactggcttcctggaccctgttaccgccagcagcgagtatcaaagacagctgcggacaacaacaacagtgattactcgtggactggagctaccaagtatcacctcaatggaagagactctctggtgaatccgggcacagccatggccagccacaaggacgatgaagaaaagtattttcctcagagcggggttctcatcttcggaaaacaagactcgggaaaaactaatgtggacattgaaaaggtcatgattacagacgaagaggaaatcaggaccaccaatcccgtggctacggagcagtatggttctgtatctaccaatctccagagcggcaacacacaagcagctacctcagatgtcaacacacaaggcgttcttccaggcatggtctggcaggacagagacgtgtacctgcagggacccatctgggcaaagattccacacacggacggacattttcacccttctcctcttatgggaggatttggaccgaagcaccctcccccgcagattctcatcaagaataccccggtacctgcgaatccttctaccaccttcagcgcggcaaagtttgcttccttcatcacacagtactccacggggcaggtcagcgtggagatcgagtgggagctgcagaaagagaacagcaaacgctggaaccccgagatccagtatacctccaactacaacaagtctgttaatgtggactttactgtggacactaatggcgtgtattcagagcctcgccccattggcacaagatacctgactcgtaatctgtaa

SEQ ID NO: 3405 - DNA, 2208 bp, Artificial Sequence
  Description of Artificial Sequence: Synthetic polynucleotide
atggctgccgatggttatcttccagattggctcgaggacactctctctgaaggaataagacagtggtggaagctcaaacctggcccaccaccgccaaagcccgcagagcggcataaggacgacagcaggggtcttgtgcttcctgggtacaagtacctcggacccttcaacggactcgacaaaggagagccggtcaacgaggcagacgccgcggccctcgagcacgacaaggcctacgaccggcagcccgacagcggagacaacccgtacctcaagtacaaccacgccgacgcggagtttcaggagcgccttaaagaagatacgtcttttgggggcaacctcgcaagagcagtattccaggcgaaaaagagggttcttgaacctctgggcctggttgaggagcctgttaagacggctccgggaaaaaagaggccggtagagcactctcctgcggagctagattcctcctccggaactggaaagtcgggccaacagcctgcaagaaagagattgaattttggtcagactggagacgcagactccgtacctgacccccagcctctcggacagccaccagcagccccctctggtctgggaactaatacgatggcttcaggcagtggcgcaccaatggcagacaataacgagggcgccgacggagtgggtaattcctcgggaaattggcattgcgattccacatggatgggcgacagagtcatcaccaccagcacccgcacctgggctctgcccacctacaacaaccatctgtacaagcaaatttccagccagtctggggccagcaacgacaaccactactttggctacagcaccccttgggggtattttgacttcaacagattccactgccacttctccccacgtgactggcaaagactcatcaacaacaattggggattccggcccaaaagactcaacttcaagctctttaacattcaagtcaaggaggtcacgcagaatgacggtacgacgacgattgccaataaccttaccagcacggttcaggtgtttactgactcggagtaccagctcccgtacgtcctcggctcggcgcatcaaggatgcctcccgccgttcccagcagacgtcttcatggtgccacagtatggatacctcaccctgaacaacgggagtcaggcggtaggacgctcttcattttactgcctggagtactttccttctcagatgctgcgtaccggaaacaactttaccttcagctacacctttgaggacgttccttttcacagcagctacgctcacagccagagtttggaccgtctcatgaatcctctcatcgaccagtacctgtattacttgagcagaacaaacactccaagcggaaccactacgcagtccaggcttcagttttctcaagccggagcgagtgacattcgggaccagtctaggaactggcttcctggaccctgttaccgccagcagcgagtatcaaagacagctgcggacaacaacaacagtgattactcgtggactggagctaccaagtatcacctcaatggaagagactctctggtgaatccgggcacagccatggccagccacaaggacgatgaagaaaagtattttcctcagagcggggttctcatcttcggaaaacaagactcgggaaaaactaatgtggacattgaaaaggtcatgattacagacgaagaggaaatcaggaccaccaatcccgtggctacggagcagtatggttctgtatctaccaatctccagagcggcaacacacaagcagctacctcagatgtcaacacacaaggcgttcttccaggcatggtctggcaggacagagacgtgtacctgcagggacccatctgggcaaagattccacacacggacggacattttcacccttctcctcttatgggaggatttggaccgaagcaccctcccccgcagattctcatcaagaataccccggtacctgcgaatccttctaccaccttcagcgcggcaaagtttgcttccttcatcacacagtactccacggggcaggtcagcgtggagatcgagtgggagctgcagaaagagaacagcaaacgctggaaccccgagatccagtatacctccaactacaacaagtctgttaatgtggactttactgtggacactaatggcgtgtattcagagcctcgccccattggcacaagatacctgactcgtaatctgtaa

SEQ ID NO: 3406 - DNA, 2208 bp, Artificial Sequence
  Description of Artificial Sequence: Synthetic polynucleotide
atggctgccgatggttatcttccagattggctcgaggacactctctctgaaggaataagacagtggtggaagctcgaacctggcccaccaccgccaaagcccgcagagcggcataaggacgacagcaggggtcttgtgcttcctgggtacaagtacctcggacccttcaacggactcgacaaaggagagccggtcaacgaggcagacgccgcggccctcgagcacgacaaggcctacgaccggcagctcgacagcggagacaacccgtacctcaagtacaaccacgccgacgcggagtttcaggagcgccttaaagaagatacgccttttgggggcaacctcgcaagagcagtattccaggcgaaaaagagggttcttgaacctctgggcctggttgaggagcctgttaagacggctccgggaaaaaagaggccggtagagcactctcctgcggagctagattcctcctccggaactggaaagtcgggccaacagcctgcaagaaagagattgaattttggtcagactggagacgcagactccgtacctgacccccagcctctcggacagccaccagcagccccctctggtctgggaactaatacgatggcttcaggcagtggcgcaccaatggcagacaataacgagggcgccgacggagtgggtaattcctcgggaaattggcattgcgattccacatggatgggcgacagagtcatcaccaccagcacccgcacctgggctctgcccacctacaacaaccatctgtacaagcaaatttccagccagtctggggccagcaacgacaaccactactttggctacagcaccccttgggggtattttgacttcaacagattccactgccacttctccccacgtgactggcaaagactcatcaacaacaattggggattccggcccaaaagactcaacttcaagctctttaacattcaagtcaaggaggtcacgcagaatgacggtacgacgacgattgccaataaccttaccagcacggttcaggtgtttactgactcggagtaccagctcccgtacgtcctcggctcggcgcatcaaggatgcctcccgccgttcccagcagacgtcttcatggtgccacagtatggatacctcaccctgaacaacgggagtcaggcggtaggacgctcttcattttactgcctggagtactttccttctcagatgctgcgtaccggaaacaactttaccttcagctacacctttgaggacgttccttttcacagcagctacgctcacagccagagtttggaccgtctcatgaatcctctcatcgaccagtacctgtattacttgagcagaacaaacactccaagcggaaccactacgcagtccaggcttcagttttctcaagccggagcgagtgacattcgggaccagtctaggaactggcttcctggaccctgttatcgccagcagcgagtatcaaagacagctgcggacaacaacaacagtgattactcgtggactggagctaccaagtatcacctcaatggaagagactctctggtgaatccgggcacagccatggccagccacgaggacgatgaagaaaagtattttcctcagagcggggttctcatcttcggaaaacaagactcgggaaaaactaatgtggacattgaaaaggtcatgattacagacgaagaggaaatcaggaccaccaatcccgtggctacggagcagtatggttctgtatctaccaatctccagagcggcaacacacaagcagctacctcagatgtcaacacacaaggcgttcttccaggcatggtctggcaggacagagacgtgtacctgcagggacccatctgggcaaagattccacacacggacggacattttcacccttctcctcttatgggaggatttggaccgaagcaccctcccccgcagattctcatcaagaataccccggtacctgcgaatccttctaccaccttcagcgcggcaaagtttgcttccttcatcacacagtactccacggggcaggtcagcgtggagatcgagtgggagctgcagaaagagaacagcaaacgctggaaccccgagatccagtatacctccaactacaacaagtctgttaatgtggactttactgtggacactaatggcgtgtattcagagcctcgccccattggcacaagatacctgactcgtaatctgtaa

SEQ ID NO: 3407 - DNA, 2205 bp, Artificial Sequence
  Description of Artificial Sequence: Synthetic polynucleotide
atggctgccgatggttatcttccagattggctcgaggacactctctctgaaggaataagacagtggtggaagctcaaacctggcccaccaccgccaaagcccgcagagcggcataaggacgacagcaggggtcttgtgcttcctgggtacaagtacctcggacccttcaacggactcgacaaaggagagccggtcaacgaggcagacgccgcggccctcgagcacgacaaggcctacgaccggcagctcgacagcggagacaacccgtacctcaagtacaaccacgccgacgcggagtttcaggagcgccttaaagaagatacgtcttttgggggcaacctcgcaagagcagtattccaggcgaaaaagagggttcttgaacctctgggcctggttgaggagcctgttaagacggctccgggaaaaaagaggccggtagagcactctcctgcggagctagattcctcctccggaactggaaagtcgggccaacagcctgcaagaaagagattgaattttggtcagactggagacgcagactccgtacctgacccccagcctctcggacagccaccagcagccccctctggtctgggaactaatacgatggcttcaggcagtggcgcaccaatggcagacaataacgagggcgccgacggagtgggtaattcctcgggaaattggcattgcgattccacatggatgggcgacagagtcatcaccaccagcacccgcacctgggctctgcccacctacaacaaccatctgtacaagcaaatttccagccagtctggggccagcaacgacaaccactactttggctacagcaccccttgggggtattttgacttcaacagattccactgccacttctccccacgtgactggcaaagactcatcaacaacaattggggattccggcccaaaagactcaacttcaagctctttaacattcaagtcaaggaggtcacgcagaatgacggtacgacgacgattgccaataaccttaccagcacggttcaggtgtttactgactcggagtaccagctcccgtacgtcctcggctcggcgcatcaaggatgcctcccgccgttcccagcagacgtcttcatggtgccacagtatggatacctcaccctgaacaacgggagtcaggcggtaggacgctcttcattttactgcctggagtactttccttctcagatgctgcgtaccggaaacaactttaccttcagctacacctttgaggacgttccttttcacagcagctacgctcacagccagagtttggaccgtctcatgaatcctctcatcgaccagtacctgtattacttgagcagaacaaacactccaagcggaaccactacgcagtccaggcttcagttttctcaagccggagcgagtgacattcgggaccagtctaggaactggcttcctggaccctgttaccgccagcagcgagtatcaaagacagctgcggacaacaacagtgattactcgtggactggagctaccaagtatcacctcaatggaagagactctctggtgaatccgggcacagccatggccagccacaaggacgatgaagaaaagtattttcctcagagcggggttctcatcttcggaaaacaagactcgggaaaaactaatgtggacattgaaaaggtcatgattacagacgaagaggaaatcaggaccaccaatcccgtggctacggagcagtatggttctgtatctaccaatctccagagcggcaacacacaagcagctacctcagatgtcaacacacaaggcgttcttccaggcatggtctggcaggacagagacgtgtacctgcagggacccatctgggcaaagattccacacacggacggacattttcacccttctcctcttatgggaggatttggaccgaagcaccctcccccgcagattctcatcaagaataccccggtacctgcgaatccttctaccaccttcagcgcggcaaagtttgcttccttcatcacacagtactccacggggcaggtcagcgtggagatcgagtgggagctgcagaaagagaacagcaaacgctggaaccccgagatccagtatacctccaactacaacaagtctgttaatgtggactttactgtggacactaatggcgtgtattcagagcctcgccccattggcacaagatacctgactcgtaatctgtaa

SEQ ID NO: 3408 - DNA, 2208 bp, Artificial Sequence
  Description of Artificial Sequence: Synthetic polynucleotide
atggctgccgatggttatcttccagattggctcgaggacactctctctgaaggaataagacagtggtggaagctcaaacctggcccaccaccgccaaagcccgcagagcggcataaggacgacagcaggggtcttgtgcttcctgggtacaagtacctcggacccttcaacggactcgacaaaggagagccggtcaacgaggcagacgccgcggccctcgagcacgacaaggcctacgaccggcagctcgacagcggagacaacccgtacctcaagtacaaccacgccgacgcggagtttcaggagcgccttaaagaagatacgccttttgggggcaacctcgcaagagcagtattccaggcgaaaaagagggttcttgaacctctgggcctggttgaggagcctgttaagacggctccgggaaaaaagaggccggtagagcactctcctgcggagctagattcctcctccggaactggaaagtcgggccaacagcctgcaagaaagagattgaattttggtcagactggagacgcagactccgtacctgacccccagcctctcggacagccaccagcagccccctctggtctgggaactaatacgatggcttcaggcagtggcgcaccaatggcagacaataacgagggcgccgacggagtgggtaattcctcgggaaattggcattgcgattccacatggatgggcgacagagtcatcaccaccagcacccgcacctgggctctgcccacctacaacaaccatctgtacaagcaaatttccagccagtctggggccagcaacgacaaccactactttggctacagcaccccttgggggtattttgacttcaacagattccactgccacttctccccacgtgactggcaaagactcatcaacaacaattggggattccggcccaaaagactcaacttcaagctctttaacattcaagtcaaggaggtcacgcagaatggcggtacgacgacgattgccaataaccttaccagcacggttcaggtgtttactgactcggagtaccagctcccgtacgtcctcggctcggcgcatcaaggatgcctcccgccgttcccagcagacgtcttcatggtgccacagtatggatacctcaccctgaacaacgggagtcaggcggtaggacgctcttcattttactgcctggagtactttccttctcagatgctgcgtaccggaaacaactttaccttcagctacacctttgaggacgttccttttcacagcagctacgctcacagccagagtttggaccgtctcatgaatcctctcatcgaccagtacctgtattacttgagcagaacaaacactccaagcggaaccactacgcagtccaggcttcagttttctcaagccggagcgagtgacattcgggaccagtctaggaactggcttcctggaccctgttaccgccagcagcgagtatcaaagacagctgcggacaacaacaacagtgattactcgtggactggagctaccaagtatcacctcaatggaagagactctctggtgaatccgggcacagccatggccagccacaaggacgatgaagaaaagtattttcctcagagcggggttctcatcttcggaaaacaagactcgggaaaaactaatgtggacattgaaaaggtcatgattacagacgaagaggaaatcaggaccaccaatcccgtggctacggagcagtatggttctgtatctaccaatctccagagcggcaacacacaagcagctacctcagatgtcaacacacaaggcgttcttccaggcatggtctggcaggacagagacgtgtacctgcagggacccatctgggcaaagattccacacacggacggacattttcacccttctcctcttatgggaggatttggaccgaagcaccctcccccgcagattctcatcaagaataccccggtacctgcgaatccttctaccaccttcagcgcggcaaagtttgcttccttcatcacacagtactccacggggcaggtcagcgtggagatcgagtgggagctgcagaaagagaacagcaaacgctggaaccccgagatccagtatacctccaactacaacaagtctgttaatgtggactttactgtggacactaatggcgtgtattcagagcctcgccccattggcacaagatacctgactcgtaatctgtaa

SEQ ID NO: 3409 - DNA, 2208 bp, Artificial Sequence
  Description of Artificial Sequence: Synthetic polynucleotide
atggctgccgatggttatcttccagattggctcgaggacactctctctgaaggaataagacagtggtggaagctcaaacctggcccaccaccgccaaagcccgcagagcggcataaggacgacagcaggggtcttgtgcttcctgggtacaagtacctcggacccttcaacggactcgacaaaggagagccggtcaacgaggcagacgccgcggccctcgagcacgacaaggcctacgaccggcagctcgacagcggagacaacccgtacctcaagtacaaccacgccgacgcggagtttcaggagcgccttaaagaagatacgtcttttgggggcaacctcgcaagagcagtattccaggcgaaaaagggggttcttgaacctctgggcctggttgaggagcctgttaagacggctccgggaaaaaagaggccggtagagcactctcctgcggagctagattcctcctccggaactggaaagtcgggccaacagcctgcaagaaagagattgaattttggtcagactggagacgcagactccgtacctgacccccagcctctcggacagccaccagcagccccctctggtctgggaactaatacgatggcttcaggcagtggcgcaccaatggcagacaataacgagggcgccgacggagtgggtaattcctcgggaaattggcattgcgattccacatggatgggcgacagagtcatcaccaccagcacccgcacctgggctctgcccacctacaacaaccatctgtacaagcaaatttccagccagtctggggccagcaacgacaaccactactttggctacagcaccccttgggggtattttgacttcaacagattccactgccacttctccccacgtgactggcaaagactcatcaacaacaattggggattccggcccaaaagactcaacttcaagctctttaacattcaagtcaaggaggtcacgcagaatgacggtacgacgacgattgccaataaccttaccagcacggttcaggtgtttactgactcggagtaccagctcccgtacgtcctcggctcggcgcatcaaggatgcctcccgccgttcccagcagacgtcttcatggtgccacagtatggatacctcaccctgaacaacgggagtcaggcggtaggacgctcttcattttactgcctggagtactttccttctcagatgctgcgtaccggaaacaactttaccttcagctacacctttgaggacgttccttttcacagcagctacgctcacagccagagtttggaccgtctcatgaatcctctcatcgaccagtacctgtattacttgagcagaacaaacactccaagcggaaccactacgcagtccaggcttcagttttctcaagccggagcgagtgacattcgggaccagtctaggaactggcttcctggaccctgttaccgccagcagcgagtatcaaagacagctgcggacaacaacaacagtgattactcgtggactggagctaccaagtatcacctcaatggaagagactctctggtgaatccgggcacagccatggccagccacaaggacgatgaagaaaagtattttcctcagagcggggttctcatcttcggaaaacaagactcgggaaaaactaatgtggacattgaaaaggtcatgattacagacgaagaggaaatcaggaccaccaatcccgtggctacggagcagtatggttctgtatctaccaatctccagagcggcaacacacaagcagctacctcagatgtcaacacacaaggcgttcttccaggcatggtctggcaggacagagacgtgtacctgcagggacccatctgggcaaagattccacacacggacggacattttcacccttctcctcttatgggaggatttggaccgaagcaccctcccccgcagattctcatcaagaataccccggtacctgcgaatccttctaccaccttcagcgcggcaaagtttgcttccttcatcacacagtactccacggggcaggtcagcgtggagatcgagtgggagctgcagaaagagaacagcaaacgctggaaccccgagatccagtatacctccaactacaacaagtctgttaatgtggactttactgtggacactaatggcgtgtattcagagcctcgccccattggcacaagatacctgactcgtaatctgtaa

SEQ ID NO: 3410 - DNA, 2208 bp, Artificial Sequence
  Description of Artificial Sequence: Synthetic polynucleotide
atggctgccgatggttatcttccagattggctcgaggacactctctctgaaggaataagacagtggtggaagctcaaacctggcccaccaccgccaaagcccgcagagcggcataaggacgacagcaggggtcttgtgcttcctgggtacaagtacctcggacccttcaacggactcgacaaaggagagccggtcaacgaggcagacgccgcggccctcgagcacgacaaggcctacgaccggcagctcgacagcggagacaacccgtacctcaagtacaaccacgccgacgcggagtttcaggagcgccttaaagaagatacgtcttttgggggcaacctcgcaagagcagtattccaggcgaaaaagagggttcttgaacctctgggcctggttgaggagcctgttaagacggctccgggaaaaaagaggccggtagagcactctcctgcggagctagattcctcctccggaactggaaagtcgggccaacagcctgcaagaaagagattgaattttggtcagactggagacgcagactccgtacctgacccccagcctctcggacagccaccagcagccccctctggtctgggaactaatacgatggcttcaggcagtggcgcaccaatggcagacaataacgagggcgccgacggagtgggtaattcctcgggaaattggcattgcgattccacatggatgggcgacagagtcatcaccaccagcacccgcacctgggctctgcccacctacaacaaccatctgtacaagcaaatttccagccagtctggggccagcaacgacaaccactactttggctacagcaccccttgggggtattttgacttcaacagattccactgccacttctccccacgtgactggcaaagactcatcaacaacaattggggattccggcccaaaagactcaacttcaagctctttaacattcaagtcaaggaggtcacgcagaatgacggtacgacgacgattgccaataaccttaccagcacggttcaggtgtttactgactcggagtaccagctcccgtacgtcctcggctcggcgcatcaaggatgcctcccgccgttcccagcagacgtcttcatggtgccacagtatggatacctcaccctgaacaacgggagtcaggcggtaggacgctcttcattttactgcctggagtactttccttctcagatgctgcgtaccggaaacaactttaccttcagctacacctttgaggacgttccttttcacagcagctacgctcacagccagagtttggaccgtctcatgaatcctctcatcgaccagtacctgtattacttgagcagaacaaacactccaagcggaaccactacgcagtccaggcttcagttttctcaagccggagcgagtgacattcgggaccagtctaggaactggcttcctggaccctgttaccgccagcagcgagtatcaaagacagctgcggacaacaacaacagtgattactcgtggactggagctaccaagtatcacctcaatggaagagactctctggtgaatccgggcacagccatggccagccacaaggacgatgaagaaaagtattttcctcagagcggggttctcatcttcggaaaacaagactcgggaaaaactaatgtggacattgaaaaggtcatgattacagacgaagaggaaatcaggaccaccaatcccgtggctacggagcagtatggttctgtatctaccaatctccagagcggcaacacacaagcagctacctcagatgtcaacacacaaggcgttcttccaggcatggtctggcaggacagagacgtgtacctgcagggacccatctgggcaaggattccacacacggacggacattttcacccttctcctcttatgggaggatttggaccgaagcaccctcccccgcagattctcatcaagaataccccggtacctgcgaatccttctaccaccttcagcgcggcaaagtttgcttccttcatcacacagtactccacggggcaggtcagcgtggagatcgagtgggagctgcagaaagagaacagcaaacgctggaaccccgagatccagtatacctccaactacaacaagtctgttaatgtggactttactgtggacactaatggcgtgtattcagagcctcgccccattggcacaagatacctgactcgtaatctgtaa

SEQ ID NO: 3411 - DNA, 2208 bp, Artificial Sequence
  Description of Artificial Sequence: Synthetic polynucleotide
atggctgccgatggttatcttccagattggctcgaggacactctctctgaaggaataagacagtggtggaagctcaaacctggcccaccaccgccaaagcccgcagagcggcataaggacgacagcaggggtcttgtgcttcctgggtacaagtacctcggacccttcaacggactcgacaaaggagagccggtcaacgaggcagacgccgcggccctcgagcacgacaaggcctacgaccggcagctcgacagcggagacaacccgtacctcaagtacaaccacgccgacgcggagtttcaggagcgccttaaagaagatacgtcttttgggggcaacctcgcaagagcagtattccaggcgaaaaagagggttcttgaacctctgggcctggttgaggagcctgttaagacggctccgggaaaaaagaggccggtagggcactctcctgcggagctagattcctcctccggaactggaaagtcgggccaacagcctgcaagaaagagattgaattttggtcagactggagacgcagactccgtacctgacccccagcctctcggacagccaccagcagccccctctggtctgggaactaatacgatggcttcaggcagtggcgcaccaatggcagacaataacgagggcgccgacggagtgggtaattcctcgggaaattggcattgcgattccacatggatgggcgacagagtcatcaccaccagcacccgcacctgggctctgcccacctacaacaaccatctgtacaagcaaatttccagccagtctggggccagcaacgacaaccactactttggctacagcaccccttgggggtattttgacttcaacagattccactgccacttctccccacgtgactggcaaagactcatcaacaacaattggggattccggcccaaaagactcaacttcaagctctttaacattcaagtcaaggaggtcacgcagaatgacggtacgacgacgattgccaataaccttaccagcacggttcaggtgtttactgactcggagtaccagctcccgtacgtcctcggctcggcgcatcaaggatgcctcccgccgttcccagcagacgtcttcatggtgccacagtatggatacctcaccctgaacaacgggagtcaggcggtaggacgctcttcattttactgcctggagtactttccttctcagatgctgcgtaccggaaacaactttaccttcagctacacctttgaggacgttccttttcacagcagctacgctcacagccagagtttggaccgtctcatgaatcctctcatcgaccagtacctgtattacttgagcagaacaaacactccaagcggaaccactacgcagtccaggcttcagttttctcaagccggagcgagtgacattcgggaccagtctaggaactggcttcctggaccctgttaccgccagcagcgagtatcaaagacagctgcggacaacaacaacagtgattactcgtggactggagctaccaagtatcacctcaatggaagagactctctggtgaatccgggcacagccatggccagccacaaggacgatgaagaaaagtattttcctcagagcggggttctcatcttcggaaaacaagactcgggaaaaactaatgtggacattgaaaaggtcatgattacagacgaagaggaaatcaggaccaccaatcccgtggctacggagcagtatggttctgtatctaccaatctccagagcggcaacacacaagcagctacctcagatgtcaacacacaaggcgttcttccaggcatggtctggcaggacagagacgtgtacctgcagggacccatctgggcaaagattccacacacggacggacattttcacccttctcctcttatgggaggatttggaccgaagcaccctcccccgcagattctcatcaagaataccccggtacctgcgaatccttctaccaccttcagcgcggcaaagtttgcttccttcatcacacagtactccacggggcaggtcagcgtggagatcgagtgggagctgcagaaagagaacagcaaacgctggaaccccgagatccagtatacctccaactacaacaagtctgttaatgtggactttactgtggacactaatggcgtgtattcagagcctcgccccattggcacaagatacctgactcgtaatctgtaa

SEQ ID NO: 3412 - DNA, 2208 bp, Artificial Sequence
  Description of Artificial Sequence: Synthetic polynucleotide
atggctgccgatggttatcttccagattggctcgaggacactctctctgaaggaataagacagtggtggaagctcaaacctggcccaccaccgccaaagcccgcagagcggcataaggacgacagcaggggtcttgtgcttcctgggtacaagtacctcggacccttcaacggactcgacaaaggagagccggtcaacgaggcagacgccgcggccctcgagcacgacaaggcctacgaccggcagctcgacagcggagacaacccgtacctcaagtacaaccacgccgacgcggagtttcaggagcgccttaaagaagatacgtcttttgggggcaacctcgcaagagcagtattccaggcgaaaaagagggttcttgaacctctgggcctggttgaggagcctgttaagacggctccgggaaaaaagaggccggtagagcactctcctgcggagctagattcctcctccggaactggaaagtcgggccaacagcctgcaagaaagagattgaattttggtcagactggagacgcagactccgtacctgacccccagcctctcggacagccaccagcagccccctctggtctgggaactaatacgatggcttcaggcagtggcgcaccaatggcagacaataacgagggcgccgacggagtgggtaattcctcgggaaattggcattgcgattccacatggatgggcgacagagtcatcaccaccagcacccgcacctgggctctgcccacctacaacaaccatctgtacaagcaaatttccagccagtctggggccagcaacgacaaccactactttggctacagcaccccttgggggtattttgacttcaacagattccactgccacttctccccacgtgactggcaaagactcatcaacaacaattggggattccggcccaaaagactcaacttcaagctctttaacattcaagtcaaggaggtcacgcagaatgacggtacgacgacgattgccaataaccttaccagcacggttcaggtgtttactgactcggagtaccagctcccgtacgtcctcggctcggcgcatcaaggatgcctcccgccgttcccagcagacgtcttcatggtgccacagtatggatacctcaccctgaacaacgggagtcaggcggtaggacgctcttcattttactgcctggagtactttccttctcagatgctgcgtaccggaaacaactttaccttcagctacacctttgaggacgttccttttcacagcagctacgctcacagccagagtttggaccgtctcatgaatcctctcatcgaccagtacctgtattacttgagcagaacaaacactccaagcggaaccactacgcagtccaggcttcagttttctcaagccggagcgagtgacattcgggaccagtctaggaactggcttcctggaccctgttaccgccagcagcgagtatcaaagacagctgcggacaacaacaacagtgattactcgtggactggagctaccaagtatcacctcaatggaagagactctctggtgaatccgggcacagccatggccagccacaaggacgatgaagaaaagtattttcctcagagcggggttctcatcttcggaaaacaagactcgggaaaaactaatgtggacattgaaaaggtcatgattacagacgaagaggaaatcaggaccaccaatcccgtggctacggagcagtatggttctgtatctaccaatctccagagcggcaacacacaagcagctacctcagatgtcaacacacaaggcgttcttccaggcatggtctggcaggacagagacgtgtacctgcagggacccatctgggcaaagattccacacacggacggacattttcacccttctcctcttatgggaggatttggaccgaagcaccctcccccgcagattctcatcaagaataccccggtacctgcgaatccttctaccaccttcagcgcggcaaagtttgcttccttcatcacacagtactccacggggcaggtcagcgtggagatcgagtgggagctgcagaaagggaacagcaaacgctggaaccccgagatccagtatacctccaactacaacaagtctgttaatgtggactttactgtggacactaatggcgtgtattcagagcctcgccccattggcacaagatacctgactcgtaatctgtaa

SEQ ID NO: 3413 - DNA, 2208 bp, Artificial Sequence
  Description of Artificial Sequence: Synthetic polynucleotide
atggctgccgatggttatcttccagattggctcgaggacactctctctgaaggaataagacagtggtggaagctcaaacctggcccaccaccgccaaagcccgcagagcggcataaggacgacagcaggggtcttgtgcttcctgggtacaagtacctcggacccttcaacggactcgacaaaggagagccggtcaacgaggcagacgccgcggccctcgagcacgacaaggcctacgaccggcagctcgacagcggagacaacccgtacctcaagtacaaccacgccgacgcggagtttcaggagcgccttaaagaagatacgccttttgggggcaacctcgcaagagcagtattccaggcgaaaaagagggttcttgaacctctgggcctggttgaggagcctgttaagacggctccgggaaaaaaggggccggtagagcactctcctgcggagctagattcctcctccggaactggaaagtcgggccaacagcctgcaagaaagagattgaattttggtcagactggagacgcagactccgtacctgacccccagcctctcggacagccaccagcagccccctctggtctgggaactaatacgatggcttcaggcagtggcgcaccaatggcagacaataacgagggcgccgacggagtgggtaattcctcgggaaattggcattgcgattccacatggatgggcgacagagtcatcaccaccagcacccgcacctgggctctgcccacctacaacaaccatctgtacaagcaaatttccagccagtctggggccagcaacgacaaccactactttggctacagcaccccttgggggtattttgacttcaacagattccactgccacttctccccacgtgactggcaaagactcatcaacaacaattggggattccggcccaaaagactcaacttcaagctctttaacattcaagtcaaggaggtcacgcagaatgacggtacgacgacgattgccaataaccttaccagcacggttcaggtgtttactgactcggagtaccagctcccgtacgtcctcggctcggcgcatcaaggatgcctcccgccgttcccagcagacgtcttcatggtgccacagtatggatacctcaccctgaacaacgggagtcaggcggtaggacgctcttcattttactgcctggagtactttccttctcagatgctgcgtaccggaaacaactttaccttcagctacacctttgaggacgttccttttcacagcagctacgctcacagccagagtttggaccgtctcatgaatcctctcatcgaccagtacctgtattacttgagcagaacaaacactccaagcggaaccactacgcagtccaggcttcagttttctcaagccggagcgagtgacattcgggaccagtctaggagctggcttcctggaccctgttaccgccagcagcgagtatcaaagacagctgcggacaacaacaacagtgattactcgtggactggagctaccaagtatcacctcaatggaagagactctctggtgaatccgggcacagccatggccagccacaaggacgatgaagaaaagtattttcctcagagcggggttctcatcttcggaaaacaagactcgggaaaaactaatgtggacattgaaaaggtcatgattacagacgaagaggaaatcaggaccaccaatcccgtggctacggagcagtatggttctgtatctaccaatctccagagcggcaacacacaagcagctacctcagatgtcaacacacaaggcgttcttccaggcatggtctggcaggacagagacgtgtacctgcagggacccatctgggcaaagattccacacacggacggacattttcacccttctcctcttatgggaggatttggaccgaagcaccctcccccgcagattctcatcaagaataccccggtacctgcgaatccttctaccaccttcagcgcggcaaagtttgcttccttcatcacacagtactccacggggcaggtcagcgtggagatcgagtgggagctgcagaaagagaacagcaaacgctggaaccccgagatccagtatacctccaactacaacaagtctgttaatgtggactttactatggacactaatggcgtgtattcagagcctcgccccattggcacaagatacctgactcgtaatctgtaa

SEQ ID NO: 3414 - DNA, 2208 bp, Artificial Sequence
  Description of Artificial Sequence: Synthetic polynucleotide
atggctgccgatggttatcttccagattggctcgaggacactctctctgaaggaataagacagtggtggaagctcaaacctggcccaccaccgccaaagcccgcagagcggcataaggacgacagcaggggtcttgtgcttcctgggtacaagtacctcggacccttcaacggactcgacaaaggagagccggtcaacgaggcagacgccgcggccctcgagcacgacaaggcctacgaccggcagctcgacagcggagacaacccgtacctcaagtacaaccacgccgacgcggagtttcaggagcgccttaaagaagatacgtcttttgggggcaacctcgcaagagcagtattccaggcgaaaaagagggttcttgaacctctgggcctggttgaggagcctgttaagacggctccgggaaaaaagaggccggtagagcactctcctgcggagctagattcctcctccggaactggaaagtcgggccaacagcctgcaagaaagagattgaattttggtcagactggagacgcagactccgtacctgacccccagcctctcggacagccaccagcagccccctctggtctgggaactaatacgatggcttcaggcagtggcgcaccaatggcagacaataacgagggcgccgacggagtgggtaattcctcgggaaattggcattgcgattccacatggatgggcgacagagtcatcaccaccagcacccgcacctgggctctgcccacctacaacaaccatctgtacaagcaaatttccagccagtctggggccagcaacgacaaccactactttggctacagcaccccttgggggtattttgacttcaacagattccactgccacttctccccacgtgactggcaaagactcatcaacaacaattggggattccggcccaaaagactcaacttcaagctctttaacattcaagtcaaggaggtcacgcagaatgacggtacgacgacgattgccaataaccttaccagcacggttcaggtgtttactgactcggagtaccagctcccgtacgtcctcggctcggcgcatcaaggatgcctcccgccgttcccagcagacgtcttcatggtgccacagtatggatacctcaccctgaacaacgggagtcaggcggtaggacgctcttcattttactgcctggagtactttccttctcagatgctgcgtaccggaaacaactttaccttcagctacacctttgaggacgttccttttcacagcagctacgctcacagccagagtttggaccgtctcatgaatcctctcatcgaccagtacctgtattacttgagcagaacaaacactccaagcggaaccactacgcagtccaggcttcagttttctcaagccggagcgagtgacattcgggaccagtctaggaactggcttcctggaccctgttaccgccagcagcgagtatcaaagacagctgcggacaacaacaacagtgattactcgtggactggagctaccaagtatcacctcaatggaagggactctctggtgaatccgggcacagccatggccagccacaaggacgatgaagaaaagtattttcctcagagcggggttctcatcttcggaaaacaagactcgggaaaaactaatgcggacattgaaaaggtcatgattacagacgaagaggaaatcaggaccaccaatcccgtggctacggagcagtatggttctgtatctaccaatctccagagcggcaacacacaagcagctacctcagatgtcaacacacaaggcgttcttccaggcatggtctggcaggacagagacgtgtacctgcagggacccatctgggcaaagattccacacacggacggacattttcacccttctcctcttatgggaggatttggaccgaagcaccctcccccgcagattctcatcaagaataccccggtacctgcgaatccttctaccaccttcagcgcggcaaagtttgcttccttcatcacacagtactccacggggcaggtcagcgtggagatcgagtgggagctgcagaaagagaacagcaaacgctggaaccccgagatccagtatacctccaactacaacaagtctgttaatgtggactttactgtggacactaatggcgtgtattcagagcctcgccccattggcacaagatacctgactcgtaatctgtaa

SEQ ID NO: 3415 - DNA, 2208 bp, Artificial Sequence
  Description of Artificial Sequence: Synthetic polynucleotide
atggctgccgatggttatcttccagattggctcgaggacactctctctgaaggaataagacagtggtggaagctcaaacctggcccaccaccgccaaagcccgcagagcggcataaggacgacagcaggggtcttgtgcttcctgggtacaagtacctcggacccttcaacggactcgacaaaggagagccggtcaacgaggcagacgccgcggccctcgagcacgacaaggcctacgaccggcagctcgacagcggagacaacccgtacctcaagtacaaccacgccgacgcggagtttcaggagcgccttaaagaagatacgtcttttgggggcaacctcgcaagagcagtattccaggcgaaaaagagggttcttgaacctctgggcctggttgaggagcctgttaagacggctccgggaaaaaagaggccggtagagcactctcctgcggagctagattcctcctccggaactggaaagtcgggccaacagcctgcaagaaagagattgaattttggtcagactggagacgcagactccgtacctgacccccagcctctcggacagccaccagcagccccctctggtctgggaactaatacgatggcttcaggcagtggcgcaccaatggcagacaataacgagggcggcgacggagtgggtaattcctcgggaaattggcattgcgattccacatggatgggcgacagagtcatcaccaccagcacccgcacctgggctctgcccacctacaacaaccatctgtacaagcaaatttccagccagtctggggccagcaacgacaaccactactttggctacagcaccccttgggggtattttgacttcaacagattccactgccacttctccccacgtgactggcaaagactcatcaacaacaattggggattccggcccaaaagactcaacttcaagctctttaacattcaagtcaaggaggtcacgcagaatgacggtacgacgacgattgccaataaccttaccagcacggttcaggtgtttactgactcggagtaccagctcccgtacgtcctcggctcggcgcatcaaggatgcctcccgccgttcccagcagacgtcttcatggtgccacagtatggatacctcaccctgaacaacgggagtcaggcggtaggacgctcttcattttactgcctggagtactttccttctcagatgctgcgtaccggaaacaactttaccttcagctacacctttgaggacgttccttttcacagcagctacgctcacagccagagtttggaccgtctcatgaatcctctcatcgaccagtacctgtattacttgagcagaacaaacactccaagcggaaccactacgcagtccaggcttcagttttctcaagccggagcgagtgacattcgggaccagtctaggaactggcttcctggaccctgttaccgccagcagcgagtatcaaagacagctgcggacaacaacaacagtgattactcgtggactggagctaccaagtatcacctcaatggaagggactctctggtgaatccgggcacagccatggccagccacaaggacgatgaagaaaagtattttcctcagagcggggttctcatcttcggaaaacaagactcgggaaaaactaatgtggacattgaaaaggtcatgattacagacgaagaggaaatcaggaccaccaatcccgtggctacggagcagtatggttctgtatctaccaatctccagagcggcaacacacaagcagctacctcagatgtcaacacacaaggcgttcttccaggcatggtctggcaggacagagacgtgtacctgcagggacccatctgggcaaagattccacacacggacggacattttcacccttctcctcttatgggaggatttggaccgaagcaccctcccccgcagattctcatcaagaataccccggtacctgcgaatccttctaccaccttcagcgcggcaaagtttgcttccttcatcacacagtactccacggggcaggtcagcgtggagatcgagtgggagctgcagaaagagaacagcaaacgctggaaccccgagatccagtatacctccaactacaacaagtctgttaatgtggactttactgtggacactaatggcgtgtattcagagcctcgccccattggcacaagatacctgactcgtaatctgtaa

SEQ ID NO: 3416 - DNA, 2208 bp, Artificial Sequence
  Description of Artificial Sequence: Synthetic polynucleotide
atggctgccgatggttatcttccagattggctcgaggacactctctctgaaggaataagacagtggtggaagctcaaacctggcccaccaccgccaaagcccgcagagcggcataaggacgacagcaggggtcttgtgcttcctgggtacaagtacctcggacccttcaacggactcgacaaaggagagccggtcaacgaggcagacgccgcggccctcgagcacgacaaggcctacgaccggcagctcgacagcggagacaacccgtacctcaagtacaaccacgccgacgcggagtttcaggagcgccttaaagaagatacgtcttttgggggcaacctcgcaagagcagtattccaggcgaaaaagagggttcttgaacctctgggcctggttgaggagcctgttaagacggctccgggaaaaaagaggccggtagagcactctcctgcggagctagattcctcctccggaactggaaagtcgggccaacagcctgcaagaaagagattgaattttggtcagactggagacgcagactccgtacctgacccccagcctctcggacagccaccagcagccccctctggtctgggaactaatacgatggcttcaggcagtggcgcaccaatggcagacaataacgagggcgccgacggagtgggtaattcctcgggaaattggcattgcgattccacatggatgggcgacagagtcatcaccaccagcacccgcacctgggctctgcccacctacaacaaccatctgtacaagcaaatttccagccagtctggggccagcaacgacaaccactactttggctacagcaccccttgggggtattttgacttcaacagattccactgccacttccccccacgtgactggcaaagactcatcaacaacaattggggattccggcccaaaagactcaacttcaagctctttaacattcaagtcaaggaggtcacgcagaatgacggtacgacgacgattgccaataaccttaccagcacggttcaggtgtttactgactcggagtaccagctcccgtacgtcctcggctcggcgcatcaaggatgcctcccgccgttcccagcagacgtcttcatggtgccacagtatggatacctcaccctgaacaacgggagtcaggcggtaggacgctcttcattttactgcctggagtactttccttctcagatgctgcgtaccggaaacaactttaccttcagctacacctttgaggacgttccttttcacagcagctacgctcacagccagagtttggaccgtctcatgaatcctctcatcgaccagtacctgtattacttgagcagaacaaacactccaagcggaaccactacgcagtccaggcttcagttttctcaagccggagcgagtgacattcgggaccagtctaggaactggcttcctggaccctgttaccgccagcagcgagtatcaaagacagctgcggacaacaacaacagtgattactcgtggactggagctaccaagtatcacctcaatggaagagactctctggtgaatccgggcacagccatggccagccacaaggacgatgaagaaaagtattttcctcagagcggggttctcatcttcggaaaacaagactcgggaaaaactaatgtggacattgaaaaggtcatgattacagacgaagaggaaatcaggaccaccaatcccgtggctacggagcagtatggttctgtatctaccaatctccagagcggcaacacacaagcagctacctcagatgtcaacacacaaggcgttcttccaggcatggtctggcaggacagagacgtgtacctgcagggacccatctgggcaaagattccacacacggacggacattttcacccttctcctcttatgggaggatttggaccgaagcaccctcccccgcagattctcatcaagaataccccggtacctgcgaatccttctaccaccttcagcgcggcaaagtttgcttccttcatcacacagtactccacggggcaggtcagcgtggagatcgagtgggagctgcagaaagagaacagcaaacgctggaaccccgagatccagtatacctccaactacaacaagtctgttaatgtggactttactgtggacactaatggcgtgtattcagagcctcgccccattggcacaagatacctgactcgtaatctgtaa

SEQ ID NO: 3417 - DNA, 2208 bp, Artificial Sequence
  Description of Artificial Sequence: Synthetic polynucleotide
atggctgccgatggttatcttccagattggctcgaggacactctctctgaaggaataagacagtggtggaagctcaaacctggcccaccaccgccaaagcccgcagagcggcataaggacgacagcaggggtcttgtgcttcctgggtacaagtacctcggacccttcaacggactcgacaaaggagagccggtcaacgaggcagacgccgcggccctcgagcacgacaaggcctacgaccggcagctcgacagcggagacaacccgtacctcaagtacaaccacgccgacgcggagtttcaggagcgccttaaagaagatacgtcttttgggggcaacctcgcaagagcagtattccaggcgaaaaagagggttcttgaacctctgggcctggttgaggagcctgttaagacggctccgggaaaaaagaggccggtagagcactctcctgcggagctagattcctcctccggagctggaaagtcgggccaacagcctgcaagaaagagattgaattttggtcagactggagacgcagactccgtacctgacccccagcctctcggacagccaccagcagccccctctggtctgggaactaatacgatggcttcaggcagtggcgcaccaatggcagacaataacgagggcgccgacggagtgggtaattcctcgggaaattggcattgcgattccacatggatgggcgacagagtcatcaccaccagcacccgcacctgggctctgcccacctacaacaaccatctgtacaagcaaatttccagccagtctggggccagcaacgacaaccactaccttggctacagcaccccttgggggtattttgacttcaacagattccactgccacttctccccacgtgactggcaaagactcatcaacaacaattggggattccggcccaaaagactcaacttcaagctctttaacattcaagtcaaggaggtcacgcagaatgacggtacgacgacgattgccaataaccttaccagcacggttcaggtgtttactgactcggagtaccagctcccgtacgtcctcggctcggcgcatcaaggatgcctcccgccgttcccagcagacgtcttcatggtgccacagtatggatacctcaccctgaacaacgggagtcaggcggtaggacgctcttcattttactgcctggagtactttccttctcagatgctgcgtaccggaaacaactttaccttcagctacacctttgaggacgttccttttcacagcagctacgctcacagccagagtttggaccgtctcatgaatcctctcatcgaccagtacctgtattacttgagcagaacaaacactccaagcggaaccactacgcagtccaggcttcagttttctcaagccggagcgagtgacattcgggaccagtctaggaactggcttcctggaccctgttaccgccagcagcgagtatcaaagacagctgcggacaacaacaacagtgattactcgtggactggagctaccaagtatcacctcaatggaagagactctctggtgaatccgggcacagccatggccagccacaaggacgatgaagaaaagtattttcctcagagcggggttctcatcttcggaaaacaagactcgggaaaaactaatgtggacattgaaaaggtcatgattacagacgaagaggaaatcaggaccaccaatcccgtggctacggagcagtatggttctgtatctaccaatctccagagcggcaacacacaagcagctacctcagatgtcaacacacaaggcgttcttccaggcatggtctggcaggacagagacgtgtacctgcagggacccatctgggcaaagattccacacacggacggacattttcacccttctcctcttatgggaggatttggaccgaagcaccctcccccgcagattctcatcaagaataccccggtacctgcgaatccttctaccaccttcagcgcggcaaagtttgcttccttcatcacacagtactccacggggcaggtcagcgtggagatcgagtgggagctgcagaaagagaacagcaaacgctggaaccccgagatccagtatacctccaactacaacaagtctgttaatgtggactttactgtggacactaatggcgtgtattcagagcctcgccccattggcacaagatacctgactcgtaatctgtaa

SEQ ID NO: 3418 - DNA, 2208 bp, Artificial Sequence
  Description of Artificial Sequence: Synthetic polynucleotide
atggctgccgatggttatcttccagattggctcgaggacactctctctgaaggaataagacagtggtggaagctcaaacctggcccaccaccgccaaagcccgcagagcggcataaggacgacagcaggggtcttgtgcttcctgggtacaagtacctcggacccttcaacggactcgacaaaggagagccggtcaacgaggcagacgccgcggccctcgagcacgacaaggcctacgaccggcagctcgacagcggagacaacccgtacctcaagtacaaccacgccgacgcggagtttcaggagcgccttaaagaagatacgccttttgggggcaacctcgcaagagcagtattccaggcgaaaaagagggttcttgaacctctgggcctggttgaggagcctgttaagacggctccgggaaaaaagaggccggtagagcactctcctgcggagctagattcctcctccggaactggaaagtcgggccaacagcctgcaagaaagagattgaattttggtcagactggagacgcagactccgtacctgacccccagcctctcggacagccaccagcagccccctctggtctgggaactaatacgatggtttcaggcagtggcgcaccaatggcagacaataacgagggcgccgacggagtgggtaattcctcgggaaattggcattgcgattccacatggatgggcgacagagtcatcaccaccagcacccgcacctgggctctgcccacctacaacaaccatctgtacaagcaaatttccagccagtctggggccagcaacgacaaccactactttggctacagcaccccttgggggtattttgacttcaacagattccactgccacttctccccacgtgactggcaaagactcatcaacaacaattggggattccggcccaaaagactcaacttcaagctctttaacattcaagtcaaggaggtcacgcagaatgacggtacgacgacgattgccaataaccttaccagcacggttcaggtgtttactgactcggagtaccagctcccgtacgtcctcggctcggcgcatcaaggatgcctcccgccgttcccagcagacgtcttcatggtgccacagtatggatacctcaccctgaacaacgggagtcaggcggtaggacgctcttcattttactgcctggagtactttccttctcagatgctgcgtaccggaaacaactttaccttcagctacacctttgaggacgttccttttcacagcagctacgctcacagccagagtttggaccgtctcatgaatcctctcatcgaccagtacctgtattacttgagcagaacaaacactccaagcggaaccactacgcagtccaggcttcagttttctcaagccggagcgagtgacattcgggaccagtctaggaactggcttcctggaccctgttaccgccagcagcgagtatcaaagacagctgcggacaacaacaacagtgattactcgtggactggagctaccaagtatcacctcaatggaagagactctctggtgaatccgggcacagccatggccagccacaaggacgatgaagaaaagtattttcctcagagcggggttctcatcttcggaaaacaagactcgggaaaaactaatgtggacattgaaaaggtcatgattacagacgaagaggaaatcaggaccaccaatcccgtggctacggagcagtatggttctgtatctaccaatctccagagcggcaacacacaagcagctacctcagatgtcaacacacaaggcgttcttccaggcatggtctggcaggacagagacgtgtacctgcagggacccatctgggcaaagattccacacacggacggacattttcacccttctcctcttatgggaggatttggaccgaagcaccctcccccgcagattctcatcaagaataccccggtacctgcgaatccttctaccaccttcagcgcggcaaagtttgcttccttcatcacacaatactccacggggcaggtcagcgtggagatcgagtgggagctgcagaaagagaacagcaaacgctggaaccccgagatccagtatacctccaactacaacaagtctgttaatgtggactttactgtggacactaatggcgtgtattcagagcctcgccccattggcacaagatacctgactcgtaatctgtaa

SEQ ID NO: 3419 - DNA, 2208 bp, Artificial Sequence
  Description of Artificial Sequence: Synthetic polynucleotide
atggctgccgatggttatcttccagattggctcgaggacactctctctgaaggaataagacagtggtgggagctcaaacctggcccaccaccgccaaagcccgcagagcggcataaggacgacagcaggggtcttgtgcttcctgggtacaagtacctcggacccttcaacggactcgacaaaggagagccggtcaacgaggcagacgccgcggccctcgagcacgacaaggcctacgaccggcagctcgacagcggagacaacccgtacctcaagtacaaccacgccgacgcggagtttcaggagcgccttaaagaagatacgtcttttgggggcaacctcgcaagagcagtattccaggcgaaaaagagggttcttgaacctctgggcctggttgaggagcctgttaagacggctccgggaaaaaagaggccggtagagcactctcctgcggagctagattcctcctccggaactggaaagtcgggccaacagcctgcaagaaagagattgaattttggtcagactggagacgcagactccgtacctgacccccagcctctcgggcagccaccagcagccccctctggtctgggaactaatacgatggcttcaggcagtggcgcaccaatggcagacaataacgagggcgccgacggagtgggtaattcctcgggaaattggcattgcgattccacatggatgggcgacagagtcatcaccaccagcacccgcacctgggctctgcccacctacaacaaccatctgtacaagcaaatttccagccagtctggggccagcaacgacaaccactactttggctacagcaccccttgggggtattttgacttcaacagattccactgccacttctccccacgtgactggcaaagactcatcaacaacaattggggattccggcccaaaagactcaacttcaagctctttaacattcaagtcaaggaggtcacgcagaatgacggtacgacgacgattgccaataaccttaccagcacggttcaggtgtttactgactcggagtaccagctcccgtacgtcctcggctcggcgcatcaaggatgcctcccgccgttcccagcagacgtcttcatggtgccacagtatggatacctcaccctgaacaacgggagtcaggcggtaggacgctcttcattttactgcctggagtactttccttctcagatgctgcgtaccggaaacaactttaccttcagctacacctttgaggacgttccttttcacagcagctacgctcacagccagagtttggaccgtctcatgaatcctctcatcgaccagtacctgtattacttgagcagaacaaacactccaagcggaaccactacgcagtccaggcttcagttttctcaagccggagcgagtgacattcgggaccagtctaggaactggcttcctggaccctgttaccgccagcagcgagtatcaaagacagctgcggacaacaacaacagtgattactcgtggactggagctaccaagtatcacctcaatggaagagactctctggtgaatccgggcacagccatggccagccacaaggacgatgaagaaaagtattttcctcagagcggggttctcatcttcggaaaacaagactcgggaaaaactaatgtggacattgaaaaggtcatgattacagacgaagaggaaatcaggaccaccaatcccgtggctacggagcagtatggttctgtatctaccaatctccagagcggcaacacacaagcagctacctcagatgtcaacacacaaggcgttcttccaggcatggtctggcaggacagagacgtgtacctgcagggacccatctgggcaaagattccacacacggacggacattttcacccttctcctcttatgggaggatttggaccgaagcaccctcccccgcagattctcatcaagaataccccggtacctgcgaatccttctaccaccttcagcgcggcaaagtttgcttccttcatcacacagtactccacggggcaggtcagcgtggagatcgagtgggagctgcagaaagagaacagcaaacgctggaaccccgagatccagtatacctccaactacaacaagtctgttaatgtggactttactgtggacactaatggcgtgtattcagagcctcgccccattggcacaagatacctgactcgtaatctgtaa

SEQ ID NO: 3420 - DNA, 2208 bp, Artificial Sequence
  Description of Artificial Sequence: Synthetic polynucleotide
atggctgccgatggttatcttccagattggctcgaggacactctctctgaaggaataagacagtggtggaagctcaaacctggcccaccaccgccaaagcccgcagagcggcataaggacgacagcaggggtcttgtgcttcctgggtacaagtacctcggacccttcaacggactcgacaaaggagagccggtcaacgaggcagacgccgcggccctcgagcacgacaaggcctacgaccggcagctcgacagcggagacaacccgtacctcaagtacaaccacgccgacgcggagtttcaggagcgccttaaagaagatacgccttttgggggcaacctcgcaagagcagtattccaggcgaaaaagagggttcttgaacctctgggcctggttgaggagcctgttaagacggctccgggaaaaaagaggccggtagggcactctcctgcggagctagattcctcctccggaactggaaagtcgggccaacagcctgcaagaaagagattgaattttggtcagactggagacgcagactccgtacctgacccccagcctctcggacagccaccagcagccccctctggtctgggaactaatacgatggcttcaggcagtggcgcaccaatggcagacaataacgagggcgtcgacggagtgggtaattcctcgggaaattggcattgcgattccacatggatgggcgacagagtcatcaccaccagcacccgcacctgggctctgcccacctacaacaaccatctgtacaagcaaatttccagccagtctggggccagcaacgacaaccactactttggctacagcaccccttgggggtattttgacttcaacagattccactgccacttctccccacgtgactggcaaagactcatcaacaacaattggggattccggcccaaaagactcaacttcaagctctttaacattcaagtcaaggaggtcacgcagaatgacggtacgacgacgattgccaataaccttaccagcacggttcaggtgtttactgactcggagtaccagctcccgtacgtcctcggctcggcgcatcaaggatgcctcccgccgttcccagcagacgtcttcatggtgccacagtatggatacctcaccctgaacaacgggagtcaggcggtaggacgctcttcattttactgcctggagtactttccttctcagatgctgcgtaccggaaacaactttaccttcagctacacctttgaggacgttccttttcacagcagctacgctcacagccagagtttggaccgtctcatgaatcctctcatcgaccagtacctgtattacttgagcagaacaaacactccaagcggaaccactacgcagtccaggcttcagttttctcaagccggagcgagtgacattcgggaccagtctaggaactggcttcctggaccctgttaccgccagcagcgagtatcaaagacagctgcggacaacaacaacagtgattactcgtggactggagctaccaagtatcacctcaatggaagagactctctggtgaatccgggcacagccatggccagccacaaggacgatgaagaaaagtattttcctcagagcggggttctcatcttcggaaaacaagactcgggaaaaactaatgtggacattgaaaaggtcatgattacagacgaagaggaaatcaggaccaccaatcccgtggctacggagcagtatggttctgtatctaccaatctccagagcggcaacacacaagcagctacctcagatgtcaacacacaaggcgttcttccaggcatggtctggcaggacagagacgtgtacctgcagggacccatctgggcaaagattccacacacggacggacattttcacccttctcctcttatgggaggatttggaccgaagcaccctcccccgcagattctcatcaagaataccccggtacctgcgaatccttctaccaccttcagcgcggcaaagtttgcttccttcatcacacagtactccacggggcaggtcagcgtggagatcgagtgggagctgcagaaagagaacagcaaacgctggaaccccgagatccagtatacctccaactacaacaagtctgttaatgtggactttactgtggacactaatggcgtgtattcagagcctcgccccattggcacaagatacctgactcgtaatctgtaa

SEQ ID NO: 3421 - DNA, 2208 bp, Artificial Sequence
  Description of Artificial Sequence: Synthetic polynucleotide
atggctgccgatggttatcttccagattggctcgaggacactctctctgaaggaataagacagtggtgggagctcaaacctggcccaccaccgccaaagcccgcagagcggcataaggacgacagcaggggtcttgtgcttcctgggtacaagtacctcggacccttcaacggactcgacaaaggagagccggtcaacgaggcagacgccgcggccctcgagcacgacaaggcctacgaccggcagctcgacagcggagacaacccgtacctcaagtacaaccacgccgacgcggagtttcaggagcgccttaaagaagatacgtcttttgggggcaacctcgcaagagcagtattccaggcgaaaaagagggttcttgaacctctgggcctggttgaggagcctgttaagacggctccgggaaaaaagaggccggtagagcactctcctgcggagctagattcctcctccggaactggaaagtcgggccaacagcctgcaagaaagagattgaattttggtcagactggagacgcagactccgtacctgacccccagcctctcgggcagccaccagcagccccctctggtctgggaactaatacgatggcttcaggcagtggcgcaccaatggcagacaataacgagggcgccgacggagtgggtaattcctcgggaaattggcattgcgattccacatggatgggcgacagagtcatcaccaccagcacccgcacctgggctctgcccacctacaacaaccatctgtacaagcaaatttccagccagtctggggccagcaacgacaaccactactttggctacagcaccccttgggggtattttgacttcaacagattccactgccacttctccccacgtgactggcaaagactcatcaacaacaattggggattccggcccaaaagactcaacttcaagctctttaacattcaagtcaaggaggtcacgcagaatgacggtacgacgacgattgccaataaccttaccagcacggttcaggtgtttactgactcggagtaccagctcccgtacgtcctcggctcggcgcatcaaggatgcctcccgccgttcccagcagacgtcttcatggtgccacagtatggatacctcaccctgaacaacgggagtcaggcggtaggacgctcttcattttactgcctggagtactttccttctcagatgctgcgtaccggaaacaactttaccttcagctacacctttgaggacgttccttttcacagcagctacgctcacagccagagtttggaccgtctcatgaatcctctcatcgaccagtacctgtattactttagcagaacaaacactccaagcggaaccactacgcagtccaggcttcagttttctcaagccggagcgagtgacattcgggaccagtctaggaactggcttcctggaccctgttaccgccagcagcgagtatcaaagacagctgcggacaacaacaacagtgattactcgtggactggagctaccaagtatcacctcaatggaagagactctctggtgaatccgggcacagccatggccagccacaaggacgatgaagaaaagtattttcctcagagcggggttctcatcttcggaaaacaagactcgggaaaaactaatgtggacattgaaaaggtcatgattacagacgaagaggaaatcaggaccaccaatcccgtggctacggagcagtatggttctgtatctaccaatctccagagcggcaacacacaagcagctacctcagatgtcaacacacaaggcgttcttccaggcatggtctggcaggacagagacgtgtacctgcagggacccatctgggcaaagattccacacacggacggacattttcacccttctcctcttatgggaggatttggaccgaagcaccctcccccgcagattctcatcaagaataccccggtacctgcgaatccttctaccaccttcagcgcggcaaagtttgcttccttcatcacacagtactccacggggcaggtcagcgtggagatcgagtgggagctgcagaaagagaacagcaaacgctggaaccccgagatccagtatacctccaactacaacaagtctgttaatgtggactttactgtggacactaatggcgtgtattcagagcctcgccccattggcacaagatacctgactcgtaatctgtaa

SEQ ID NO: 3422 - DNA, 2208 bp, Artificial Sequence
  Description of Artificial Sequence: Synthetic polynucleotide
atggctgccgatggttatcttccagattggctcgaggacactctctctgaaggaataagacagtggtggaagctcaaacctggcccaccaccgccaaagcccgcagagcggcataaggacgacagcaggggtcttgtgcttcctgggtacaagtacctcggacccttcaacggactcgacaaaggagagccggtcaacgaggcagacgccgcggccctcgagcacgacaaggcctacgaccggcagctcgacagcggagacaacccgtacctcaagtacaaccacgccgacgcggagtttcaggagcgccttaaagaagatacgtcttttgggggcaacctcgcaagagcagtattccaggcgaaaaagagggttcttgaacctctgggcctggttgaggagcctgttaagacggctccgggaaaaaagaggccggtagagcactctcctgcggagctagattcctcctccggaactggaaagtcgggccaacagcctgcaagaaagagattgaattttggtcagactggagacgcagactccgtacctgacccccagcctctcggacagccaccagcagccccctctggtctgggaactaatacgatggcttcaggcagtggcgcaccaatggcagacaataacgagggcgccgacggagtgggtaattcctcgggaaattggcattgcgattccacatggatgggcgacagagtcatcaccaccagcacccgcacctgggctctgcccacctacaacaaccatctgtacaagcaaatttccagccagtctggggccagcaacgacaaccactactttggctacagcaccccttgggggtattttgacttcaacagattccactgccacttctccccacgtgactggcaaagactcatcaacaacaattggggattccggcccaaaagactcaacttcaagctctttaacattcaagtcaaggaggtcacgcagaatgacggtacgacgacgattgccaataaccttaccagcacggttcaggtgtttactgactcggagtaccagctcccgtacgtcctcggctcggcgcatcaaggatgcctcccgccgttcccagcagacgtcttcatggtgccacagtatggatacctcaccctgaacaacgggagtcaggcggtaggacgctcttcattttaccgcctggagtactttccttctcagatgctgcgtaccggaaacaactttaccttcagctacacctttgaggacgttccttttcacagcagctacgctcacagccagagtttggaccgtctcatgaatcctctcatcgaccagtacctgtattacttgagcagaacaaacactccaagcggaaccactacgcagtccaggcttcagttttctcaagccggagcgagtgacattcgggaccagtctaggaactggcttcctggaccctgttaccgccagcagcgagtatcaaagacagctgcggacaacaacaacagtgattactcgtggactggagctaccaagtatcacctcaatggaagagactctctggtgaatccgggcacagccatggccagccacaaggacgatgaagaaaagtattttcctcagagcggggttctcatcttcggaaaacaagactcgggaaaaactaatgtggacattgaaaaggtcatgattacagacgaagaggaaatcaggaccaccaatcccgtggctacggagcagtatggttctgtatctaccaatctccagagcggcaacacacaagcagctacctcagatgtcaacacacaaggcgttcttccaggcatggtctggcaggacagagacgtgtacctgcagggacccatctgggcaaagattccacacacggacggacattttcacccttctcctcttatgggaggatttggaccgaagcaccctcccccgcagattctcatcaagaataccccggtacctgcgaatccttctaccaccttcagcgcggcaaagtttgcttccttcatcacacagtactccacggggcaggtcagcgtggagatcgagtgggagctgcagaaagagaacagcaaacgctggaaccccgagatccagtatacctccaactacaacaagtctgttaatgtggactttactgtggacactaatggcgtgtattcagagcctcgccccattggcacaagatacctgactcgtaatctgtaa

SEQ ID NO: 3423 - DNA, 2208 bp, Artificial Sequence
  Description of Artificial Sequence: Synthetic polynucleotide
atggctgccgatggttatcttccagattggctcgaggacactctctctgaaggaataagacagtggtggaagctcaaacctggcccaccaccgccaaagcccgcagagcggcataaggacgacagcaggggtcttgtgcttcctgggtacaagtacctcggacccttcaacggactcgacaaaggagagccggtcaacgaggcagacgccgcggccctcgagcacgacaaggcctacgaccggcagctcgacagcggagacaacccgtacctcaagtacaaccacgccgacgcggagtttcaggagcgccttaaagaagatacgtcttttgggggcaacctcgcaagagcagtattccaggcgaaaaagagggttcttgaacctctgggcctggttgaggagcctgttaagacggctccgggaaaaaagaggccggtagagcactctcctgcggagctagattcctcctccggaactggaaagtcgggccaacagcctgcaagaaagagattgaattttggtcagactggagacgcagactccgtacctgacccccagcctctcggacagccaccagcagccccctctggtctgggaactaatacgatggcttcaggcagtggcgcaccaatggcagacaataacgagggcgccgacggagtgggtaattcctcgggaaattggcattgcgattccacatggatgggcgacagagtcatcaccaccagcacccgcacctgggctctgcccacctacaacaaccatctgtacaagcaaatttccagccagtctggggccagcaacgacaaccactaccttggctacagcaccccttgggggtattttgacttcaacagattccactgccacttctccccacgtgactggcaaagactcatcaacaacaattggggattccggcccaaaagactcaacttcaagctctttaacattcaagtcaaggaggtcacgcagaatgacggtacgacgacgattgccaataaccttaccagcacggttcaggtgtttactgactcggagtaccagctcccgtacgtcctcggctcggcgcatcaaggatgcctcccgccgttcccagcagacgtcttcatggtgccacagtatggatacctcaccctgaacaacgggagtcaggcggtaggacgctcttcattttactgcctggagtactttccttctcagatgctgcgtaccggaaacaactttaccttcagctacacctttgaggacgttccttttcacagcagctacgctcacagccagagtttggaccgtctcatgaatcctctcatcgaccagtacctgtattacttgagcagaacaaacactccaagcggaaccactacgcagtccaggcttcagttttctcaagccggagcgagtgacattcgggaccagtctaggaactggcttcctggaccctgttaccgccagcagcgagtatcaaagacagctgcggacaacaacaacagtgattactcgtggactggagctaccaagtatcacctcaatggaagagactctctggtgaatccgggcacagccatggccagccacaaggacgatgaagaaaagtattttcctcagagcggggttctcatcttcggaaaacaagactcgggaaaaactaatgtggacattgaaaaggtcatgattacagacgaagaggaaatcaggaccaccaatcccgtggctacggagcagtatggttctgtatctaccaatctccagagcggcaacacacaagcagctacctcagatgtcaacacacaaggcgttcttccaggcatggtctggcaggacggagacgtgtacctgcagggacccatctgggcaaagattccacacacggacggacattttcacccttctcctcttatgggaggatttggaccgaagcaccctcccccgcagattctcatcaagaataccccggtacctgcgaatccttctaccaccttcagcgcggcaaagtttgcttccttcatcacacagtactccacggggcaggtcagcgtggagatcgagtgggagctgcagaaagagaacagcaaacgctggaaccccgagatccagtatacctccaactacaacaagtctgttaatgtggactttactgtggacactaatggcgtgtattcagagcctcgccccattggcacaagatacctgactcgtaatctgtaa

SEQ ID NO: 3424 - DNA, 2208 bp, Artificial Sequence
  Description of Artificial Sequence: Synthetic polynucleotide
atggctgccgatggttatcttccagattggctcgaggacactctctctgaaggaataagacagtggtggaagctcaaacctggcccaccaccgccaaagcccgcagagcggcataaggacgacagcaggggtcttgtgcttcctgggtacaagtacctcggacccttcaacggactcgacaaaggagagccggtcaacgaggcagacgccgcggccctcgagcacgacaaggcctacgaccggcagctcgacagcggagacaacccgtacctcaagtacaaccacgccgacgcggagtttcaggagcgccttaaagaagatacgtcttttgggggcaacctcgcaagagcagtattccaggcgaaaaagagggttcttgaacctctgggcctggttgaggagcctgttaagacggctccgggaaaaaagaggccggtagagcactctcctgcggagctagattcctcctccggaactggaaagtcgggccaacagcctgcaagaaagagattgaattttggtcagactggagacgcagactccgtacctgacccccagcctctcggacagccaccagcagccccctctggtctgggaactaatacgatggcttcaggcagtggcgcaccaatggcagacaataacgagggcgccgacggagtgggtaattcctcgggaaattggcattgcgattccacatggatgggcgacagagtcatcaccaccagcacccgcacctgggctctgcccacctacaacaaccatctgtacaagcaaatttccagccagtctggggccagcaacgacaaccactactttggctacagcaccccttgggggtattttgacttcaacagattccactgccacttctccccacgtgactggcaaagactcatcaacaacaattggggattccggcccaaaagactcaacttcaagctctttaacattcaagtcaaggaggtcacgcagaatgacggtacgacgacgattgccaataaccttaccagcacggttcaggtgtttactgactcggagtaccagctcccgtacgtcctcggctcggcgcatcaaggatgcctcccgccgttcccagcagacgtcttcatggtgccacagtatggatacctcaccctgaacaacgggagtcaggcggtaggacgctcttcattttactgcctggagtactttcctcctcagatgctgcgtaccggaaacaactttaccttcagctacacctttgaggacgttccttttcacagcagctacgctcacagccagagtttggaccgtctcatgaatcctctcatcgaccagtacctgtattacttgagcagaacaaacactccaagcggaaccactacgcagtccaggcttcagttttctcaagccggagcgagtgacattcgggaccagtctaggaactggcttcctggaccctgttaccgccagcagcgagtatcaaagacagctgcggacaacaacaacagtgattactcgtggactggagctaccaagtatcacctcaatggaagagactctctggtgaatccgggcacagccatggccagccacaaggacgatgaagaaaagtattttcctcagagcggggttctcatcttcggaaaacaagactcgggaaaaactaatgtggacattgaaaaggtcatgattacagacgaagaggaaatcaggaccaccaatcccgtggctacggagcagtatggttctgtatctaccaatctccagagcggcaacacacaagcagctacctcagatgtcaacacacaaggcgttcttccaggcatggtctggcaggacagagacgtgtacctgcagggacccatctgggcaaagattccacacacggacggacattttcacccttctcctcttatgggaggatttggaccgaagcaccctcccccgcagattctcatcaagaataccccggtacctgcgaatccttctaccaccttcagcgcggcaaagtttgcttccttcatcacacagtactccacggggcaggtcagcgtggagatcgagtgggagctgcagaaagagaacagcaaacgctggaaccccgagatccagtatacctccaactacaacaagtctgttaatgtggactttactgtggacactaatggcgtgtattcagagcctcgccccattggcacaagatacctgactcgtaatctgtaa

SEQ ID NO: 3425 - DNA, 2208 bp, Artificial Sequence
  Description of Artificial Sequence: Synthetic polynucleotide
atggctgccgatggttatcttccagattggctcgaggacactctctctgaaggaataagacagtggtggaagctcaaacctggcccaccaccgccaaagcccgcagagcggcataaggacgacagcaggggtcttgtgcttcctgggtacaagtacctcggacccttcaacggactcgacaaaggagagccggtcaacgaggcagacgccgcggccctcgagcacgacaaggcctacgaccggcagctcgacagcggagacaacccgtacctcaagtacaaccacgccgacgcggagtttcaggagcgccttaaagaagatacgtcttttgggggcaacctcgcaagagcagtattccaggcgaaaaagagggttcttgaacctctgggcctggttgaggagcctgttaagacggctccgggaaaaaagaggccggtagagcactctcctgcggagctagattcctcctccggaactggaaagtcgggccaacagcctgcaagaaagagattgaattttggtcagactggagacgcagactccgtacctgacccccagcctctcggacagccaccagcagccccctctggtctgggaactaatacgatggcttcaggcagtggcgcaccaatggcagacaataacgagggcgccgacggggtgggtaattcctcgggaaattggcattgcgattccacatggatgggcgacagagtcatcaccaccagcacccgcgcctgggctctgcccacctacaacaaccatctgtacaagcaaatttccagccagtctggggccagcaacgacaaccactaccttggctacagcaccccttgggggtattttgacttcaacagattccactgccacttctccccacgtgactggcaaagactcatcaacaacaattggggattccggcccaaaagactcaacttcaagctctttaacattcaagtcaaggaggtcacgcagaatgacggtacgacgacgattgccaataaccttaccagcacggttcaggtgtttactgactcggagtaccagctcccgtacgtcctcggctcggcgcatcaaggatgccccccgccgttcccagcagacgtcttcatggtgccacagtatggatacctcaccctgaacaacgggagtcaggcggtaggacgctcttcattttactgcctggagtactttccttctcagatgctgcgtaccggaaacaactttaccttcagctacacctttgaggacgttccttttcacagcagctacgctcacagccagagtttggaccgtctcatgaatcctctcatcgaccagtacctgtattacttgagcagaacaaacactccaagcggaaccactacgcagtccaggcttcagttttctcaagccggagcgagtgacattcgggaccagtctaggaactggcttcctggaccctgttaccgccagcagcgagtatcaaagacagctgcggacaacaacaacagtgattactcgtggactggagctaccaagtatcacctcaatggaagagactctctggtgaatccgggcacagccatggccagccacaaggacgatgaagaaaagtattttcctcagagcggggttctcatcttcggaaaacaagactcgggaaaaactaatgtggacattgaaaaggtcatgattacagacgaagaggaaatcaggaccaccaatcccgtggctacggagcagtatggttctgtatctaccaatctccagagcggcaacacacaagcagctacctcagatgtcaacacacaaggcgttcttccaggcatggtctggcaggacagagacgtgtacctgcagggacccatctgggcaaagattccacacacggacggacattttcacccttctcctcttatgggaggatttggaccgaagcaccctcccccgcagattctcatcaagaataccccggtacctgcgaatccttctaccaccttcagcgcggcaaagtttgcttccttcatcacacagtactccacggggcaggtcagcgtggagatcgagtgggagctgcagaaagagaacagcaaacgctggaaccccgagatccagtatacctccaactacaacaagtctgttaatgtggactttactgtggacactaatggcgtgtattcagagcctcgccccattggcacaagatacctgactcgtaatctgtaa

SEQ ID NO: 3426 - DNA, 2208 bp, Artificial Sequence
  Description of Artificial Sequence: Synthetic polynucleotide
atggctgccgatggttatcttccagattggctcgaggacactctctctgaaggaataagacagtggtggaagctcaaacctggcccaccaccgccaaagcccgcagagcggcataaggacgacagcaggggtcttgtgcttcctgggtacaagtacctcggacccttcaacggactcgacaaaggagagccggtcaacgaggcagacgccgcggccctcgagcacgacaaggcctacgaccggcagctcgacagcggagacaacccgtacctcaagtacaaccacgccgacgcggagtttcaggagcgccttaaagaagatacgtcttttgggggcaacctcgcaagagcagtattccaggcgaaaaagagggttcttgaacctctgggcctggttgaggagcctgttaagacggctccgggaaaaaagaggccggtagagcactctcctgcggagctagattcctcctccggaactggaaagtcgggccaacagcctgcaagaaagagattgaattttggtcagactggagacgcagactccgtacctgacccccagcctctcggacagccaccagcagccccctctggtctgggaactaatacgatggcttcaggcagtggcgcaccaatggcagacaataacgagggcgccgacggagtgggtaattcctcgggaaattggcattgcgattccacatggatgggcgacagagtcatcaccaccagcacccgcacctgggctctgcccacctacaacaaccatctgtacaagcaaatttccagccagtctggggccagcaacgacaaccactactttggctacagcaccccttgggggtattttgacttcaacagattccactgccacttctccccacgtgactggcaaagactcatcaacaacaattggggattccggcccaaaagactcaacttcaagctctttaacattcaagtcaaggaggtcacgcagaatgacggtacgacgacgattgccaataaccttaccagcacggttcaggtgtttactgactcggagtaccagctcccgtacgtcctcggctcggcgcatcaaggatgcctcccgccgttcccagcagacgtcttcatggtgccacagtatggatacctcaccctgaacaacgggagtcaggcggtaggacgctcttcattttactgcctggagtactttccttctcagatgctgcgtaccggaaacaactttaccttcagctacacctttgaggacgttccttttcacagcagctacgctcacagccagagtttggaccgtctcatgaatcctctcatcgaccagtacctgtattacttgagcagaacaaacactccaagcggaaccactacgcagtccaggcttcagttttctcaagccggagcgagtgacattcgggaccagtctaggaactggcttcctggaccctgttaccgccagcagcgagtatcaaagacagctgcggacaacaacaacagtgattactcgtggactggagctaccaagtatcacctcaatggaagagactctctggtgaatccgggcacagccatggccagccacaaggacgatgaagaaaagtattttcctcagagcggggttctcatcttcggaaaacaagactcgggaaaaactaatgtggacattgaaaaggtcatgattacagacgaagaggaaatcaggaccaccaatcccgtggctacggagcagtatggttctgtatctaccaatctccagagcggcaacacacaagcagctacctcagatgtcaacacacaaggcgttcttccaggcatggtctggcaggacagagacgtgtacctgcagggacccatctgggcaaagattccacacacggacggacattttcacccttctcctcttatgggaggatttggaccgaagcaccctcccccgcagattctcatcaagaataccccggtacctgcgaatccttctaccaccttcagcgcggcaaagtttgctttcttcatcacacagtactccacggggcaggtcagcgtggagatcgagtgggagctgcagaaagagaacagcaaacgctggaaccccgagatccagtatacctccaactacaacaagtctgttaatgtggactttactgtggacactaatggcgtgtattcagagcctcgccccattggcacaagatacctgactcgtaatctgtaa

SEQ ID NO: 3427 - DNA, 2208 bp, Artificial Sequence
  Description of Artificial Sequence: Synthetic polynucleotide
atggctgccgatggttatcttccagattggctcgaggacactctctctgaaggaataagacagtggtggaagctcaaacctggcccaccaccgccaaagcccgcagagcggcataaggacgacagcaggggtcttgtgcttcctgggtacaagtacctcggacccttcaacggactcgacaaaggagagccggtcaacgaggcagacgccgcggccctcgagcacgacaaggcctacgaccggcagctcgacagcggagacaacccgtacctcaagtacaaccacgccgacgcggagtttcaggagcgccttaaagaagatacgtcttttgggggcaacctcgcaagagcagtattccaggcgaaaaagagggttcttgaacctctgggcctggttgaggagcctgttaagacggctccgggaaaaaagaggccggtagagcactctcctgcggagctagattcctcctccggaactggaaagtcgggccaacagcctgcaagaaagagattgaattttggtcagactggagacgcagactccgtacctgacccccagcctctcggacagccaccagcagccccctctggtctgggaactaatacgatggcttcaggcagtggcgcaccaatggcagacaataacgagggcgccgacggagtgggtaattcctcgggaaattggcattgcgattccacatggatgggcgacagagtcatcaccaccagcacccgcacctgggctctgcccacctacaacaaccatctgtacaagcaaatttccagccagtctggggccagcaacgacaaccactaccttggctacagcaccccttgggggtattttgacttcaacagattccactgccacttctccccacgtgactggcaaagactcatcaacaacaattggggattccggcccaaaagactcaacttcaagctctttaacattcaagtcaaggaggtcacgcagaatgacggtacgacgacgattgccaataaccttaccagcacggttcaggtgtttactgactcggagtaccagctcccgtacgtcctcggctcggcgcatcaaggatgcctcccgccgttcccagcagacgtcttcatggtgccacagtatggatacctcaccctgaacaacgggagtcaggcggtaggacgctcttcattttaccgcctggagtactttccttctcagatgctgcgtaccggaaacaactttaccttcagctacacctttgaggacgttccttttcacagcagctacgctcacagccagagtttggaccgtctcatgaatcctctcatcgaccagtacctgtattacttgagcagaacaaacactccaagcggaaccactacgcagtccaggcttcagttttctcaagccggagcgagtgacattcgggaccagtctaggaactggcttcctggaccctgttaccgccagcagcgagtatcaaagacagctgcggacaacaacaacagtgattactcgtggactggagctaccaagtatcacctcaatggaagagactctctggtgaatccgggcacagccatggccagccacaaggacgatgaagaaaagtattttcctcagagcggggttctcatcttcggaaaacaagactcgggaaaaactaatgtggacattgaaaaggtcatgattacagacgaagaggaaatcaggaccaccaatcccgtggctacggagcagtatggttctgtatctaccaatctccagagcggcaacacacaagcagctacctcagatgtcaacacacaaggcgttcttccaggcatggtctggcaggacagagacgtgtacctgcagggacccatctgggcaaagattccacacacggacggacattttcacccttctcctcttatgggaggatttggaccgaagcaccctcccccgcagattctcatcaagaataccccggtacctgcgaatccttctaccaccttcagcgcggcaaagtttgcttccttcatcacacagtactccacggggcaggtcagcgtggagatcgagtgggagctgcagaaagagaacagcaaacgctggaaccccgagatccagtatacctccaactacaacaagtctgttaatgtggactttactgtggacactaatggcgtgtattcagagcctcgccccattggcacaagatacctgactcgtaatctgtaa

SEQ ID NO: 3428 - DNA, 2205 bp, Artificial Sequence
  Description of Artificial Sequence: Synthetic polynucleotide
atggctgccgatggttatcttccagattggctcgaggacactctctctgaaggaataagacagtggtggaagctcaaacctggcccaccaccgccaaagcccgcagagcggcataaggacgacagcaggggtcttgtgcttcctgggtacaagtacctcggacccttcaacggactcgacaaaggagagccggtcaacgaggcagacgccgcggccctcgagcacgacaaggcctacgaccggcagctcgacagcggagacaacccgtacctcaagtacaaccacgccgacgcggagtttcaggagcgccttaaagaagatacgtcttttgggggcaacctcgcaagagcagtattccaggcgaaaaagagggttcttgaacctctgggcctggttgaggagcctgttaagacggctccgggaaaaaagaggccggtagagcactctcctgcggagctagattcctcctccggaactggaaagtcgggccaacagcctgcaagaaagagattgaattttggtcagactggagacgcagactccgtacctgacccccagcctctcggacagccaccagcagccccctctggtctgggaactaatacgatggcttcaggcagtggcgcaccaatggcagacaataacgagggcgccgacggggtgggtaattcctcgggaaattggcattgcgattccacatggatgggcgacagagtcatcaccaccagcacccgcacctgggctctgcccacctacaacaaccatctgtacaagcaaatttccagccagtctggggccagcaacgacaaccactaccttggctacagcaccccttgggggtattttgacttcaacagattccactgccacttctccccacgtgactggcaaagactcatcaacaacaattggggattccggcccaaaagactcaacttcaagctctttaacattcaagtcaaggaggtcacgcagaatgacggtacgacgacgattgccaataaccttaccagcacggttcaggtgtttactgactcggagtaccagctcccgtacgtcctcggctcggcgcatcaaggatgcctcccgccgttcccagcagacgtcttcatggtgccacagtatggatacctcaccctgaacaacgggagtcaggcggtaggacgctcttcattttactgcctggagtactttccttctcagatgctgcgtaccggaaacaactttaccttcagctacacctttgaggacgttccttttcacagcagctacgctcacagccagagtttggaccgtctcatgaatcctctcatcgaccagtacctgtattacttgagcagaacaaacactccaagcggaaccactacgcagtccaggcttcagttttctcaagccggagcgagtgacattcgggaccagtctaggaactggcttcctggaccctgttaccgccagcagcgagtatcaaagacagctgcggacaacaacagtgattactcgtggactggagctaccaagtatcacctcaatggaagagactctctggtgaatccgggcacagccatggccagccacaaggacgatgaagaaaagtattttcctcagagcggggttctcatcttcggaaaacaagactcgggaaaaactaatgtggacattgaaaaggtcatgattacagacgaagaggaaatcaggaccaccaatcccgtggctacggagcagtatggttctgtatctaccaatctccagagcggcaacacacaagcagctacctcagatgtcaacacacaaggcgttcttccaggcatggtctggcaggacagagacgtgtacctgcagggacccatctgggcaaagattccacacacggacggacattttcacccttctcctcttatgggaggatttggaccgaagcaccctcccccgcagattctcatcaagaataccccggtacctgcgaatccttctaccaccttcagcgcggcaaagtttgcttccttcatcacacagtactccacggggcaggtcagcgtggagatcgagtgggagctgcagaaagagaacagcaaacgctggaaccccgagatccagtatacctccaactacaacaagtctgttaatgtggactttactgtggacactaatggcgtgtattcagagcctcgccccattggcacaagatacctgactcgtaatctgtaa

SEQ ID NO: 3429 - DNA, 2205 bp, Artificial Sequence
  Description of Artificial Sequence: Synthetic polynucleotide
atggctgccgatggttatcttccagattggctcgaggacactctctctgaaggaataagacagtggtggaagctcaaacctggcccaccaccgccaaagcccgcagagcggcataaggacgacagcaggggtcttgtgcttcctgggtacaagtacctcggacccttcaacggactcgacaaaggagagccggtcaacgaggcagacgccgcggccctcgagcacgacaaggcctacgaccggcagctcgacagcggagacaacccgtacctcaagtacaaccacgccgacgcggagtttcaggagcgccttaaagaagatacgtctttgggcaacctcgcaagagcagtattccaggcgaaaaagagggttcttgaacctctgggcctggttgaggagcctgttaagacggctccgggaaaaaagaggccggtagagcactctcctgcggagctagattcctcctccggaactggaaagtcgggccaacagcctgcaagaaagagattgaattttggtcagactggagacgcagactccgtacctgacccccagcctctcggacagccaccagcagccccctctggtctgggaactaatacgatggcttcaggcagtggcgcaccaatggcagacaataacgagggcgccgacggagtgggtaattcctcgggaaattggcattgcgattccacatggatgggcgacagagtcatcaccaccagcacccgcacctgggctctgcccacctacaacaaccatctgtacaagcaaatttccagccagtctggggccagcaacgacaaccactactttggctacagcaccccttgggggtattttgacttcaacagattccactgccacttctccccacgtgactggcaaagactcatcaacaacaattggggattccggcccaaaagactcaacttcaagctctttaacattcaagtcaaggaggtcacgcagaatgacggtacgacgacgattgccaataaccttaccagcacggttcaggtgtttactgactcggagtaccagctcccgtacgtcctcggctcggcgcatcaaggatgcctcccgccgttcccagcagacgtcttcatggtgccacagtatggatacctcaccctgaacaacgggagtcaggcggtaggacgctcttcattttactgcctggagtactttccttctcagatgctgcgtaccggaaacaactttaccttcagctacacctttgaggacgttccttttcacagcagctacgctcacagccagagtttggaccgtctcatgaatcctctcatcgaccagtacctgtattacttgagcagaacaaacactccaagcggaaccactacgcagtccaggcttcagttttctcaagccggagcgagtgacattcgggaccagtctaggaactggcttcctggaccctgttaccgccagcagcgagtatcaaagacagctgcggacaacaacaacagtgattactcgtggactggagctaccaagtatcacctcaatggaagagactctctggtgaatccgggcacagccatggccagccacaaggacgatgaagaaaagtattttcctcagagcggggttctcatcttcggaaaacaagactcgggaaaaactaatgtggacattgaaaaggtcatgattacagacgaagaggaaatcaggaccaccaatcccgtggctacggagcagtatggttctgtatctaccaatctccagagcggcaacacacaagcagctacctcagatgtcaacacacaaggcgttcttccaggcatggtctggcaggacagagacgtgtacctgcagggacccatctgggcaaagattccacacacggacggacattttcacccttctcctcttatgggaggatttggaccgaagcaccctcccccgcagattctcatcaagaataccccggtacctgcgaatccttctaccaccttcagcgcggcaaagtttgcttccttcatcacacagtactccacggggcaggtcagcgtggagatcgagtgggagctgcagaaagagaacagcaaacgctggaaccccgagatccagtatacctccaactacaacaagtctgttaatgtggactttactgtggacactaatggcgtgtattcagagcctcgccccattggcacaagatacctgactcgtaatctgtaa

SEQ ID NO: 3430 - DNA, 2208 bp, Artificial Sequence
  Description of Artificial Sequence: Synthetic polynucleotide
atggctgccgatggttatcttccagattggctcgaggacactctctctgaaggaataagacagtggtggaagctcaaacctggcccaccaccgccaaagcccgcagagcggcataaggacgacagcaggggtcttgtgcttcctgggtacaagtacctcggacccttcaacggactcgacaaaggagagccggtcaacgaggcagacgccgcggccctcgagcacgacaaggcctacgaccggcagctcgacagcggagacaacccgtacctcaagtacaaccacgccgacgcggagtttcaggagcgccttaaagaagatacgtcttttgggggcaacctcgcaagagcagtattccaggcgaaaaagagggttcttgaacctctgggcctggttgaggagcctgttaagacggctccgggaaaaaagaggccggtagagcactctcctgcggagctagattcctcctccggaactggaaagtcgggccaacagcctgcaagaaagagattgaattttggtcagactggagacgcagactccgtacctgacccccagcctctcggacagccaccagcagccccctctggtctgggaactaatacgatggcttcaggcagtggcgcaccaatggcagacaataacgagggcgccgacggagtgggtaattcctcgggaaattggcattgcgattccacatggatgggcgacagagtcatcaccaccagcacccgcacctgggctctgcccacctacaacaaccatctgtacaagcaaatttccagccagtctggggccagcaacgacaaccactactttggctacagcaccccttgggggtattttgacttcaacagattccactgccacttctccccacgtgactggcaaagactcatcaacaacaattggggattccggcccaaaagactcaacttcaagctctttaacattcaagtcaaggaggtcacgcagaatgacggtacgacgacgattgccaataaccttaccagcacggttcaggtgtttactgactcggagtaccagctcccgtacgtcctcggctcggcgcatcaaggatgcctcccgccgttcccagcagacgtcttcatggtgccacagtatggatacctcaccctgaacaacgggagtcaggcggtaggacgctcttcattttactgcctggagtactttccttctcagatgctgcgtaccggaaacaactttaccttcagctacacctttgaggacgttccttttcacagcagctacgctcacagccagagtttggaccgtctcatgaatcctctcatcgaccagtacctgtattacttgagcagaacaaacactccaagcggaaccactacgcagtccaggcttcagttttctcaagccggagcgagtgacattcgggaccagtctaggaactggcttcctggaccctgttaccgccagcagcgagtatcaaagacagctgcggacaacaacaacagtgattactcgtggactggagctaccaagtatcacctcaatggaagagactctctggtgaatccgggcacagccatggccagccacaaggacgatgaagaaaagtattttcctcagagcggggttctcatcttcggaaaacaagactcgggaaaaactaatgtggacattgaaaaggtcatgattacagacgaagaggaaatcaggaccaccaatcccgtggctacggagcagtatggttctgtatctaccaatctccagagcggcaacacacaagcagctacctcagatgtcaacacacaaggcgttcttccaggcatggtctggcaggacagagacgtgtacctgcagggacccatctgggcaaagattccacacacggacggacattttcacccttctcctcttatgggaggatttggaccgaagcaccctcccccgcagattctcatcaagaataccccggtacctgcgaatccttctaccaccttcagcgcggcaaagtttgcttccttcatcacacagtactccacggggcaggtcggcgtggagatcgagtgggagctgcagaaagagaacagcaaacgctggaaccccgagatccagtatacctccaactacaacaagtctgttaatgtggactttactgtggacactaatggcgtgtattcagagcctcgccccattggcacaagatacctgactcgtaatctgtaa

SEQ ID NO: 3431 - DNA, 2208 bp, Artificial Sequence
  Description of Artificial Sequence: Synthetic polynucleotide
atggctgccgatggttatcttccagattggctcgaggacactctctctgaaggaataagacagtggtggaagctcaaacctggcccaccaccgccaaagcccgcagagcggcataaggacgacagcaggggtcttgtgcttcctgggtacaagtacctcggacccttcaacggactcgacaaaggagagccggtcaacgaggcagacgccgcggccctcgagcacgacaaggcctacgaccggcagctcgacagcggagacaacccgtacctcaagtacaaccacgccgacgcggagtttcaggagcgccttaaagaagatacgtcttttgggggcaacctcgcaagagcagtattccaggcgaaaaagagggttcttgaacctctgggcctggttgaggagcctgttaagacggctccgggaaaaaagaggccggtagagcactctcctgcggagctagattcctcctccggaactggaaagtcgggccaacagcctgcaagaaagagattgaattttggtcagactggagacgcagactccgtacctgacccccagcctctcggacagccaccagcagccccctctggtctgggaactaatacgatggcttcaggcagtggcgcaccaatggcagacaataacgagggcgccgacggagtgggtaattcctcgggaaattggcattgcgattccacatggatgggcgacagagtcatcaccaccagcacccgcacctgggctctgcccacctacaacaaccatctgtacaagcaaatttccagccagtctggggccagcaacgacaaccactactttggctacagcaccccttgggggtattttgacttcaacagattccactgccacttctccccacgtgactggcaaagactcatcaacaacaattggggattccggcccaaaagactcaacttcaagctctttaacattcaagtcaaggaggtcacgcagaatgacagtacgacgacgattgccaataaccttaccagcacggttcaggtgtttactgactcggagtaccagctcccgtacgtcctcggctcggcgcatcaaggatgcctcccgccgttcccagcagacgtcttcatggtgccacagtatggatacctcaccctgaacaacgggagtcaggcggtaggacgctcttcattttactgcctggagtactttccttctcagatgctgcgtaccggaaacaactttaccttcagctacacctttgaggacgttccttttcacagcagctacgctcacagccagagtttggaccgtctcatgaatcctctcatcgaccagtacctgtattacttgagcagaacaaacactccaagcggaaccactacgcagtccaggcttcagttttctcaagccggagcgagtgacattcgggaccagtctaggaactggcttcctggaccctgttaccgccagcagcgagtatcaaagacagctgcggacaacaacaacagtgattactcgtggactggagctaccaagtatcacctcaatggaagagactctctggtgaatccgggcacagccatggccagccacaaggacgatgaagaaaagtattttcctcagagcggggttctcatcttcggaaaacaagactcgggaaaaactaatgtggacattgaaaaggtcatgattacagacgaagaggaaatcaggaccaccaatcccgtggctacggagcagtatggttctgtatctaccaatctccagagcggcaacacacaagcagctacctcagatgtcaacacacaaggcgttcttccaggcatggtctggcaggacagagacgtgtacctgcagggacccatctgggcaaagattccacacacggacggacattttcacccttctcctcttatgggaggatttggaccgaagcaccctcccccgcagattctcatcaagaataccccggtacctgcgaatccttctaccaccttcagcgcggcaaagtttgcttccttcatcacacagtactccacggggcaggtcagcgtggagatcgagtgggagctgcagaaagagaacagcaaacgctggaaccccgagatccagtatacctccaactacaacaagtctgttaatgtggactttactgtggacactaatggcgtgtattcagagcctcgccccattggcacaagatacctgactcgtaatctgtaa

SEQ ID NO: 3432 - DNA, 2208 bp, Artificial Sequence
  Description of Artificial Sequence: Synthetic polynucleotide
atggctgccgatggttatcttccagattggctcgaggacactctctctgaaggaataagacagtggtggaagctcaaacctggcccaccaccgccaaagcccgcagagcggcataaggacgacagcaggggtcttgtgcttcctgggtacaagtacctcggacccttcaacggactcgacaaaggagagccggtcaacgaggcagacgccgcggccctcgagcacgacaaggcctacgaccggcagctcgacagcggagacaacccgtacctcaagtacaaccacgccgacgcggagtttcaggagcgccttaaagaagatacgtcttttgggggcaacctcgcaagagcagtattccaggcgaaaaagagggttcttgaacctctgggcctggttgaggagcctgttaagacggctccgggaaaaaagaggccggtagagcactctcctgcggagctagattcctcctccggaactggaaagtcgggccaacagcctgcaagaaagagattgaattttggtcagactggagacgcagactccgtacctgacccccagcctctcggacagccaccagcagccccctctggtctgggaactaatacgatggcttcaggcagtggcgcaccaatggcagacaataacgagggcgccgacggagtgggtaattcctcgggaaattggcattgcgattccacatggatgggcgacagagtcatcaccaccagcacccgcacctgggctctgcccacctacaacaaccatctgtacaagcaaatttccagccagtctggggccagcaacgacaaccactactttggctacagcaccccttgggggtattttgacttcaacagattccactgccacttctccccacgtgactggcaaagactcatcaacaacaattggggattccggcccaaaagactcaacttcaagctctttaacattcaagtcaaggaggtcacgcagaatgacggtacgacgacgattgccaataaccttaccagcacggttcaggtgtttactgactcggagtaccagctcccgtacgtcctcggctcggcgcatcaaggatgcctcccgccgttcccagcagacgtcttcatggtgccacagtatggatacctcaccctgaacaacgggagtcaggcggtaggacgctcttcattttactgcctggagtactttccttctcagatgctgcgtaccggaaacaactttaccttcagctacacctttgaggacgttccttttcacagcagctacgctcacagccagagtttggaccgtctcatgaatcctctcatcgaccagtacctgtattacttgagcagaacaaacactccaagcggaaccactacgcagtccaggcttcagttttctcaagccggagcgagtgacattcgggaccagtctaggaactggcttcctggaccctgttaccgccagcagcgagtatcaaagacagctgcggacaacaacaacagtgattactcgtggactggagctaccaagtatcacctcaatggaagagactctctggtgaatccgggcacagccatggccagccacaaggacgatgaagaaaagtattttcctcagagcggggttctcatcttccggaaacaagactcgggaaaaactaatgtggacattgaaaaggtcatgattacagacgaagaggaaatcaggaccaccaatcccgtggctacggagcagtatggttctgtatctaccaatctccagagcggcaacacacaagcagctacctcagatgtcaacacacaaggcgttcttccaggcatggtctggcaggacagagacgtgtacctgcagggacccatctgggcaaagattccacacacggacggacattttcacccttctcctcttatgggaggatttggaccgaagcaccctcccccgcagattctcatcaagaataccccggtacctgcgaatccttctaccaccttcagcgcggcaaagtttgcttacttcatcacacagtactccacggggcaggtcagcgtggagatcgagtgggagctgcagaaagagaacagcaaacgctggaaccccgagatccagtatacctccaactacaacaagtctgttaatgtggactttactgtggacactaatggcgtgtattcagagcctcgccccattggcacaagatacctgactcgtaatctgtaa

SEQ ID NO: 3433 - DNA, 2208 bp, Artificial Sequence
  Description of Artificial Sequence: Synthetic polynucleotide
atggctgccgatggttatcttccagattggctcgaggacactctctctgaaggaataagacagtggtggaagctcaaacctggcccaccaccgccaaagcccgcagagcggcataaggacgacagcaggggtcttgtgcttcctgggtacaagtacctcggacccttcaacggactcgacaaaggagagccggtcaacgaggcagacgccgcggccctcgagcacgacaaggcctacgaccggcagctcgacagcggagacaacccgtacctcaagtacaaccacgccgacgcggagtttcaggagcgccttaaagaagatacgtcttttgggggcaacctcgcaagagcagtattccaggcgaaaaagagggttcttgaacctctgggcctggttgaggagcctgttaagacggctccgggaaaaaagaggccggtagagcactctcctgcggagctagattcctcctccggaactggaaagtcgggccaacagcctgcaagaaagagattgaattttggtcagactggagacgcagactccgtacctgacccccagcctctcggacagccaccagcagccccctctggtctgggaactaatacgatggcttcaggcagtggcgcaccaatggcagacaataacgagggcgccgacggagtgggtaattcctcgggaaattggcattgcgactccacatggatgggcgacagagtcatcaccaccagcacccgcacctgggctctgcccacctacaacaaccatctgtacaagcaaatttccagccagtctggggccagcaacgacaaccactactttggctacagcaccccttgggggtattttgacttcaacagattccactgccacttctccccacgtgactggcaaagactcatcaacaacaattggggattccggcccaaaagactcgacttcaagctctttaacattcaagtcaaggaggtcacgcagaatgacggtacgacgacgattgccaataaccttaccagcacggttcaggtgtttactgactcggagtaccagctcccgtacgtcctcggctcggcgcatcaaggatgcctcccgccgttcccagcagacgtcttcatggtgccacagtatggatacctcaccctgaacaacgggagtcaggcggtaggacgctcttcattttactgcctggagtactttccttctcagatgctgcgtaccggaaacaactttaccttcagctacacctttgaggacgttccttttcacagcagctacgctcacagccagagtttggaccgtctcatgaatcctctcatcgaccagtacctgtattacttgagcagaacaaacactccaagcggaaccactacgcagtccaggcttcagttttctcaagccggagcgagtgacattcgggaccagtctaggaactggcttcctggaccctgttaccgccagcagcgagtatcaaagacagctgcggacaacaacaacagtgattactcgtggactggagctaccaagtatcacctcaatggaagagactctctggtgaatccgggcacagccatggccagccacaaggacgatgaagaaaagtattttcctcagagcggggttctcatcttcggaaaacaagactcgggaaaaactaatgtggacattgaaaaggtcatgattacagacgaagaggaaatcaggaccaccaatcccgtggctacggagcagtatggttctgtatctaccaatctccagagcggcaacacacaagcagctacctcagatgtcaacacacaaggcgttcttccaggcatggtctggcaggacagagacgtgtacctgcagggacccatctgggcaaagattccacacacggacggacattttcacccttctcctcttatgggaggatttggaccgaagcaccctcccccgcagattctcatcaagaataccccggtacctgcgaatccttctaccaccttcagcgcggcaaagtttgcttccttcatcacacagtactccacggggcaggtcagcgtggagatcgagtgggagctgcagaaagagaacagcaaacgctggaaccccgagatccagtatacctccaactacaacaagtctgttaatgtggactttactgtggacactaatggcgtgtattcagagcctcgccccattggcacaagatacctgactcgtaatctgtaa

SEQ ID NO: 3434 - DNA, 2208 bp, Artificial Sequence
  Description of Artificial Sequence: Synthetic polynucleotide
atggctgccgatggttatcttccagattggctcgaggacactctctctgaaggaataagacagtggtggaagctcaaacctggcccaccaccgccaaagcccgcagagcggcataaggacgacagcaggggtcttgtgcttcctgggtacaagtacctcggacccttcaacggactcgacaaaggagagccggtcaacgaggcagacgccgcggccctcgagcacgacaaggcctacgaccggcagctcgacagcggagacaacccgtacctcaagtacaaccacgccgacgcggagtttcaggagcgccttaaagaagatacgtcttttgggggcaacctcgcaagagcagtattccaggcgaaaaagagggttcttgaacctctgggcctggttgaggagcctgttaagacggctccgggaaaaaagaggccggtagagcactctcctgcggagctagattcctcctccggaactggaaagtcgggccaacagcctgcaagaaagagattgaattttggtcagactggaggcgcagactccgtacctgacccccagcctctcggacagccaccagcagccccctctggtctgggaactaatacgatggcttcaggcagtggcgcaccaatggcagacaataacgagggcgccgacggagtgggtaattcctcgggaaattggcattgcgattccacatggatgggcgacagagtcatcaccaccagcacccgcacctgggctctgcccacctacaacaaccatctgtacaagcaaatttccagccagtctggggccagcaacgacaaccactactttggctacagcaccccttgggggtattttgacttcaacagattccactgccacttctccccacgtgactggcaaagactcatcaacaacaattggggattccggcccaaaagactcaacttcaagctctttaacattcaagtcaaggaggtcacgcagaatgacggtacgacgacgattgccaataaccttaccagcacggttcaggtgtttactgactcggagtaccagctcccgtacgtcctcggctcggcgcatcaaggatgcctcccgccgttcccagcagacgtcttcatggtgccacagtatggatacctcaccctgaacaacgggagtcaggcggtaggacgctcttcattttactgcctggagtactttccttctcagatgctgcgtaccggaaacaactttaccttcagctacacctttgaggacgttccttttcacagcagctacgctcacagccagagtttggaccgtctcatgaatcctctcatcgaccagtacctgtattacttgagcagaacaaacactccaagcggaaccactacgcagtccaggcttcagttttctcaagccggagcgagtgacattcgggaccagtctaggaactggcttcctggaccctgttaccgccagcagcgagtatcaaagacagctgcggacaacaacaacagtgattactcgtggactggagctaccaagtatcacctcaatggaagagactctctggtgaatccgggcacagccatggccagccacaaggacgatgaagaaaagtattttcctcagagcggggttctcatcttcggaaaacaagactcgggaaaaactaatgtggacattgaaaaggtcatgattacagacgaagaggaaatcaggaccaccaatcccgtggctacggagcagtatggttctgtatctaccaatctccagagcggcaacacacaagcagctacctcagatgtcaacacacaaggcgttcttccaggcatggtctggcaggacagagacgtgtacctgcagggacccatctgggcaaagattccacacacggacggacattttcacccttctcctcttatgggaggatttggaccgaagcaccctcccccgcagattctcatcaagaataccccggtacctgcgaatccttctaccaccttcagcgcggcaaagtttgcttccttcatcacacagtactccacggggcaggtcagcgtggagatcgagtgggagctgcagaaagagaacagcaaacgctggaaccccgagatccagtatacctccaactacaacaagtctgttaatgtggactttactgtggacactaatggcgtgtattcagagcctcgccccattggcacaagatacctgactcgtaatctgtaa

SEQ ID NO: 3435 - DNA, 2208 bp, Artificial Sequence
  Description of Artificial Sequence: Synthetic polynucleotide
atggctgccgatggttatcttccagattggctcgaggacactctctctgaaggaataagacagtggtggaagctcaaacctggcccaccaccgccaaagcccgcagagcggcataaggacgacagcaggggtcttgtgcttcctgggtacaagtacctcggacccttcaacggactcgacaaaggagagccggtcaacgaggcagacgccgcggccctcgagcacgacaaggcctacgaccggcagctcgacagcggagacaacccgtacctcaagtacaaccacgccgacgcggagtttcaggagcgccttaaagaagatacgtcttttgggggcaacctcgcaagagcagtattccaggcgaaaaagagggttcttgaacctctgggcctggttgaggagcctgttaagacggctccgggaaaaaagaggccggtagagcactctcctgcggagctagattcctcctccggaactggaaagtcgggccaacagcctgcaagaaagagattgaattttggtcagactggagacgcagactccgtacctgacccccagcctctcggacagccaccagcagccccctctggtctgggaactaatacgatggcttcaggcagtggcgcaccaatggcagacaataacgagggcgccgacggagtgggtaattcctcgggaaattggcattgcgattccacatggatgggcgacagagtcatcaccaccagcacccgcacctgggctctgcccacctacaacaaccatctgtacaagcaaatttccagccagtctggggccagcaacgacaaccactactttggctacagcaccccttgggggtattttgacttcaacagattccactgccacttctccccacgtgactggcaaagactcatcaacaacaattggggattccggcccaaaagactcaacttcaagctctttaacattcaagtcaaggaggtcacgcagaatgacggtacgacgacgattgccaataaccttaccagcacggttcaggtgtttactgactcggagtaccagctcccgtacgtcctcggctcggcgcatcaaggatgcctcccgccgttcccagcagacgtcttcatggtgccacagtatggatacctcaccctgaacaacgggagtcaggcggtaggacgctcttcattttactgcctggagtactttccttctcagatgctgcgtaccggaaacaaccttaccttcagctacacctttgaggacgttccttttcacagcagctacgctcacagccagagtttggaccgtctcatgaatcctctcatcgaccagtacctgtattacttgagcagaacaaacactccaagcggaaccactacgcagtccaggcttcagttttctcaagccggagcgagtgacattcgggaccagtctaggaactggcttcctggaccctgttaccgccagcagcgagtatcaaagacagctgcggacaacaacaacagtgattactcgtggactggagctaccaagtatcacctcaatggaagagactctctggtgaatccgggcacagccatggccagccacaaggacgatgaagaaaagtattttcctcagagcggggttctcatcttcggaaaacaagactcgggaaaaactaatgtggacattgaaaaggtcatgattacagacgaagaggaaatcaggaccaccaatcccgtggctacggagcagtatggttctgtatctaccaatctccagagcggcaacacacaagcagctacctcagatgtcaacacacaaggcgttcttccaggcatggtctggcaggacagagacgtgtacctgcagggacccatctgggcaaagattccacacacggacggacattttcacccttctcctcttatgggaggatttggaccgaagcaccctcccccgcagattctcatcaagaataccccggtacctgcgaatccttctaccaccttcagcgcggcaaagtttgcttccttcatcacacagtactccacggggcaggtcagcgtggagatcgagtgggagctgcagaaagagaacagcaaacgctggaaccccgagatccagtatacctccaactacaacaagtctgttaatgtggactttactgtggacactaatggcgtgtattcagagcctcgccccattggcacaagatacctgactcgtaatctgtaa

SEQ ID NO: 3436 - DNA, 2208 bp, Artificial Sequence
  Description of Artificial Sequence: Synthetic polynucleotide
atggctgccgatggttatcttccagattggctcgaggacactctctctgaaggaataagacagtggtggaagctcaaacctggcccaccaccgccaaagcccgcagagcggcataaggacgacagcaggggtcttgtgcttcctgggtacaagtacctcggacccttcaacggactcgacaaaggagagccggtcaacgaggcagacgccgcggccctcgagcacgacaaggcctacgaccggcagctcgacagcggagacaacccgtacctcaagtacaaccacgccgacgcggagtttcaggagcgccttaaagaagatacgtcttttgggggcaacctcgcaagagcagtattccaggcgaaaaagagggttcttgaacctctgggcctggttgaggagcctgttaagacggctccgggaaaaaagaggccggtagagcactctcctgcggagctagattcctcctccggaactggaaagtcgggccaacagcctgcaagaaagagattgaattttggtcagactggagacgcagactccgtacctgacccccagcctctcggacagccaccagcagccccctctggtctgggaactaatacgatggcttcaggcagtggcgcaccaatggcagacaataacgagggcgccgacggagtgggtaattcctcgggaaattggcattgcgattccacatggatgggcgacagagtcatcaccaccagcacccgcacctgggctctgcccacctacaacaaccatctgtacaagcaaatttccagccagtctggggccagcaacgacaaccactactttggctacagcaccccttgggggtattttgacttcaacagattccactgccacttctccccacgtgactggcaaagactcatcaacaacaattggggattccggcccaaaagactcaacttcaagctctttaacattcaagtcaaggaggtcacgcagaatgacggtacgacgacgattgccaataaccttaccagcacggttcaggtgtttactgactcggagtaccagctcccgtacgtcctcggctcggcgcatcaaggatgcctcccgccgttcccagcagacgtcttcatggtgccacagtatggataccacaccctgaacaacgggagtcaggcggtaggacgctcttcattttactgcctggagtactttccttctcagatgctgcgtaccggaaacaactttaccttcagctacacctttgaggacgttccttttcacagcagctacgctcacagccagagtttggaccgtctcatgaatcctctcatcgaccagtacctgtattacttgagcagaacaaacactccaagcggaaccactacgcagtccaggcttcagttttctcaagccggagcgagtgacattcgggaccagtctaggaactggcttcctggaccctgttaccgccagcagcgagtatcaaagacagctgcggacaacaacaacagtgattactcgtggactggagctaccaagtatcacctcaatggaagagactctctggtgaatccgggcacagccatggccagccacaaggacgatgaagaaaagtattttcctcagagcggggttctcatcttcggaaaacaagactcgggaaaaactaatgtggacattgaaaaggtcatgattacagacgaagaggaaatcaggaccaccaatcccgtggctacggagcagtatggttctgtatctaccaatctccagagcggcaacacacaagcagctacctcagatgtcaacacacaaggcgttcttccaggcatggtctggcaggacagagacgtgtacctgcagggacccatctgggcaaagattccacacacggacggacattttcacccttctcctcttatgggaggatttggaccgaagcaccctcccccgcagattctcatcaagaataccccggtacctgcgaatccttctaccaccttcagcgcggcaaagtttgcttccttcatcacacagtactccacggggcaggtcagcgtggagatcgagtgggagctgcagaaagagaacagcaaacgctggaaccccgagatccagtatacctccaactacaacaagtctgttaatgtggactttactgtggacactaatggcgtgtattcagagcctcgccccattggcacaagatacctgactcgtaatctgtaa

SEQ ID NO: 3437 - DNA, 2208 bp, Artificial Sequence
  Description of Artificial Sequence: Synthetic polynucleotide
atggctgccgatggttatcttccagattggctcgaggacactctctctgaaggaataagacagtggtggaagctcaaacctggcccaccaccgccaaagcccgcagagcggcataaggacgacagcaggggtcttgtgcttcctgggtacaagtacctcggacccttcaacggactcgacaaaggagagccggtcaacgaggcagacgccgcggccctcgagcacgacaaggcctacgaccggcagctcgacagcggagacaacccgtacctcaagtacaaccacgccgacgcggagtttcaggagcgccttaaagaagatacgtcttttgggggcaacctcgcaagagcagtattccaggcgaaaaagagggttcttgaacctctgggcctggttgaggagcctgttaagacggctccgggaaaaaagaggccggtagagcactctcctgcggagctagattcctcctccggaactggaaagtcgggccaacagcctgcaagaaagagattgaattttggtcagactggagacgcagactccgtacctgacccccagcctctcggacagccaccagcagccccctctggtctgggaactaatacgatggcttcaggcagtggcgcaccaatggcagacaataacgagggcgccgacggagtgggtaattcctcgggaaattggcattgcgattccacatggatgggcgacagagtcatcaccaccagcacccgcacctgggctctgcccacctacaacaaccatctgtacaagcaaatttccagccagtctggggccagcaacgacaaccactactttggctacagcaccccttgggggtattttgacttcaacagattccactgccacttctccccacgtgactggcaaagactcatcaacaacaattggggattccggcccaaaagactcaacttcaagctctttaacattcaagtcaaggaggtcacgcagaatgacggtacgacgacgattgccaataaccttaccagcacggttcaggtgtttactgactcggagtaccagctcccgtacgtcctcggctcggcgcatcaaggatgcctcccgccgttcccagcagacgtcttcatggtgccacagtatggatacctcaccctgaacaacgggagtcaggcggtaggacgctcttcattttactgcctggagtactttccttctcagatgctgcgtaccggaaacaactttaccttcagctacacctttgaggacgttccttttcacagcagctacgctcacagccagagtttggaccgtctcatgaatcctctcatcgaccagtacccgtattacttgagcagaacaaacactccaagcggaaccactacgcagtccaggcttcagttttctcaagccggagcgagtgacattcgggaccagtctaggaactggcttcctggaccctgttaccgccagcagcgagtatcaaagacagctgcggacaacaacaacagtgattactcgtggactggagctaccaagtatcacctcaatggaagagactctctggtgaatccgggcacagccatggccagccacaaggacgatgaagaaaagtattttcctcagagcggggttctcatcttcggaaaacaagactcgggaaaaactaatgtggacattgaaaaggtcatgattacagacgaagaggaaatcaggaccaccaatcccgtggctacggagcagtatggttctgtatctaccaatctccagagcggcaacacacaagcagctacctcagatgtcaacacacaaggcgttcttccaggcatggtctggcaggacagagacgtgtacctgcagggacccatctgggcaaagattccacacacggacggacattttcacccttctcctcttatgggaggatttggaccgaagcaccctcccccgcagattctcatcaagaataccccggtacctgcgaatccttctaccaccttcagcgcggcaaagtttgcttccttcatcacacagtactccacggggcaggtcagcgtggagatcgagtgggagctgcagaaagagaacagcaaacgctggaaccccgagatccagtatacctccaactacaacaagtctgttaatgtggactttactgtggacactaatggcgtgtattcagagcctcgccccattggcacaagatacctgactcgtaatctgtaa

SEQ ID NO: 3438 - DNA, 2208 bp, Artificial Sequence
  Description of Artificial Sequence: Synthetic polynucleotide
atggctgccgatggttatcttccagattggctcgaggacactctctctgaaggaataagacagtggtggaagctcaaacctggcccaccaccgccaaagcccgcagagcggcataaggacgacagcaggggtcttgtgcttcctgggtacaagtacctcggacccttcaacggactcgacaaaggagagccggtcaacgaggcagacgccgcggccctcgagcacgacaaggcctacgaccggcagctcgacagcggagacaacccgtacctcaagtacaaccacgccgacgcggagtttcaggagcgccttaaagaagatacgtcttttgggggcaacctcgcaagagcagtattccaggcgaaaaagagggttcttgaacctctgggcctggttgaggagcctgttaagacggctccgggaaaaaagaggccggtagagcactctcctgcggagctagattcctcctccggaactggaaagtcgggccaacagcctgcaagaaagagattgaattttggtcagactggagacgcagactccgtacctgacccccagcctctcggacagccaccagcagccccctctggtctgggaactaatacgatggcttcaggcagtggcgcaccaatggcagacaataacgagggcgccgacggagtgggtaattcctcgggaaattggcattgcgattccacatggatgggcgacagagtcatcaccaccagcacccgcacctgggctctgcccacctacaacaaccatctgtacaagcaaatttccagccagtctggggccagcaacgacaaccactactttggctacagcaccccttgggggtattttgacttcaacagattccactgccacttctccccacgtgactggcaaagactcatcaacaacaattggggattccggcccaaaagactcaacttcaagctctttaacattcaagtcaaggaggtcacgcagaatgacggtacgacgacgattgccaataaccttaccagcacggttcaggtgtttactgactcggagtaccagctcccgtacgtcctcggctcggcgcatcaaggatgcctcccgccgttcccagcagacgtcttcatggtgccacagtatggatacctcaccctgaacaacgggagtcaggcggtaggacgctcttcattttactgcctggagtactttccttctcagatgctgcgtaccggaaacaactttaccttcagctacacctttgaggacgttccttttcacagcagctacgctcacagccagagtttggaccgtctcatgaatcctctcatcgaccagtacctgtattacttgagcagaacaaacactccaagcggaaccactacgcagtccaggcttcagttttctcaagccggagcgagtgacattcgggaccagtctaggaactggcttcctggaccctgttaccgccagcagcgagtatcaaagacagctgcggacaacaacaacagtgattactcgtggactggagctaccaagtatcacctcaatggaagagactctctggtgaatccgggcacagccatggccagccacaaggacgatgaagaaaagtattttcctcagagcggggttctcatcttcggaaaacaagactcgggaaaaactaatgtggacattgaaaaggtcatgattacagacgaagaggaaatcaggaccaccaatcccgtggctacggagcagtatggttctgtatctaccaatctccagagcggcaacacacaagcagctacctcagatgtcaacacacaaggcgttcttccaggcatggtctggcaggacagagacgtgtacctgcagggacccatctgggcaaagattccacacacggacggacattttcacccttctcctcttatgggaggatttggaccgaagcaccctcccccgcagattctcatcaagaataccccggtacctgcgaatcctcctaccaccttcagcgcggcaaagtttgcttccttcatcacacagtactccacggggcaggtcagcgtggagatcgagtgggagctgcagaaagagaacagcaaacgctggaaccccgagatccagtatacctccaactacaacaagtctgttaatgtggactttactgtggacactaatggcgtgtattcagagcctcgccccattggcacaagatacctgactcgtaatctgtaa

SEQ ID NO: 3439 - DNA, 2208 bp, Artificial Sequence
  Description of Artificial Sequence: Synthetic polynucleotide
atggctgccgatggttatcttccagattggctcgaggacactctctctgaaggaataagacagtggtggaagctcaaacctggcccaccaccgccaaagcccgcagagcggcataaggacgacagcaggggtcttgtgcttcctgggtacaagtacctcggacccttcaacggactcgacaaaggagagccggtcaacgaggcagacgccgcggccctcgagcacgacaaggcctacgaccggcagctcgacagcggagacaacccgtacctcaagtacaaccacgccgacgcggagtttcaggagcgccttaaagaagatacgtcttttgggggcaacctcgcaagagcagtattccaggcgaaaaagagggttcttgaacctctgggcctggttgaggagcctgttaagacggctccgggaaaaaagaggccggtagagcactctcctgcggagctagattcctcctccggaactggaaagtcgggccaacagcctgcaagaaagagattgaattttggtcagactggagacgcagactccgtacctgacccccagcctctcggacagccaccagcagccccctctggtctgggaactaatacgatggcttcaggcagtggcgcaccaatggcagacaataacgagggcgccgacggagtgggtaattcctcgggaaattggcattgcgattccacatggatgggcgacagagtcatcaccaccagcacccgcacctgggctctgcccacctacaacaaccatctgtacaagcaaatttccagccagtctggggccagcaacgacaaccactactttggctacagcaccccttgggggtattttgacttcaacagattccactgccacttctccccacgtgactggcaaagactcatcaacaacaattggggattccggcccaaaagactcaacttcaagctctttaacattcaagtcaaggaggtcacgcagaatgacggtacgacgacgattgccaataaccttaccagcacggttcaggtgtttactgactcggagtaccagctcccgtacgtcctcggctcggcgcatcaaggatgcctcccgccgttcccagcagacgtcttcatggtgccacagtatggatacctcaccctgaacaacgggagtcaggcggtaggacgctcttcattttactgcctggagtactttccttctcagatgctgcgtaccggaaacaactttaccttcagctacacctttgaggacgttccttttcacagcagctacgctcacagccagagtttggaccgtctcatgaatcctctcatcgaccagtacctgtattacttgagcagaacaaacactccaagcggaaccactacgcagtccaggcttcagttttctcaagccggagcgagtgacattcgggaccagtctaggaactggcttcctggaccctgttaccgccagcagcgagtaccaaagacagctgcggacaacaacaacagtgattactcgtggactggagctaccaagtatcacctcaatggaagagactctctggtgaatccgggcacagccatggccagccacaaggacgatgaagaaaagtattttcctcagagcggggttctcatcttcggaaaacaagactcgggaaaaactaatgtggacattgaaaaggtcatgattacagacgaagaggaaatcaggaccaccaatcccgtggctacggagcagtatggttctgtatctaccaatctccagagcggcaacacacaagcagctacctcagatgtcaacacacaaggcgttcttccaggcatggtctggcaggacagagacgtgtacctgcagggacccatctgggcaaagattccacacacggacggacattttcacccttctcctcttatgggaggatttggaccgaagcaccctcccccgcagattctcatcaagaataccccggtacctgcgaatccttctaccaccttcagcgcggcaaagtttgcttccttcatcacacagtactccacggggcaggtcagcgtggagatcgagtgggagctgcagaaagagaacagcaaacgctggaaccccgagatccagtatacctccaactacaacaagtctgttaatgtggactttactgtggacactaatggcgtgtattcagagcctcgccccattggcacaagatacctgactcgtaatctgtaa

SEQ ID NO: 3440 - DNA, 2208 bp, Artificial Sequence
  Description of Artificial Sequence: Synthetic polynucleotide
atggctgccgatggttatcttccagattggctcgaggacactctctctgaaggaataagacagtggtggaagctcaaacctggcccaccaccgccaaagcccgcagagcggcataaggacgacagcaggggtcttgtgcttcctgggtacaagtacctcggacccttcaacggactcgacaaaggagagccggtcaacgaggcagacgccgcggccctcgagcacgacaaggcctacgaccggcagctcgacagcggagacaacccgtacctcaagtacaaccacgccgacgcggagtttcaggagcgccttaaagaagatacgtcttttgggggcaacctcgcaagagcagtattccaggcgaaaaagagggttcttgaacctctgggcctggttgaggagcctgttaagacggctccgggaaaaaagaggccggtagagcactctcctgcggagctagattcctcctccggaactggaaagtcgggccaacagcctgcaagaaagagattgaattttggtcagactggagacgcagactccgtacctgacccccagcctctcggacagccaccagcagccccctctggtctgggaactaatacgatggcttcaggcagtggcgcaccaatggcagacaataacgagggcgccgacggagtgggtaattcctcgggaaattggcattgcgattccacatggatgggcgacagagtcatcaccaccagcacccgcacctgggctctgcccacctacaacaaccatctgtacaagcaaatttccagccagtctggggccagcaacgacaaccactactttggctacagcaccccttgggggtattttgacttcaacagattccactgccacttctccccacgtgactggcaaagactcatcaacaacaattggggattccggcccaaaagactcaacttcaagctctttaacattcaagtcaaggaggtcacgcagaatgacggtacgacgacgattgccaataaccttaccagcacggttcaggtgtttactgactcggagtaccagctcccgtacgtcctcggctcggcgcatcaaggatgcctcccgccgttcccagcagacgtcttcatggtgccacagtatggatacctcaccctgaacaacgggagtcaggcggtaggacgctcttcattttactgcctggagtactttccttctcagatgctgcgtaccggaaacaactttaccttcagctacacctttgaggacgttccttttcacagcagctacgctcacagccagagtttggaccgtctcatgaatcctctcatcgaccagtacctgtattacttgagcagaacaaacactccaagcggaaccactacgcagtccaggcttcagttttctcaagccggagcgagtgacattcgggaccagtctaggaactggcttcctggaccctgttaccgccagcagcgagtatcaaagacagctgcggacaacaacaacagtgattactcgtggactggagctaccaagtatcacctcaatggaagagactctctggtgaatccgggcacagccatggccagccacaaggacgatgaagaaaagtattttcctcagagcggggttctcatcttcggaaaacaagactcgggaaaaactaatgtggacattgaaaaggtcatgattacagacgaagaggaaatcaggaccaccaatcccgtggctacggagcagtatggttctgtatctaccaatctccagagcggcaacacacaagcagctacctcagatgtcaacacacaaggcgttcttccaggcatggtctggcaggacagagacgtgtacctgcagggacccatctgggcaaagattccacacacggacggacattttcacccttctcctcttatgggaggatttggaccgaagcaccctcccccgcagattctcatcaagaataccccggtacctgcgaatccttctaccaccttcagcgcggcaaagtttgcttccttcatcacacagtactccacggggcaggtcagcgtggagatcgagtgggagctgcagaaagagaacagcaaacgctggaaccccgagatccagtatacctccaactacaacaagtctgttaatgtggactttactgtggacactaatggcgtgtattcagagcctcgccccattggcacaagatacctgactcgtaatctgtaa

SEQ ID NO: 3441 - DNA, 2208 bp, Artificial Sequence
  Description of Artificial Sequence: Synthetic polynucleotide
atggctgccgatggttatcttccagattggctcgaggacactctctctgaaggaataagacagtggtggaagctcaaacctggcccaccaccgccaaagcccgcagagcggcataaggacgacagcaggggtcttgtgcttcctgggtacaagtacctcggacccttcaacggactcgacaaaggagagccggtcaacgaggcagacgccgcggccctcgagcacgacaaggcctacgaccggcagctcgacagcggagacaacccgtacctcaagtacaaccacgccgacgcggagtttcaggagcgccttaaagaagatacgccttttgggggcaacctcgcaagagcagtattccaggcgaaaaagagggttcttgaacctctgggcctggttgaggagcctgttaagacggctccgggaaaaaagaggccggtagagcactctcctgcggagctagattcctcctccggaactggaaagtcgggccaacagcctgcaagaaagagattgaattttggtcagactggagacgcagactccgtacctgacccccagcctctcggacagccaccagcagccccctctggtctgggaactaatacgatggcttcaggcagtggcgcaccaatggcagacaataacgagggcgccgacggagtgggtaattcctcgggaaattggcattgcgattccacatggatgggcgacagagtcatcaccaccagcacccgcacctgggctctgcccacctacaacaaccatctgtacaagcaaatttccagccagtctggggccagcaacgacaaccactactttggctacagcaccccttgggggtattttgacttcaacagattccactgccacttctccccacgtgactggcaaagactcatcaacaacaattggggattccggcccaaaagactcaacttcaagctctttaacattcaagtcaaggaggtcacgcagaatgacggtacgacgacgattgccaataaccttaccagcacggttcaggtgtttactgactcggagtaccagctcccgtacgtcctcggctcggcgcatcaaggatgcctcccgccgttcccagcagacgtcttcatggtgccacagtatggatacctcaccctgaacaacgggagtcaggcggtaggacgctcttcattttactgcctggagtactttccttctcagatgctgcgtaccggaaacaactttaccttcagctacacctttgaggacgttccttttcacagcagctacgctcacagccagagtttggaccgtctcatgaatcctctcatcgaccagtacctgtattacttgagcagaacaaacactccaagcggaaccactacgcagtccaggcttcagttttctcaagccggagcgagtgacattcgggaccagtctaggaactggcttcctggaccctgttaccgccagcagcgagtatcaaagacagctgcggacaacaacaacagtgattactcgtggactggagctaccaagtatcacctcaatggaagagactctctggtgaatccgggcacagccatggccagccacaaggacgatgaagaaaagtattttcctcagagcggggttctcatcttcggaaaacaagactcgggaaaaactaatgtggacattgaaaaggtcatgattacagacgaagaggaaatcaggaccaccaatcccgtggctacggagcagtatggttctgtatctaccaatctccagagcggcaacacacaagcagctacctcagatgtcaacacacaaggcgttcttccaggcatggtctggcaggacagagacgtgtacctgcagggacccatctgggcaaagattccacacacggacggacattttcacccttctcctcttatgggaggatttggaccgaagcaccctcccccgcagattctcatcaagaataccccggtacctgcgaatccttctaccaccttcagcgcggcaaagtttgcttccttcatcacacagtactccacggggcaggtcagcgtggagatcgagtgggagctgcagaaagagaacagcaaacgctggaaccccgagatccagtatacctccaactacaacaagtctgttaatgtggactttactgtggacactaatggcgtgtattcagagcctcgccccattggcacaagatacctgactcgtaatctgtaa

SEQ ID NO: 3442 - DNA, 2208 bp, Artificial Sequence
  Description of Artificial Sequence: Synthetic polynucleotide
atggctgccgatggttatcttccagattggctcgaggacactctctctgaaggaataagacagtggtggaagctcaaacctggcccaccaccgccaaagcccgcagagcggcataaggacgacagcaggggtcttgtgcttcctgggtacaagtacctcggacccttcaacggactcgacaaaggagagccggtcaacgaggcagacgccgcggccctcgagcacgacaaggcctacgaccggcagctcgacagcggagacaacccgtacctcaagtacaaccacgccgacgcggagtttcaggagcgccttaaagaagatacgtcttttgggggcaacctcgcaagagcagtattccaggcgaaaaagagggttcttgaacctctgggcctggttgaggagcctgttaagacggctccgggaaaaaagaggccggtagagcactctcctgcggagctagattcctcctccggaactggaaagtcgggccaacagcctgcaagaaagagattgaattttggtcagactggagacgcagactccgtacctgacccccagcctctcggacagccaccagcagccccctctggtctgggaactaatacgatggcttcaggcagtggcgcaccaatggcagacaataacgagggcgccgacggagtgggtaattcctcgggaaattggcattgcgattccacatggatgggcgacagagtcatcaccaccagcacccgcacctgggctctgcccacctacaacaaccatctgtacaagcaaatttccagccagtctggggccagcaacgacaaccactactttggctacagcaccccttgggggtattttgacttcaacagattccactgccacttctccccacgtgactggcaaagactcatcaacaacaattggggattccggcccaaaagactcaactccaagctctttaacattcaagtcaaggaggtcacgcagaatgacggtacgacgacgattgccaataaccttaccagcacggttcaggtgtttactgactcggagtaccagctcccgtacgtcctcggctcggcgcatcaaggatgcctcccgccgttcccagcagacgtcttcatggtgccacagtatggatacctcaccctgaacaacgggagtcaggcggtaggacgctcttcattttactgcctggagtactttccttctcagatgctgcgtaccggaaacaactttaccttcagctacacctttgaggacgttccttttcacagcagctacgctcacagccagagtttggaccgtctcatgaatcctctcatcgaccagtacctgtattacttgagcagaacaaacactccaagcggaaccactacgcagtccaggcttcagttttctcaagccggagcgagtgacattcgggaccagtctaggaactggcttcctggaccctgttaccgccagcagcgagtatcaaagacagctgcggacaacaacaacagtgattactcgtggactggagctaccaagtatcacctcaatggaagagactctctggtgaatccgggcacagccatggccagccacaaggacgatgaagaaaagtattttcctcagagcggggttctcatcttcggaaaacaagactcgggaaaaactaatgtggacattgaaaaggtcatgattacagacgaagaggaaatcaggaccaccaatcccgtggctacggagcagtatggttctgtatctaccaatctccagagcggcaacacacaagcagctacctcagatgtcaacacacaaggcgttcttccaggcatggtctggcaggacagagacgtgtacctgcagggacccatctgggcaaagattccacacacggacggacattttcacccttctcctcttatgggaggatttggaccgaagcaccctcccccgcagattctcatcaagaataccccggtacctgcgaatccttctaccaccttcagcgcggcaaagtttgcttccttcatcacacagtactccacggggcaggtcagcgtggagatcgagtgggagctgcagaaagagaacagcaaacgctggaaccccgagatccagtatacctccaactacaacaagtctgttaatgtggactttactgtggacactaatggcgtgtattcagagcctcgccccattggcacaagatacctgactcgtaatctgtaa

SEQ ID NO: 3443 - DNA, 2208 bp, Artificial Sequence
  Description of Artificial Sequence: Synthetic polynucleotide
atggctgccgatggttatcttccagattggctcgaggacactctctctgaaggaataagacagtggtggaagctcaaacctggcccaccaccgccaaagcccgcagagcggcataaggacgacagcaggggtcttgtgcttcctgggtacaagtacctcggacccttcaacggactcgacaaaggagagccggtcaacgaggcagacgccgcggccctcgagcacgacaaggcctacgaccggcagctcgacagcggagacaacccgtacctcaagtacaaccacgccgacgcggagtttcaggagcgccttaaagaagatacgtcttttgggggcaacctcgcaagagcagtattccaggcgaaaaagagggttcttgaacctctgggcctggttgaggagcctgttaagacggctccgggaaaaaagaggccggtagagcactctcctgcggagctagattcctcctccggaactggaaagtcgggccaacagcctgcaagaaagagattgaattttggtcagactggagacgcagactccgtacctgacccccagcctctcggacagccaccagcagccccctctggtctgggaactaatacgatggcttcaggcagtggcgcaccaatggcagacaataacgagggcgccgacggagtgggtaattcctcgggaaattggcattgcgattccacatggatgggcgacagagtcatcaccaccagcacccgcacctgggctctgcccacctacaacaaccatctgtacaagcaaatttccagccagtctggggccagcaacgacaaccactactttggctacagcaccccttgggggtattttgacttcaacagattccactgccacttctccccacgtgactggcaaagactcatcaacaacaattggggattccggcccaaaagactcaacttcaagctctttaacattcaagtcaaggaggtcacgcagaatgacggtacgacgacgattgccaataaccttaccagcacggttcaggtgtttactgactcggagtaccagctcccgtacgtcctcggctcggcgcatcaaggatgcctcccgccgttcccagcagacgtcttcatggtgccacagtatggatacctcaccctgaacaacgggagtcaggcggtaggacgctcttcattttactgcctggagtactttccttctcagatgctgcgtaccggaaacaactttaccttcagctacacctttgaggacgttccttttcacagcagctacgctcacagccagggtttggaccgtctcatgaatcctctcatcgaccagtacctgtattacttgagcagaacaaacactccaagcggaaccactacgcagtccaggcttcagttttctcaagccggagcgagtgacattcgggaccagtctaggaactggcttcctggaccctgttaccgccagcagcgagtatcaaagacagctgcggacaacaacaacagtgattactcgtggactggagctaccaagtatcacctcaatggaagagactctctggtgaatccgggcacagccatggccagccacaaggacgatgaagaaaagtattttcctcagagcggggttctcatcttcggaaaacaagactcgggaaaaactaatgtggacattgaaaaggtcatgattacagacgaagaggaaatcaggaccaccaatcccgtggctacggagcagtatggttctgtatctaccaatctccagagcggcaacacacaagcagctacctcagatgtcaacacacaaggcgttcttccaggcatggtctggcaggacagagacgtgtacctgcagggacccatctgggcaaagattccacacacggacggacattttcacccttctcctcttatgggaggatttggaccgaagcaccctcccccgcagattctcatcaagaataccccggtacctgcgaatccttctaccaccttcagcgcggcaaagtttgcttccttcatcacacagtactccacggggcaggtcagcgtggagatcgagtgggagctgcagaaagagaacagcaaacgctggaaccccgagatccagtatacctccaactacaacaagtctgttaatgtggactttactgtggacactaatggcgtgtattcagagcctcgccccattggcacaagatacctgactcgtaatctgtaa

SEQ ID NO: 3444 - DNA, 2208 bp, Artificial Sequence
  Description of Artificial Sequence: Synthetic polynucleotide
atggctgccgatggttatcttccagattggctcgaggacactctctctgaaggaataagacagtggtggaagctcaaacctggcccaccaccgccaaagcccgcagagcggcataaggacgacagcaggggtcttgtgcttcctgggtacaagtacctcggacccttcaacggactcgacaaaggagagccggtcaacgaggcagacgccgcggccctcgagcacgacaaggcctacgaccggcagctcgacagcggagacaacccgtacctcaagtacaaccacgccgacgcggagtttcaggagcgccttaaagaagatacgtcttttgggggcaacctcgcaagagcagtattccaggcgaaaaagagggttcttgaacctctgggcctggttgaggagcctgttaagacggctccgggaaaaaagaggccggtagagcactctcctgcggagctagattcctcctccggaactggaaagtcgggccaacagcctgcaagaaagagattgaattttggtcagactggagacgcagactccgtacctgacccccagcctctcggacagccaccagcagccccctctggtctgggaactaatacgatggcttcaggcagtggcgcaccaatggcagacaataacgagggcgccgacggagtgggtaattcctcgggaaattggcattgcgattccacatggatgggcgacagagtcatcaccaccagcacccgcacctgggctctgcccacctacaacaaccatctgtacaagcaaatttccagccagtctggggccagcaacgacaaccactactttggctacagcaccccttgggggtattttgacttcaacagattccactgccacttctccccacgtgactggcaaagactcatcaacaacaattggggattccggcccaaaagactcaacttcaagctctttaacattcaagtcaaggaggtcacgcagaatgacggtacgacgacgattgccaataaccttaccagcacggttcaggtgtttactgactcggagtaccagctcccgtacgtcctcggctcggcgcatcaaggatgcctcccgccgctcccagcagacgtcttcatggtgccacagtatggatacctcaccctgaacaacgggagtcaggcggtaggacgctcttcattttactgcctggagtactttccttctcagatgctgcgtaccggaaacaactttaccttcagctacacctttgaggacgttccttttcacagcagctacgctcacagccagagtttggaccgtctcatgaatcctctcatcgaccagtacctgtattacttgagcagaacaaacactccaagcggaaccactacgcagtccaggcttcagttttctcaagccggagcgagtgacattcgggaccagtctaggaactggcttcctggaccctgttaccgccagcagcgagtatcaaagacagctgcggacaacaacaacagtgattactcgtggactggagctaccaagtatcacctcaatggaagagactctctggtgaatccgggcacagccatggccagccacaaggacgatgaagaaaagtattttcctcagagcggggttctcatcttcggaaaacaagactcgggaaaaactaatgtggacattgaaaaggtcatgattacagacgaagaggaaatcaggaccaccaatcccgtggctacggagcagtatggttctgtatctaccaatctccagagcggcaacacacaagcagctacctcagatgtcaacacacaaggcgttcttccaggcatggtctggcaggacagagacgtgtacctgcagggacccatctgggcaaagattccacacacggacggacattttcacccttctcctcttatgggaggatttggaccgaagcaccctcccccgcagattctcatcaagaataccccggtacctgcgaatccttctaccaccttcagcgcggcaaagtttgcttccttcatcacacagtactccacggggcaggtcagcgtggagatcgagtgggagctgcagaaagagaacagcaaacgctggaaccccgagatccagtatacctccaactacaacaagtctgttaatgtggactttactgtggacactaatggcgtgtattcagagcctcgccccattggcacaagatacctgactcgtaatctgtaa

SEQ ID NO: 3445 - DNA, 2208 bp, Artificial Sequence
  Description of Artificial Sequence: Synthetic polynucleotide
atggctgccgatggttatcttccagattggctcgaggacactctctctgaaggaataagacagtggtggaagctcaaacctggcccaccaccgccaaagcccgcagagcggcataaggacgacagcaggggtcttgtgcttcctgggtacaagtacctcggacccttcaacggactcgacaaaggagagccggtcaacgaggcagacgccgcggccctcgagcacgacaaggcctacgaccggcagctcgacagcggagacaacccgtacctcaagtacaaccacgccgacgcggagtttcaggagcgccttaaagaagatacgtcttttgggggcaacctcgcaagagcagtattccaggcgaaaaagagggttcttgaacctctgggcctggttgaggagcctgttaagacggctccgggaaaaaagaggccggtagagcactctcctgcggagctagattcctcctccggaactggaaagtcgggccaacagcctgcaagaaagagattgaattttggtcagactggagacgcagactccgtacctgacccccagcctctcggacagccaccagcagccccctctggtctgggaactaatacgatggcttcaggcagtggcgcaccaatggcagacaataacgagggcgccgacggagtgggtaattcctcgggaaattggcattgcgattccacatggatgggcgacagagtcatcaccaccagcacccgcacctgggctctgcccacctacaacaaccatctgtacaagcaaatttccagccagtctggggccagcaacgacaaccactactttggctacagcaccccttgggggtattttgacttcaacagattccactgccacttctccccacgtgactggcaaagacccatcaacaacaattggggattccggcccaaaagactcaacttcaagctctttaacattcaagtcaaggaggtcacgcagaatgacggtacgacgacgattgccaataaccttaccagcacggttcaggtgtttactgactcggagtaccagctcccgtacgtcctcggctcggcgcatcaaggatgcctcccgccgttcccagcagacgtcttcatggtgccacagtatggatacctcaccctgaacaacgggagtcaggcggtaggacgctcttcattttactgcctggagtactttccttctcagatgctgcgtaccggaaacaactttaccttcagctacacctttgaggacgttccttttcacagcagctacgctcacagccagagtttggaccgtctcatgaatcctctcatcgaccagtacctgtattacttgagcagaacaaacactccaagcggaaccactacgcagtccaggcttcagttttctcaagccggagcgagtgacattcgggaccagtctaggaactggcttcctggaccctgttaccgccagcagcgagtatcaaagacagctgcggacaacaacaacagtgattactcgtggactggagctaccaagtatcacctcaatggaagagactctctggtgaatccgggcacagccatggccagccacaaggacgatgaagaaaagtattttcctcagagcggggttctcatcttcggaaaacaagactcgggaaaaactaatgtggacattgaaaaggtcatgattacagacgaagaggaaatcaggaccaccaatcccgtggctacggagcagtatggttctgtatctaccaatctccagagcggcaacacacaagcagctacctcagatgtcaacacacaaggcgttcttccaggcatggtctggcaggacagagacgtgtacctgcagggacccatctgggcaaagattccacacacggacggacattttcacccttctcctcttatgggaggatttggaccgaagcaccctcccccgcagattctcatcaagaataccccggtacctgcgaatccttctaccaccttcagcgcggcaaagtttgcttccttcatcacacagtactccacggggcaggtcagcgtggagatcgagtgggagctgcagaaagagaacagcaaacgctggaaccccgagatccagtatacctccaactacaacaagtctgttaatgtggactttactgtggacactaatggcgtgtattcagagcctcgccccattggcacaagatacctgactcgtaatctgtaa

SEQ ID NO: 3446 - DNA, 2208 bp, Artificial Sequence
  Description of Artificial Sequence: Synthetic polynucleotide
atggctgccgatggttatcttccagattggctcgaggacactctctctgaaggaataagacagtggtggaagctcaaacctggcccaccaccgccaaagcccgcagagcggcataaggacgacagcaggggtcttgtgcttcctgggtacaagtacctcggacccttcaacggactcgacaaaggagagccggtcaacgaggcagacgccgcggccctcgagcacgacgaggcctacgaccggcagctcgacagcggagacaacccgtacctcaagtacaaccacgccgacgcggagtttcaggagcgccttaaagaagatacgtcttttgggggcaacctcgcaagagcagtattccaggcgaaaaagagggttcttgaacctctgggcctggttgaggagcctgttaagacggctccgggaaaaaagaggccggtagagcactctcctgcggagctagattcctcctccggaactggaaagtcgggccaacagcctgcaagaaagagattgaattttggtcagactggagacgcagactccgtacctgacccccagcctctcggacagccaccagcagccccctctggtctgggaactaatacgatggcttcaggcagtggcgcaccaatggcagacaataacgagggcgccgacggagtgggtaattcctcgggaaattggcattgcgattccacatggatgggcgacagagtcatcaccaccagcacccgcacctgggctctgcccacctacaacaaccatctgtacaagcaaatttccagccagtctggggccagcaacgacaaccactactttggctacagcaccccttgggggtattttgacttcaacagattccactgccacttctccccacgtgactggcaaagactcatcaacaacaattggggattccggcccaaaagactcaacttcaagctctttaacattcaagtcaaggaggtcacgcagaatgacggtacgacgacgattgtcaataaccttaccagcacggttcaggtgtttactgactcggagtaccagctcccgtacgtcctcggctcggcgcatcaaggatgcctcccgccgttcccagcagacgtcttcatggtgccacagtatggatacctcaccctgaacaacgggagtcaggcggtaggacgctcttcattttactgcctggagtactttccttctcagatgctgcgtaccggaaacaactttaccttcagctacacctttgaggacgttccttttcacagcagctacgctcacagccagagtttggaccgtctcatgaatcctctcatcgaccagtacctgtattacttgagcagaacaaacactccaagcggaaccactacgcagtccaggcttcagttttctcaagccggagcgagtgacattcgggaccagtctaggaactggcttcctggaccctgttaccgccagcagcgagtatcaaagacagctgcggacaacaacaacagtgattactcgtggactggagctaccaagtatcacctcaatggaagagactctctggtgaatccgggcacagccatggccagccacaaggacgatgaagaaaagtattttcctcagagcggggttctcatcttcggaaaacaagactcgggaaaaactaatgtggacattgaaaaggtcatgattacagacgaagaggaaatcaggaccaccaatcccgtggctacggagcagtatggttctgtatctaccaatctccagagcggcaacacacaagcagctacctcagatgtcaacacacaaggcgttcttccaggcatggtctggcaggacagagacgtgtacctgcagggacccatctgggcaaagattccacacacggacggacattttcacccttctcctcttatgggaggatttggaccgaagcaccctcccccgcagattctcatcaagaataccccggtacctgcgaatccttctaccaccttcagcgcggcaaagtttgcttacttcatcacacagtactccacggggcaggtcagcgtggagatcgagtgggagctgcagaaagggaacagcaaacgctggaaccccgagatccagtatacctccaactacaacaagtctgttaatgtggactttactgtggacactaatggcgtgtattcagagcctcgccccattggcacaagatacctgactcgtaatctgtaa

SEQ ID NO: 3447 - DNA, 2208 bp, Artificial Sequence
  Description of Artificial Sequence: Synthetic polynucleotide
atggctgccgatggttatcttccagattggctcgaggacactctctctgaaggaataagacagtggtggaagctcaaacctggcccaccaccgccaaagcccgcagagcggcataaggacgacagcaggggtcttgtgcttcctgggtacaagtacctcggacccttcaacggactcgacaaaggagagccggtcaacgaggcagacgccgcggccctcgagcacgacaaggcctacgaccggcagctcgacagcggagacaacccgtacctcaagtacaaccacgccgacgcggagtttcaggagcgccttaaagaagatacgtcttttgggggcaacctcgcaagagcagtattccaggcgaaaaagagggttcttgaacctctgggcctggttgaggagcctgttaagacggctccgggaaaaaagaggccggtagagcactctcctgcggagctagattcctcctccggaactggaaagtcgggccaacagcctgcaagaaagagattgaattttggtcagactggagacgcagactccgtacctgacccccagcctctcggacagccaccagcagccccctctggtctgggaactaatacgatggcttcaggcagtggcgcaccaatggcagacaataacgagggcgccgacggagtgggtaattcctcgggaaattggcattgcgattccacatggatgggcgacagagtcatcaccaccagcacccgcacctgggctctgcccacctacaacaaccatctgtacaagcaaatttccagccagtctggggccagcaacgacaaccactactttggctacagcaccccttgggggtattttgacttcaacagattccactgccacttctccccacgtgactggcaaagactcatcaacaacaattggggattccggcccaaaagactcaacttcaagctctttaacattcaagtcaaggaggtcacgcagaatgacggtacgacgacgattgccaataaccttaccagcacggttcaggtgtttactgactcggagtaccagctcccgtacgtcctcggctcggcgcatcaaggatgcctcccgccgttcccagcagacgtcttcatggtgccacagtatggatacctcaccctgaacaacgggagtcaggcggtaggacgctcttcattttactgcctggagtactttccttctcagatgctgcgtaccggaaacaactgtaccttcagctacacctttgaggacgttccttttcacagcagctacgctcacagccagagtttggaccgtctcatgaatcctctcatcgaccagtacctgtattacttgagcagaacaaacactccaagcggaaccactacgcagtccaggcttcagttttctcaagccggagcgagtgacattcgggaccagtctaggaactggcttcctggaccctgttaccgccagcagcgagtatcaaagacagctgcggacaacaacaacagtgattactcgtggactggagctaccaagtatcacctcaatggaagagactctctggtgaatccgggcacagccatggccagccacaaggacgatgaagaaaagtattttcctcagagcggggttctcatcttcggaaaacaagactcgggaaaaactaatgtggacattgaaaaggtcatgattacagacgaagaggaaatcaggaccaccaatcccgtggctacggagcagtatggttctgtatctaccaatctccagagcggcaacacacaagcagctacctcagatgtcaacacacaaggcgttcttccaggcatggtctggcaggacagagacgtgtacctgcagggacccatctgggcaaagattccacacacggacggacattttcacccttctcctcttatgggaggatttggaccgaagcaccctcccccgcagattctcatcaagaataccccggtacctgcgaatccttctaccaccttcagcgcggcaaagtttgcttccttcatcacacagtactccacggggcaggtcagcgtggagatcgagtgggagctgcagaaagagaacagcaaacgctggaaccccgagatccagtatacctccaactacaacaagtctgttaatgtggactttactgtggacactaatggcgtgtattcagagcctcgccccattggcacaagatacctgactcgtaatctgtaa

SEQ ID NO: 3448 - DNA, 2208 bp, Artificial Sequence
  Description of Artificial Sequence: Synthetic polynucleotide
atggctgccgatggttatcttccagattggctcgaggacactctctctgaaggaataagacagtggtggaagctcaaacctggcccaccaccgccaaagcccgcagagcggcataaggacgacagcaggggtcttgtgcttcctgggtacaagtacctcggacccttcaacggactcgacaaaggagagccggtcaacgaggcagacgccgcggccctcgagcacgacaaggcctacgaccggcagctcgacagcggagacaacccgtacctcaagtacaaccacgccgacgcggagtttcaggagcgccttaaagaagatacgtcttttgggggcaacctcgcaagagcagtattccaggcgaaaaagagggttcttgaacctctgggcctggttgaggagcctgttaagacggctccgggaaaaaagaggccggtagagcactctcctgcggagctagattcctcctccggaactggaaagtcgggccaacagcctgcaagaaagagattgaattttggtcagactggagacgcagactccgtacctgacccccagcctctcggacagccaccagcagccccctctggtctgggaactaatacgatggcttcaggcagtggcgcaccaatggcagacaataacgagggcgccgacggagtgggtaattcctcgggaaattggcattgcgattccacatggatgggcgacagagtcatcaccaccagcacccgcacctgggctctgcccacctacaacaaccatctgtacaagcaaatttccagccagtctggggccagcaacgacaaccactactttggctacagcaccccttgggggtattttgacttcaacagattccactgccacttctccccacgtgactggcaaagactcatcaacaacaattggggattccggcccaaaagacccaacttcaagctctttaacattcaagtcaaggaggtcacgcagaatgacggtacgacgacgattgccaataaccttaccagcacggttcaggtgtttactgactcggagtaccagctcccgtacgtcctcggctcggcgcatcaaggatgcctcccgccgttcccagcagacgtcttcatggtgccacagtatggatacctcaccctgaacaacgggagtcaggcggtaggacgctcttcattttactgcctggagtactttccttctcagatgctgcgtaccggaaacaactttaccttcagctacacctttgaggacgttccttttcacagcagctacgctcacagccagagtttggaccgtctcatgaatcctctcatcgaccagtacctgtattacttgagcagaacaaacactccaagcggaaccactacgcagtccaggcttcagttttctcaagccggagcgagtgacattcgggaccagtctaggaactggcttcctggaccctgttaccgccagcagcgagtatcaaagacagctgcggacaacaacaacagtgattactcgtggactggagctaccaagtatcacctcaatggaagagactctctggtgaatccgggcacagccatggccagccacaaggacgatgaagaaaagtattttcctcagagcggggttctcatcttcggaaaacaagactcgggaaaaactaatgtggacattgaaaaggtcatgattacagacgaagaggaaatcaggaccaccaatcccgtggctacggagcagtatggttctgtatctaccaatctccagagcggcaacacacaagcagctacctcagatgtcaacacacaaggcgttcttccaggcatggtctggcaggacagagacgtgtacctgcagggacccatctgggcaaagattccacacacggacggacattttcacccttctcctcttatgggaggatttggaccgaagcaccctcccccgcagattctcatcaagaataccccggtacctgcgaatccttctaccaccttcagcgcggcaaagtttgcttccttcatcacacagtactccacggggcaggtcagcgtggagatcgagtgggagctgcagaaagagaacagcaaacgctggaaccccgagatccagtatacctccaactacaacaagtctgttaatgtggactttactgtggacactaatggcgtgtattcagagcctcgccccattggcacaagatacctgactcgtaatctgtaa

SEQ ID NO: 3449 - DNA, 2208 bp, Artificial Sequence
  Description of Artificial Sequence: Synthetic polynucleotide
atggctgccgatggttatcttccagattggctcgaggacactctctctgaaggaataagacagtggtggaagctcaaacctggcccaccaccgccaaagcccgcagagcggcataaggacgacagcaggggtcttgtgcttcctgggtacaagtacctcggacccttcaacggactcgacaaaggagagccggtcaacgaggcagacgccgcggccctcgagcacgacaaggcctacgaccggcagctcgacagcggagacaacccgtacctcaagtacaaccacgccgacgcggagtttcaggagcgccttaaagaagatacgtcttttgggggcaacctcgcaagagcagtattccaggcgaaaaagagggttcttgaacctctgggcctggttgaggagcctgttaagacggctccgggaaaaaagaggccggtagagcactctcctgcggagctagattcctcctccggaactggaaagtcgggccaacagcctgcaagaaagagattgaattttggtcagactggagacgcagactccgtacctgacccccagcctctcggacagccaccagcagccccctctggtctgggaactaatacgatggcttcaggcagtggcgcaccaatggcaggcaataacgagggcgccgacggagtgggtaattcctcgggaaattggcattgcgattccacatggatgggcgacagagtcatcaccaccagcacccgcacctgggctctgcccacctacaacaaccatctgtacaagcaaatttccagccagtctggggccagcaacgacaaccactactttggctacagcaccccttgggggtattttgacttcaacagattccactgccacttctccccacgtgactggcaaagactcatcaacaacaattggggattccggcccaaaagactcaacttcaagctctttaacattcaagtcaaggaggtcacgcagaatgacggtacgacgacgattgccaataaccttaccagcacggttcaggtgtttactgactcggagtaccagctcccgtacgtcctcggctcggcgcatcaaggatgcctcccgccgttcccagcagacgtcttcatggtgccacagtatggatacctcaccctgaacaacgggagtcaggcggtaggacgctcttcattttactgcctggagtactttccttctcagatgctgcgtaccggaaacaactttaccttcagctacacctttgaggacgttccttttcacagcagctacgctcacagccagagtttggaccgtctcatgaatcctctcatcgaccagtacctgtattacttgagcagaacaaacactccaagcggaaccactacgcagtccaggcttcagttttctcaagccggagcgagtgacattcgggaccagtctaggaactggcttcctggaccctgttaccgccagcagcgagtatcaaagacagctgcggacaacaacaacagtgattactcgtggactggagctaccaagtatcacctcaatggaagagactctctggtgaatccgggcacagccatggccagccacaaggacgatgaagaaaagtattttcctcagagcggggttctcatcttcggaaaacaagactcgggaaaaactaatgtggacattgaaaaggtcatgattacagacgaagaggaaatcaggaccaccaatcccgtggctacggagcagtatggttctgtatctaccaatctccagagcggcaacacacaagcagctacctcagatgtcaacacacaaggcgttcttccaggcatggtctggcaggacagagacgtgtacctgcagggacccatctgggcaaagattccacacacggacggacattttcacccttctcctcttatgggaggatttggaccgaagcaccctcccccgcagattctcatcaagaataccccggtacctgcgaatccttctaccaccttcagcgcggcaaagtttgcttccttcatcacacagtactccacggggcaggtcagcgtggagatcgagtgggagctgcagaaagagaacagcaaacgctggaaccccgagatccagtatacctccaactacaacaagtctgttaatgtggactttactgtggacactaatggcgtgtattcagagcctcgccccattggcacaagatacctgactcgtaatctgtaa

SEQ ID NO: 3450 - DNA, 2208 bp, Artificial Sequence
  Description of Artificial Sequence: Synthetic polynucleotide
atggctgccgatggttatcttccagattggctcgaggacactctctctgaaggaataagacagtggtggaagctcaaacctggcccaccaccgccaaagcccgcagagcggcataaggacgacagcaggggtcttgtgcttcctgggtacaagtacctcggacccttcaacggactcgacaaaggagagccggtcaacgaggcagacgccgcggccctcgagcacgacaaggcctacgaccggcagctcgacagcggagacaacccgtacctcaagtacaaccacgccgacgcggagtttcaggagcgccttaaagaagatacgccttttgggggcaacctcgcaagagcagtattccaggcgaaaaagagggttcttgaacctctgggcctggttgaggagcctgttaagacggctccgggaaaaaagaggccggtagagcactctcctgcggagctagattcctcctccggaactggaaagtcgggccaacagcctgcaagaaagagattgaattttggtcagactggagacgcagactccgtacctgacccccagcctctcggacagccaccagcagccccctctggtctgggaactaatacgatggcttcaggcagtggcgcaccaatggcagacaataacgagggcgccgacggagtgggtaattcctcgggaaattggcattgcgattccacatggatgggcgacagagtcatcaccaccagcacccgcacctgggctctgcccacctacaacaaccatctgtacaagcaaatttccagccagtctggggccagcaacgacaaccactactttggctacagcaccccttgggggtattttgacttcaacagattccactgccacttctccccacgtgactggcaaagactcatcaacaacaattggggattccggcccaaaagactcaacttcaagctctttaacattcaagtcaaggaggtcacgcagaatgacggtacgacgacgattgccaataaccttaccagcacggttcaggtgtttactgactcggagtaccagctcccgtacgtcctcggctcggcgcatcaaggatgcctcccgccgttcccagcagacgtcttcatggtgccacagtatggatacctcaccctgaacaacgggagtcaggcggtaggacgctcttcattttactgcctggagtactttccttctcagatgctgcgtaccggaaacaactttaccttcagctacacctttgaggacgttccttttcacagcagctacgctcacagccagagtttggaccgtctcatgaatcctctcatcgaccagtacctgtattacttgagcagaacaaacactccaagcggaaccactacgcagtccaggcttcagttttctcaagccggagcgagtgacattcgggaccagtctaggaactggcttcctggaccctgttaccgccagcagcgagtatcaaagacagctgcggacaacaacaacagtgattactcgtggactggagctaccaagtatcacctcaatggaagagactctctggtgaatccgggcacagccatggccagccacaaggacgatgaagaaaagtattttcctcagagcggggttctcatcttcggaaaacaagactcgggaaaaactaatgtggacattgaaaaggtcatgattacagacgaagaggaaatcaggaccaccaatcccgtggctacggagcagtatggttctgtatctaccaatctccagagcggcaacacacaagcagctacctcagatgtcaacacacaaggcgttcttccaggcatggtctggcaggacagagacgtgtacctgcagggacccatctgggcaaagattccacacacggacggacattttcacccttctcctcttatgggaggatttggaccgaagcaccctcccccgcagattctcatcaagaataccccggtacctgcgaatccttctaccaccttcagcgcggcaaagtttgcttccttcatcacacagtactccacggggcaggtcagcgtggagatcgagtgggagctgcagaaagagaacagcaaacgctggaaccccgagatccagtatacctccaactacaacaagtctgttaatgtggactttactatggacactaatggcgtgtattcagagcctcgccccattggcacaagatacctgactcgtaatctgtaa

SEQ ID NO: 3451 - DNA, 2208 bp, Artificial Sequence
  Description of Artificial Sequence: Synthetic polynucleotide
atggctgccgatggttatcttccagattggctcgaggacactctctctgaaggaataagacagtggtggaagctcaaacctggcccaccaccgccaaagcccgcagagcggcataaggacgacagcaggggtcttgtgcttcctgggtacaagtacctcggacccttcaacggactcgacaaaggagagccggtcaacgaggcagacgccgcggccctcgagcacgacaaggcctacgaccggcagctcgacagcggagacaacccgtacctcaagtacaaccacgccgacgcggagtttcaggagcgccttaaagaagatacgtcttttgggggcaacctcgcaagagcagtattccaggcgaaaaagagggttcttgaacctctgggcctggttgaggagcctgttaagacggctccgggaaaaaagaggccggtagagcactctcctgcggagctagattcctcctccggaactggaaagtcgggccaacagcctgcaagaaagagattgaattttggtcagactggagacgcagactccgtacctgacccccagcctctcggacagccaccagcagccccctctggtctgggaactaatacgatggcttcaggcagtggcgcaccaatggcagacaataacgagggcgccgacggagtgggtaattcctcgggaaattggcattgcgattccacatggatgggcgacagagtcatcaccaccagcacccgcacctgggctctgcccacctacaacaaccatctgtacaagcaaatttccagccagtctggggccagcaacgacaaccactactttggctacagcaccccttgggggtattttgacttcaacagattccactgccacttctccccacgtgactggcaaagactcatcaacaacaattggggattccggcccaaaagactcaacttcaagctctttaacattcaagtcaaggaggtcacgcagaatgacggtacgacgacgattgccaataaccttaccagcacggttcaggtgtttactgactcggagtaccagctcccgtacgtcctcggctcggcgcatcaaggatgcctcccgccgttcccagcagacgtcttcatggtgccacagtatggatacctcaccctgaacaacgggagtcaggcggtaggacgctcttcattttactgcctggagtactttccttctcagatgctgcgtaccggaaacaactttaccttcagctacacctttgaggacgttccttttcacagcagctacgctcacagccagagtttggaccgtctcatgaatcctctcatcgaccagtacctgtattacttgagcagaacaaacactccaagcggaaccactacgcagcccaggcttcagttttctcaagccggagcgagtgacattcgggaccagtctaggaactggcttcctggaccctgttaccgccagcagcgagtatcaaagacagctgcggacaacaacaacagtgattactcgtggactggagctaccaagtatcacctcaatggaagagactctctggtgaatccgggcacagccatggccagccacaaggacgatgaagaaaagtattttcctcagagcggggttctcatcttcggaaaacaagactcgggaaaaactaatgtggacattgaaaaggtcatgattacagacgaagaggaaatcaggaccaccaatcccgtggctacggagcagtatggttctgtatctaccaatctccagagcggcaacacacaagcagctacctcagatgtcaacacacaaggcgttcttccaggcatggtctggcaggacagagacgtgtacctgcagggacccatctgggcaaagattccacacacggacggacattttcacccttctcctcttatgggaggatttggaccgaagcaccctcccccgcagattctcatcaagaataccccggtacctgcgaatccttctaccaccttcagcgcggcaaagtttgcttccttcatcacacagtactccacggggcaggtcagcgtggagatcgagtgggagctgcagaaagagaacagcaaacgctggaaccccgagatccagtatacctccaactacaacaagtctgttaatgtggactttactgtggacactaatggcgtgtattcagagcctcgccccattggcacaagatacctgactcgtaatctgtaa

SEQ ID NO: 3452 - DNA, 2208 bp, Artificial Sequence
  Description of Artificial Sequence: Synthetic polynucleotide
atggctgccgatggttatcttccagattggctcgaggacactctctctgaaggaataagacagtggtggaagctcaaacctggcccaccaccgccaaagcccgcagagcggcataaggacgacagcaggggtcttgtgcttcctgggtacaagtacctcggacccttcaacggactcgacaaaggagagccggtcaacgaggcagacgccgcggccctcgagcacgacaaggcctacgaccggcagctcgacagcggagacaacccgtacctcaagtacaaccacgccgacgcggagtttcaggagcgccttaaagaagatacgtcttttgggggcaacctcgcaagagcagtattccaggcgaaaaagagggttcttgaacctctgggcctggttgaggagcctgttaagacggctccgggaaaaaagaggccggtagagcactctcctgcggagctagattcctcctccggaactggaaagtcgggccaacagcctgcaagaaagagattgaattttggtcagactggagacgcagactccgtacctgacccccagcctctcggacagccaccagcagccccctctggtctgggaactaatacgatggcttcaggcagtggcgcaccaatggcagacaataacgagggcgccgacggagtgggtaattcctcgggaaattggcattgcgattccacatggatgggcgacagagtcatcaccaccagcacccgcacctgggctctgcccacctacaacaaccatctgtacaagcaaatttccagccagtctggggccagcaacgacaaccactactttggctacagcaccccttgggggtattttgacttcaacagattccactgccacttctccccacgtgactggcaaagactcatcaacaacaattggggattccggcccaaaagactcaacttcaagctctttaacattcaagtcaaggaggtcacgcagaatgacggtacgacgacgattgccaataaccttaccagcacggttcaggtgtttactgactcggagtaccagctcccgtacgtcctcggctcggcgcatcaaggatgcctcccgccgttcccagcagacgtcttcatggtgccacagtatggatacctcaccctgaacaacgggagtcaggcggtaggacgctcttcattttactgcctggagtactttccttctcagatgctgcgtaccggaaacaactttaccttcagctacacctttgaggacgttccttttcacagcagctacgctcacagccagagtttggaccgtctcatgaatcctctcatcgaccagtacctgtattacttgagcagaacaaacactccaagcggaaccactacgcagtccaggcttcagttttctcaagccggagcgagtgacattcgggaccagtctaggaactggcttcctggaccctgttaccgccagcagcgagtatcaaagacagctgcggacaacaacaacagtgattactcgtggactggagctaccaagcatcacctcaatggaagagactctctggtgaatccgggcacagccatggccagccacaaggacgatgaagaaaagtattttcctcagagcggggttctcatcttcggaaaacaagactcgggaaaaactaatgtggacattgaaaaggtcatgattacagacgaagaggaaatcaggaccaccaatcccgtggctacggagcagtatggttctgtatctaccaatctccagagcggcaacacacaagcagctacctcagatgtcaacacacaaggcgttcttccaggcatggtctggcaggacagagacgtgtacctgcagggacccatctgggcaaagattccacacacggacggacatttccacccttctcctcttatgggaggatttggaccgaagcaccctcccccgcagattctcatcaagaataccccggtacctgcgaatccttctaccaccttcagcgcggcaaagtttgcttccttcatcacacagtactccacggggcaggtcagcgtggagatcgagtgggagctgcagaaagagaacagcaaacgctggaaccccgagatccagtatacctccaactacaacaagtctgttaatgtggactttactgtggacactaatggcgtgtattcagagcctcgccccattggcacaagatacctgactcgtaatctgtaa

SEQ ID NO: 3453 - DNA, 2208 bp, Artificial Sequence
  Description of Artificial Sequence: Synthetic polynucleotide
atggctgccgatggttatcttccagattggctcgaggacactctctctgaaggaataagacagtggtggaagctcaaacctggcccaccaccgccaaagcccgcagagcggcataaggacgacagcaggggtcttgtgcttcctgggtacaagtacctcggacccttcaacggactcgacaaaggagagccggtcaacgaggcagacgccgcggccctcgagcacgacaaggcctacgaccggcagctcgacagcggagacaacccgtacctcaagtacaaccacgccgacgcggagtttcaggagcgccttaaagaagatacgtcttttgggggcaacctcgcaagagcagtattccaggcgaaaaagagggttcttgaacctctgggcctggttgaggagcctgttaagacggctccgggaaaaaagaggccggtagagcactctcctgcggagctagattcctcctccggaactggaaagtcgggccaacagcctgcaagaaagagattgaattttggtcagactggagacgcagactccgtacctgacccccagcctctcggacagccaccagcagccccctctggtctgggaactaatacgatggcttcaggcagtggcgcaccaatggcagacaataacgagggcgccgacggagtgggtaattcctcgggaaattggcattgcgattccacatggatgggcgacagagtcatcaccaccagcacccgcacctgggctctgcccacctacaacaaccatctgtacaagcaaatttccagccagtctggggccagcaacgacaaccactactttggctacagcaccccttgggggtattttgacctcaacagattccactgccacttctccccacgtgactggcaaagactcatcaacaacaattggggattccggcccaaaagactcaacttcaagctctttaacattcaagtcaaggaggtcacgcagaatgacggtacgacgacgattgccaataaccttaccagcacggttcaggtgtttactgactcggagtaccagctcccgtacgtcctcggctcggcgcatcaaggatgcctcccgccgttcccagcagacgtcttcatggtgccacagtatggatacctcaccctgaacaacgggagtcaggcggtaggacgctcttcattttactgcctggagtactttccttctcagatgctgcgtaccggaaacaactttaccttcagctacacctttgaggacgttccttttcacagcagctacgctcacagccagagtttggaccgtctcatgaatcctctcatcgaccagtacctgtattacttgagcagaacaaacactccaagcggaaccactacgcagtccaggcttcagttttctcaagccggagcgagtgacattcgggaccagtctaggaactggcttcctggaccctgttaccgccagcagcgagtatcaaagacagctgcggacaacaacaacagtgattactcgtggactggagctaccaagtatcacctcaatggaagagactctctggtgaatccgggcacagccatggccagccacaaggacgatgaagaaaagtattttcctcagagcggggttctcatcttcggaaaacaagactcgggaaaaactaatgtggacattgaaaaggtcatgattacagacgaagaggaaatcaggaccaccaatcccgtggctacggagcagtatggttctgtatctaccaatctccagagcggcaacacacaagcagctacctcagatgtcaacacacaaggcgttcttccaggcatggtctggcaggacagagacgtgtacctgcagggacccatctgggcaaagattccacacacggacggacattttcacccttctcctcttatgggaggatttggaccgaagcaccctcccccgcagattctcatcaagaataccccggtacctgcgaatccttctaccaccttcagcgcggcaaagtttgcttccttcatcacacagtactccacggggcaggtcagcgtggagatcgagtgggagctgcagaaagagaacagcaaacgctggaaccccgagatccagtatacctccaactacaacaagtctgttaatgtggactttactgtggacactaatggcgtgtattcagagcctcgccccattggcacaagatacctgactcgtaatctgtaa

SEQ ID NO: 3454 - DNA, 2208 bp, Artificial Sequence
  Description of Artificial Sequence: Synthetic polynucleotide
atggctgccgatggttatcttccagattggctcgaggacactctctctgaaggaataagacagtggtggaagctcaaacctggcccaccaccgccaaagcccgcagagcggcataaggacgacagcaggggtcttgtgcttcctgggtacaagtacctcggacccctcaacggactcgacaaaggagagccggtcaacgaggcagacgccgcggccctcgagcacgacaaggcctacgaccggcagctcgacagcggagacaacccgtacctcaagtacaaccacgccgacgcggagtttcaggagcgccttaaagaagatacgtcttttgggggcaacctcgcaagagcagtattccaggcgaaaaagagggttcttgaacctctgggcctggttgaggagcctgttaagacggctccgggaaaaaagaggccggtagagcactctcctgcggagctagattcctcctccggaactggaaagtcgggccaacagcctgcaagaaagagattgaattttggtcagactggagacgcagactccgtacctgacccccagcctctcggacagccaccagcagccccctctggtctgggaactaatacgatggcttcaggcagtggcgcaccaatggcagacaataacgagggcgccgacggagtgggtaattcctcgggaaattggcattgcgattccacatggatgggcgacagagtcatcaccaccagcacccgcacctgggctctgcccacctacaacaaccatctgtacaagcaaatttccagccagtctggggccagcaacgacaaccactactttggctacagcaccccttgggggtattttgacttcaacagattccactgccacttctccccacgtgactggcaaagactcatcaacaacaattggggattccggcccaaaagactcaacttcaagctctttaacattcaagtcaaggaggtcacgcagaatgacggtacgacgacgattgccaataaccttaccagcacggttcaggtgtttactgactcggagtaccagctcccgtacgtcctcggctcggcgcatcaaggatgcctcccgccgttcccagcagacgtcttcatggtgccacagtatggatacctcaccctgaacaacgggagtcaggcggtaggacgctcttcattttactgcctggagtactttccttctcagatgctgcgtaccggaaacaactttaccttcagctacacctttgaggacgttccttttcacagcagctacgctcacagccagagtttggaccgtctcatgaatcctctcatcgaccagtacctgtattacttgagcagaacaaacactccaagcggaaccactacgcagtccaggcttcagttttctcaagccggagcgagtgacattcgggaccagtctaggaactggcttcctggaccctgttaccgccagcagcgagtatcaaagacagctgcggacaacaacaacagtgattactcgtggactggagctaccaagtatcacctcaatggaagagactctctggtgaatccgggcacagccatggccagccacaaggacgatgaagaaaagtattttcctcagagcggggttctcatcttcggaaaacaagactcgggaaaaactaatgtggacattgaaaaggtcatgattacagacgaagaggaaatcaggaccaccaatcccgtggctacggagcagtatggttctgtatctaccaatctccagagcggcaacacacaagcagctacctcagatgtcaacacacaaggcgttcttccaggcatggtctggcaggacagagacgtgtacctgcagggacccatctgggcaaagattccacacacggacggacattttcacccttctcctcttatgggaggatttggaccgaagcaccctcccccgcagattctcatcaagaataccccggtacctgcgaatccttctaccaccttcagcgcggcaaagtttgcttccttcatcacacagtactccacggggcaggtcagcgtggagatcgagtgggagctgcagaaagagaacagcaaacgctggaaccccgagatccagtatacctccaactacaacaagtctgttaatgtggactttactgtggacactaatggcgtgtattcagagcctcgccccattggcacaagatacctgactcgtaatctgtaa

SEQ ID NO: 3455 - DNA, 2208 bp, Artificial Sequence
  Description of Artificial Sequence: Synthetic polynucleotide
atggctgccgatggttatcttccagattggctcgaggacactctctctgaaggaataagacagtggtggaagctcaaacctggcccaccaccgccaaagcccgcagagcggcataaggacgacagcaggggtcttgtgcttcctgggtacaagtacctcggacccttcaacggactcgacaaaggagagccggtcaacgaggcagacgccgcggccctcgagcacgacaaggcctacgaccggcagctcgacagcggagacaacccgtacctcaagtacaaccacgccgacgcggagtttcaggagcgccttaaagaagatacgtcttttgggggcaacctcgcaagagcagtattccaggcgaaaaagagggttcttgaacctctgggcctggttgaggagcctgttaagacggctccgggaaaaaagaggccggtagagcactctcctgcggagctagattcctcctccggaactggaaagtcgggccaacagcctgcaagaaagagattgaattttggtcagactggagacgcagactccgtacctgacccccagcctctcggacagccaccagcagccccctctggtctgggaactaatacgatggcttcaggcagtggcgcaccaatggcagacaataacgagggcgccgacggagtgggtaattcctcgggaaattggcattgcgattccacatggatgggcgacagagtcatcaccaccagcacccgcacctgggctctgcccacctacaacaaccatctgtacaagcaaatttccagccagtctggggccagcaacgacaaccactactttggctacagcaccccttgggggtattttgacttcaacagattccactgccacttctccccacgtgactggcaaagactcatcaacaacaattggggattccggcccaaaagactcaacttcaagctctttaacattcaagtcaaggaggtcacgcagaatgacggtacgacgacgattgccaataaccttaccagcacggttcaggtgtttactgactcggagtaccagctcccgtacgtcctcggctcggcgcatcaaggatgcctcccgccgttcccagcagacgtcttcatggtgccacagtatggatacctcaccctgaacaacgggagtcaggcggtaggacgctcttcattttactgcctggagtactttccttctcagatgctgcgtaccggaaacaactttaccttcagctacacctttgaggacgttccttttcacagcagctacgctcacagccagagtttggaccgtctcatgaatcctctcatcgaccagtacctgtattacttgagcagaacaaacactccaagcggaaccactacgcagtccaggcttcagttttctcaagccggagcgagtgacattcgggaccagtctaggaactggcttcctggaccctgttaccgccagcagcgagtatcaaagacagctgcggacaacaacaacagtgattactcgtggactggagctaccaagtatcacctcaatggaagagactctctggtgaatccgggcacagccatggccagccacaaggacgatgaagaaaagtattttcctcagagcggggttctcatcttcggaaaacaagactcgggaaaaactaatgtggacattgaaaaggtcatgattacagacgaagaggaaatcaggaccaccaatcccgtggctacggagcagtatggttctgtatctaccaatctccagagcggcaacacacaagcagctacctcagatgtcaacacacaaggcgttcttccaggcatggtctggcaggacagagacgtgtacctgcagggacccatctgggcaaagattccacacacggacggacattttcacccttctcctcttatgggaggatttggaccgaagcaccctcccccgcagattctcatcaagaataccccggtacctgcgaatccttctaccaccttcagcgcggcaaagtttgcttccttcatcacacagtactccacggggcaggtcagcgtggagatcgagtgggagctgcagaaagagaacagcaaacgctggaaccccgagatccagtatacctccaactacaacaagtctgttaatgtggactttactgtggacactaatggcgtgtattcagagcctcgccccattggcacaagatacctggctcgtaatctgtaa

SEQ ID NO: 3456 - DNA, 2208 bp, Artificial Sequence
  Description of Artificial Sequence: Synthetic polynucleotide
atggctgccgatggttatcttccagattggctcgaggacactctctctgaaggaataagacagtggtggaagctcaaacctggcccaccaccgccaaagcccgcagagcggcataaggacgacagcaggggtcttgtgcttcctgggtacaagtacctcggacccttcaacggactcgacaaaggagagccggtcaacgaggcagacgccgcggccctcgagcacgacaaggcctacgaccggcagctcgacagcggagacaacccgtacctcaagtacaaccacgccgacgcggagtttcaggagcgccttaaagaagatacgtcttttgggggcaacctcgcaagagcagtattccaggcgaaaaagagggttcttgaacctctgggcctggttgaggagcctgttaagacggctccgggaaaaaagaggccggtagagcactctcctgcggagctagattcctcctccggaactggaaagtcgggccaacagcctgcaagaaagagattgaattttggtcagactggagacgcagactccgtacctgacccccagcctctcggacagccaccagcagccccctctggtctgggaactaatacgatggcttcaggcagtggcgcaccaatggcagacaataacgagggcgccgacggagtgggtaattcctcgggaaattggcattgcgattccacatggatgggcgacagagtcatcaccaccagcacccgcacctgggctctgcccacctacaacaaccatctgtacaagcaaatttccagccagtctggggccagcaacgacaaccactactttggctacagcaccccttgggggtattttgacttcaacagattccactgccacttctccccacgtgactggcaaagactcatcaacaacaattggggattccggcccaaaagactcaacttcaagctctttaacattcaagtcaaggaggtcacgcagaatgacggtacgacgacgattgccaataaccttaccagcacggttcaggtgtttactgactcggagtaccagctcccgtacgtcctcggctcggcgcatcaaggatgcctcccgccgttcccagcagacgtcttcatggtgccacagtatggatacctcaccctgaacaacgggagtcaggcggtaggacgctcttcattttactgcctggagtactttccttctcagatgctgcgtaccggaaacaactttaccctcagctacacctttgaggacgttccttttcacagcagctacgctcacagccagagtttggaccgtctcatgaatcctctcatcgaccagtacctgtattacttgagcagaacaaacactccaagcggaaccactacgcagtccaggcttcagttttctcaagccggagcgagtgacattcgggaccagtctaggaactggcttcctggaccctgttaccgccagcagcgagtatcaaagacagctgcggacaacaacaacagtgattactcgtggactggagctaccaagtatcacctcaatggaagagactctctggtgaatccgggcacagccatggccagccacaaggacgatgaagaaaagtattttcctcagagcggggttctcatcttcggaaaacaagactcgggaaaaactaatgtggacattgaaaaggtcatgattacagacgaagaggaaatcaggaccaccaatcccgtggctacggagcagtatggttctgtatctaccaatctccagagcggcaacacacaagcagctacctcagatgtcaacacacaaggcgttcttccaggcatggtctggcaggacagagacgtgtacctgcagggacccatctgggcaaagattccacacacggacggacattttcacccttctcctcttatgggaggatttggaccgaagcaccctcccccgcagattctcatcaagaataccccggtacctgcgaatccttctaccaccttcagcgcggcaaagtttgcttccttcatcacacagtactccacggggcaggtcagcgtggagatcgagtgggagctgcagaaagagaacagcaaacgctggaaccccgagatccagtatacctccaactacaacaagtctgttaatgtggactttactgtggacactaatggcgtgtattcagagcctcgccccattggcacaagatacctgactcgtaatctgtaa

SEQ ID NO: 3457 - DNA, 2208 bp, Artificial Sequence
  Description of Artificial Sequence: Synthetic polynucleotide
atggctgccgatggttatcttccagattggctcgaggacactctctctgaaggaataagacagtggtggaagctcaaacctggcccaccaccgccaaagcccgcagagcggcataaggacgacagcaggggtcttgtgcttcctgggtacaagtacctcggacccttcaacggactcgacaaaggagagccggtcaacgaggcagacgccgcggccctcgagcacgacaaggcctacgaccggcagctcgacagcggagacaacccgtacctcaagtacaaccacgccgacgcggagtttcaggagcgccttaaagaagatacgtcttttgggggcaacctcgcaagagcagtattccaggcgaaaaagagggttcttgaacctctgggcctggttgaggagcctgttaagacggctccgggaaaaaagaggccggtagagcactctcctgcggagctagattcctcctccggaactggaaagtcgggccaacagcctgcaagaaagagattgaattttggtcagactggagacgcagactccgtacctgacccccagcctctcggacagccaccagcagccccctctggtctgggaactaatacgatggcttcaggcagtggcgcaccaatggcagacaataacgagggcgccgacggagtgggtaattcctcgggaaattggcattgcgattccacatggatgggcgacagagtcatcaccaccagcacccgcacctgggctctgcccacctacaacaaccatctgtacaagcaaatttccagccagtctggggccagcaacgacaaccactactttggctacagcaccccttgggggtattttgacttcaacagattccactgccacttctccccacgtgactggcaaagactcatcaacaacaattggggattccggcccaaaagactcaacttcaagctctttaacattcaagtcaaggaggtcacgcagaatgacggtacgacgacgattgccaataaccttaccagcacggttcaggtgtttactgactcggagtaccagctcccgtacgtcctcggctcggcgcatcaaggatgcctcccgccgttcccagcagacgtcttcatggtgccacagtatggatacctcaccctgaacaacgggagtcaggcggtaggacgctcttcattttactgcctggagtactttccttctcagatgctgcgtaccggaaacaactttaccttcagctacacctttgaggacgttccttttcacagcagctacgctcacagccagagtttggaccgtctcatgaatcctctcatcgaccagtacctgtattacttgagcagaacaaacactccaagcggaaccactacgcagtccaggcttcagttttctcaagccggagcgagtgacattcgggaccagtctaggaactggcttcctggaccctgttaccgccagcagcgagtatcaaagacagctgcggacaacaacaacagtgattactcgtggactggagctaccaagtatcacctcaatggaagagactctctggtgaatccgggcacagccatggccagccacaaggacgatgaagaaaagtattttcctcagagcggggttctcatcttccggaaacaagactcgggaaaaactaatgtggacattgaaaaggtcatgattacagacgaagaggaaatcaggaccaccaatcccgtggctacggagcagtatggttctgtatctaccaatctccagagcggcaacacacaagcagctacctcagatgtcaacacacaaggcgttcttccaggcatggtctggcaggacagagacgtgtacctgcagggacccatctgggcaaagattccacacacggacggacattttcacccttctcctcttatgggaggatttggaccgaagcaccctcccccgcagattctcatcaagaataccccggtacctgcgaatccttctaccaccttcagcgcggcaaagtttgcttccttcatcacacagtactccacggggcaggtcagcgtggagatcgagtgggagctgcagaaagagaacagcaaacgctggaaccccgagatccagtatacctccaactacaacaagtctgttaatgtggactttactgtggacactaatggcgtgtattcagagcctcgccccattggcacaagatacctgactcgtaatctgtaa

SEQ ID NO: 3458 - DNA, 2208 bp, Artificial Sequence
  Description of Artificial Sequence: Synthetic polynucleotide
atggctgccgatggttatcttccagattggctcgaggacactctctctgaaggaataagacagtggtggaagctcaaacctggcccaccaccgccaaagcccgcagagcggcataaggacgacagcaggggtcttgtgcttcctgggtacaagtacctcggacccttcaacggactcgacaaaggagagccggtcaacgaggcagacgccgcggccctcgagcacgacaaggcctacgaccggcagctcgacagcggagacaacccgtacctcaagtacaaccacgccgacgcggagtttcaggagcgccttaaagaagatacgtcttttgggggcaacctcgcaagagcagtattccaggcgaaaaagagggttcttgaacctctgggcctggttgaggagcctgttaagacggctccgggaaaaaagaggccggtagagcactctcctgcggagctagattcctcctccggaactggaaagtcgggccaacagcctgcaagaaagagattgaattttggtcagactggagacgcagactccgtacctgacccccagcctctcggacagccaccagcagccccctctggtctgggaactaatacgatggcttcaggcagtggcgcaccaatggcagacaataacgagggcgccgacggagtgggtaattcctcgggaaattggcattgcgattccacatggatgggcgacagagtcatcaccaccagcacccgcacctgggctctgcccacctacaacaaccatctgtacaagcaaatttccagccagtctggggccagcaacgacaaccactactttggctacagcaccccttgggggtattttgacttcaacagattccactgccacttctccccacgtgactggcaaagactcatcaacaacaattggggattccggcccaaaagactcaacttcaagctctttaacattcaagtcaaggaggtcacgcagaatgacggtacgacgacgattgccaataaccttaccagcacggttcaggtgtttactgactcggagtaccagctcccgtacgtcctcggctcggcgcatcaaggatgcctcccgccgttcccagcagacgtcttcatggtgccacagtatggatacctcaccctgaacaacgggagtcaggcggtaggacgctcttcattttactgcctggagtactttccttctcagatgctgcgtaccggaaacaactttaccttcagctacacctttgaggacgttccttttcacagcagctacgctcacagccagagtttggaccgtctcatgaatcctctcatcgaccagtacctgtattacttgagcagaacaaacactccaagcggaaccactacgcagtccaggcttcagttttctcaagccggagcgagtgacattcgggaccagtctaggaactggcttcctggaccctgttaccgccagcagcgagtatcaaagacagctgcggacaacaacaacagtgattactcgtggactggagctaccaagtatcacctcaatggaagagactctctggtgaatccgggcacagccatggccagccacaaggacgatgaagaaaagtattttcctcagagcggggttctcatcttcggaaaacgagactcgggaaaaactaatgtggacattgaaaaggtcatgattacagacgaagaggaaatcaggaccaccaatcccgtggctacggagcagtatggttctgtatctaccaatctccagagcggcaacacacaagcagctacctcagatgtcaacacacaaggcgttcttccaggcatggtctggcaggacagagacgtgtacctgcagggacccatctgggcaaagattccacacacggacggacattttcacccttctcctcttatgggaggatttggaccgaagcaccctcccccgcagattctcatcaagaataccccggtacctgcgaatccttctaccaccttcagcgcggcaaagtttgcttccttcatcacacagtactccacggggcaggtcagcgtggagatcgagtgggagctgcagaaagagaacagcaaacgctggaaccccgagatccagtatacctccaactacaacaagtctgttaatgtggactttactgtggacactaatggcgtgtattcagagcctcgccccattggcacaagatacctgactcgtaatctgtaa

SEQ ID NO: 3459 - DNA, 2208 bp, Artificial Sequence
  Description of Artificial Sequence: Synthetic polynucleotide
atggctgccgatggttatcttccagattggctcgaggacactctctctgaaggaataagacagtggtggaagctcaaacctggcccaccaccgccaaagcccgcagagcggcataaggacgacagcaggggtcttgtgcttcctgggtacaagtacctcggacccttcaacggactcgacaaaggagagccggtcaacgaggcagacgccgcggccctcgagcacgacaaggcctacgaccggcagctcgacagcggagacaacccgtacctcaagtacaaccacgccgacgcggagtttcaggagcgccttaaagaagatacgtcttttgggggcaacctcgcaagagcagtattccaggcgaaaaagagggttcttgaacctctgggcctggttgaggagcctgttaagacggctccgggaaaaaagaggccggtagagcactctcctgcggagctagattcctcctccggaactggaaagtcgggccaacagcctgcaagaaagagattgaattttggtcagactggagacgcagactccgtacctgacccccagcctctcggacagccaccagcagccccctctggtctgggaactaatacgatggcttcaggcagtggcgcaccaatggcagacaataacgagggcgccgacggagtgggtaattcctcgggaaattggcattgcgattccacatggatgggcgacagagccatcaccaccagcacccgcacctgggctctgcccacctacaacaaccatctgtacaagcaaatttccagccagtctggggccagcaacgacaaccactactttggctacagcaccccttgggggtattttgacttcaacagattccactgccacttctccccacgtgactggcaaagactcatcaacaacaattggggattccggcccaaaagactcaacttcaagctctttaacattcaagtcaaggaggtcacgcagaatgacggtacgacgacgattgccaataaccttaccagcacggttcaggtgtttactgactcggagtaccagctcccgtacgtcctcggctcggcgcatcaaggatgcctcccgccgttcccagcagacgtcttcatggtgccacagtatggatacctcaccctgaacaacgggagtcaggcggtaggacgctcttcattttactgcctggagtactttccttctcagatgctgcgtaccggaaacaactttaccttcagctacacctttgaggacgttccttttcacagcagctacgctcacagccagagtttggaccgtctcatgaatcctctcatcgaccagtacctgtattacttgagcagaacaaacactccaagcggaaccactacgcagtccaggcttcagttttctcaagccggagcgagtgacattcgggaccagtctaggaactggcttcctggaccctgttaccgccagcagcgagtatcaaagacagctgcggacaacaacaacagtgattactcgtggactggagctaccaagtatcacctcaatggaagagactctctggtgaatccgggcacagccatggccagccacaaggacgatgaagaaaagtattttcctcagagcggggttctcatcttcggaaaacaagactcgggaaaaactaatgtggacattgaaaaggtcatgattacagacgaagaggaaatcaggaccaccaatcccgtggctacggagcagtatggttctgtatctaccaatctccagagcggcaacacacaagcagctacctcagatgtcaacacacaaggcgttcttccaggcatggtctggcaggacagagacgtgtacctgcagggacccatctgggcaaagattccacacacggacggacattttcacccttctcctcttatgggaggatttggaccgaagcaccctcccccgcagattctcatcaagaataccccggtacctgcgaatccttctaccaccttcagcgcggcaaagtttgcttccttcatcacacagtactccacggggcaggtcagcgtggagatcgagtgggagctgcagaaagagaacagcaaacgctggaaccccgagatccagtatacctccaactacaacaagtctgttaatgtggactttactgtggacactaatggcgtgtattcagagcctcgccccattggcacaagatacctgactcgtaatctgtaa

SEQ ID NO: 3460 - DNA, 2208 bp, Artificial Sequence
  Description of Artificial Sequence: Synthetic polynucleotide
atggctgccgatggttatcttccagattggctcgaggacactctctctgaaggaataagacagtggtggaagctcaaacctggcccaccaccgccaaagcccgcagagcggcataaggacgacagcaggggtcttgtgcttcctgggtacaagtacctcggacccttcaacggactcgacaaaggagagccggtcaacgaggcagacgccgcggccctcgagcacgacaaggcctacgaccggcagctcgacagcggagacaacccgtacctcaagtacaaccacgccgacgcggagtttcaggagcgccttaaagaagatacgtcttttgggggcaacctcgcaagagcagtattccaggcgaaaaagagggttcttgaacctctgggcctggttgaggagcctgttaagacggctccgggaaaaaagaggccggtagagcactctcctgcggagctagattcctcctccggaactggaaagtcgggccaacagcctgcaagaaagagattgaattttggtcagactggagacgcagactccgtacctgacccccagcctctcggacagccaccagcagccccctctggtctgggaactaatacgatggcttcaggcagtggcgcaccaatggcagacaataacgagggcgccgacggagtgggtaattcctcgggaaattggcattgcgattccacatggatgggcgacagagtcatcaccaccagcacccgcacctgggctctgcccacctacaacaaccatctgtacaagcaaatttccagccagtctggggccagcaacgacaaccactactttggctacagcaccccttgggggtattttgacttcaacagattccactgccacttctccccacgtgactggcaaagactcatcaacaacaattggggattccggcccaaaagactcaacttcaagctctttaacattcaagtcaaggaggtcacgcagaatgacggtacgacgacgattgccaataaccttaccagcacggttcaggtgtttactgactcggagtaccagctcccgtacgtcctcggctcggcgcatcaaggatgcctcccgccgttcccagcagacgtcttcatggtgccacagtatggatacctcaccctgaacaacgggagtcaggcggtaggacgctcttcattttactgcctggagtactttccttctcagatgctgcgtaccggaaacaactttaccttcagctacacctttgaggacgttccttttcacagcagctacgctcacagccagagtttggaccgtctcatgaatcctctcatcgaccagtacctgtattacttgagcagaacaaacactccaagcggaaccactacgcagtccaggcttcagttttctcaagccggagcgagtgacattcgggaccagtctaggaactggcttcctggaccctgttaccgccagcagcgagtatcaaagacagctgcggacaacaacaacagtgattactcgtggactggagctaccaagtatcacctcaatggaagagactctctggtgaatccgggcacagccatggccagccacaaggacgatgaagaaaagtattttcctcagagcggggttctcatcttcggaaaacaagactcgggaaaaactaatgtggacattgaaaaggtcatgattacagacgaagaggaaatcaggaccaccaatcccgtggctacggagcagtatggttctgtatctaccaatctccagagcggcaacacacaagcagctacctcagatgtcaacacacaaggcgttcttccaggcatggtctggcaggacagagacgtgtacctgcagggacccatctgggcaaagattccacacacggacggacattttcacccttctcctcttatgggaggatttggaccgaagcaccctcccccgcagattctcatcaagaataccccggtacctgcgaatccttctaccaccttcagcgcggcaaagtttgcttacttcatcacacagtactccacggggcaggtcagcgtggagatcgagtgggagctgcagaaagagaacagcaaacgctggaaccccgagatccagtatacctccaactacaacaagtctgttaatgtggactttactgtggacactaatggcgtgtattcagagcctcgccccattggcacaagatacctgactcgtaatctgtaa

SEQ ID NO: 3461 - DNA, 2208 bp, Artificial Sequence
  Description of Artificial Sequence: Synthetic polynucleotide
atggctgccgatggttatcttccagattggctcgaggacactctctctgaaggaataagacagtggtggaagctcaaacctggcccaccaccgccaaagcccgcagagcggcataaggacgacagcaggggtcttgtgcttcctgggtacaagtacctcggacccttcaacggactcgacaaaggagagccggtcaacgaggcagacgccgcggccctcgagcacgacaaggcctacgaccggcagctcgacagcggagacaacccgtacctcaagtacaaccacgccgacgcggagtttcaggagcgccttaaagaagatacgtcttttgggggcaacctcgcaagagcagtattccaggcgaaaaagagggttcttgaacctctgggcctggttgaggagcctgttaagacggctccgggaaaaaagaggccggtagagcactctcctgcggagctagattcctcctccggaactggaaagtcgggccaacagcctgcaagaaagagattgaattttggtcagactggagacgcagactccgtacctgacccccagcctctcggacagccaccagcagccccctctggtctgggaactaatacgatggcttcaggcagtggcgcaccaatggcagacaataacgagggcgccgacggagtgggtaattcctcgggaaattggcattgcgattccacatggatgggcgacagagtcatcaccaccagcacccgcacctgggctctgcccacctacaacaaccatctgtacaagcaaatttccagccagtctggggccagcaacgacaaccactactttggctacagcaccccttgggggtattttggcttcaacagattccactgccacttctccccacgtgactggcaaagactcatcaacaacaattggggattccggcccaaaagactcaacttcaagctctttaacattcaagtcaaggaggtcacgcagaatgacggtacgacgacgattgccaataaccttaccagcacggttcaggtgtttactgactcggagtaccagctcccgtacgtcctcggctcggcgcatcaaggatgcctcccgccgttcccagcagacgtcttcatggtgccacagtatggatacctcaccctgaacaacgggagtcaggcggtaggacgctcttcattttactgcctggagtactttccttctcagatgctgcgtaccggaaacaactttaccttcagctacacctttgaggacgttccttttcacagcagctacgctcacagccagagtttggaccgtctcatgaatcctctcatcgaccagtacctgtattacttgagcagaacaaacactccaagcggaaccactacgcagtccaggcttcagttttctcaagccggagcgagtgacattcgggaccagtctaggaactggcttcctggaccctgttaccgccagcagcgagtatcaaagacagctgcggacaacaacaacagtgattactcgtggactggagctaccaagtatcacctcaatggaagagactctctggtgaatccgggcacagccatggccagccacaaggacgatgaagaaaagtattttcctcagagcggggttctcatcttcggaaaacaagactcgggaaaaactaatgtggacattgaaaaggtcatgattacagacgaagaggaaatcaggaccaccaatcccgtggctacggagcagtatggttctgtatctaccaatctccagagcggcaacacacaagcagctacctcagatgtcaacacacaaggcgttcttccaggcatggtctggcaggacagagacgtgtacctgcagggacccatctgggcaaagattccacacacggacggacattttcacccttctcctcttatgggaggatttggaccgaagcaccctcccccgcagattctcatcaagaataccccggtacctgcgaatccttctaccaccttcagcgcggcaaagtttgcttacttcatcacacagtactccacggggcaggtcagcgtggagatcgagtgggagctgcagaaagagaacagcaaacgctggaaccccgagatccagtatacctccaactacaacaagtctgttaatgtggactttactgtggacactaatggcgtgtattcagagcctcgccccattggcacaagatacctgactcgtaatctgtaa

SEQ ID NO: 3462 - DNA, 2208 bp, Artificial Sequence
  Description of Artificial Sequence: Synthetic polynucleotide
atggctgccgatggttatcttccagattggctcgaggacactctctctgaaggaataagacagtggtggaagctcaaacctggcccaccaccgccaaagcccgcagagcggcataaggacgacagcaggggtcttgtgcttcctgggtacaagtacctcggacccttcaacggactcgacaaaggagagccggtcaacgaggcagacgccgcggccctcgagcacgacaaggcctacgaccggcagctcgacagcggagacaacccgtacctcaagtacaaccacgccgacgcggagtttcaggagcgccttaaagaagatacgtcttttgggggcaacctcgcaagagcagtattccaggcgaaaaagagggttcttgaacctctgggcctggttgaggagcctgttaagacggctccgggaaaaaagaggccggtagagcactctcctgcggagctagattcctcctccggaactggaaagtcgggccaacagcctgcaagaaagagattgaattttggtcagactggagacgcagactccgtacctgacccccagcctctcggacagccaccagcagccccctctggtctgggaactaatacgatggcttcaggcagtggcgcaccaatggcagacaataacgagggcgccgacggagtgggtaattcctcgggaaattggcattgcgattccacatggatgggcgacagagtcatcaccaccagcacccgcacctgggctctgcccacctacaacaaccatctgtacaagcaaatttccagccagtctggggccagcaacgacaaccgctactttggctacagcaccccttgggggtattttgacttcaacagattccactgccacttctccccacgtgactggcaaagactcatcaacaacaattggggattccggcccaaaagactcaacttcaagctctttaacattcaagtcaaggaggtcacgcagaatgacggtacgacgacgattgccaataaccttaccagcacggttcaggtgtttactgactcggagtaccagctcccgtacgtcctcggctcggcgcatcaaggatgcctcccgccgttcccagcagacgtcttcatggtgccacagtatggatacctcaccctgaacaacgggagtcaggcggtaggacgctcttcattttactgcctggagtactttccttctcagatgctgcgtaccggaaacaactttaccttcagctacacctttgaggacgttccttttcacagcagctacgctcacagccagagtttggaccgtctcatgaatcctctcatcgaccagtacctgtattacttgagcagaacaaacactccaagcggaaccactacgcagtccaggcttcagttttctcaagccggagcgagtgacattcgggaccagtctaggaactggcttcctggaccctgttaccgccagcagcgagtatcaaagacagctgcggacaacaacaacagtgattactcgtggactggagctaccaagtatcacctcaatggaagagactctctggtgaatccgggcacagccatggccagccacaaggacgatgaagaaaagtattttcctcagagcggggttctcatcttcggaaaacaagactcgggaaaaactaatgtggacattgaaaaggtcatgattacagacgaagaggaaatcaggaccaccaatcccgtggctacggagcagtatggttctgtatctaccaatctccagagcggcaacacacaagcagctacctcagatgtcaacacacaaggcgttcttccaggcatggtctggcaggacagagacgtgtacctgcagggacccatctgggcaaagattccacacacggacggacattttcacccttctcctcttatgggaggatttggaccgaagcaccctcccccgcagattctcatcaagaataccccggtacctgcgaatccttctaccaccttcagcgcggcaaagtttgcttccttcatcacacagtactccacggggcaggtcagcgtggagatcgagtgggagctgcagaaagagaacagcaaacgctggaaccccgagatccagtatacctccaactacaacaagtctgttaatgtggactttactgtggacactaatggcgtgtattcagagcctcgccccattggcacaagatacctgactcgtaatctgtaa

SEQ ID NO: 3463 - DNA, 2208 bp, Artificial Sequence
  Description of Artificial Sequence: Synthetic polynucleotide
atggctgccgatggttatcttccagattggctcgaggacactctctctgaaggaataagacagtggtggaagctcaaacctggcccaccaccgccaaagcccgcagagcggcataaggacgacagcaggggtcttgtgcttcctgggtacaagtacctcggacccttcaacggactcgacaaaggagagccggtcaacgaggcagacgccgcggccctcgagcacgacaaggcctacgaccggcagctcgacagcggagacaacccgtacctcaagtacaaccacgccgacgcggagtttcaggagcgccttaaagaagatacgccttttgggggcaacctcgcaagagcagtattccaggcgaaaaagagggttcttgaacctctgggcctggttgaggagcctgttaagacggctccgggaaaaaagaggccggtagagcactctcctgcggagctagattcctcctccggaactggaaagtcgggccaacagcctgcaagaaagagattgaattttggtcagactggagacgcagactccgtacctgacccccagcctctcggacagccaccagcagccccctctggtctgggaactaatacgatggcttcaggcagtggcgcaccaatggcagacaataacgagggcgccgacggagtgggtaattcctcgggaaattggcattgcgattccacatggatgggcgacagagtcatcaccaccagcacccgcacctgggctctgcccacctacaacaaccatctgtacaagcaaatttccagccagtctggggccagcaacgacaaccactactttggctacagcaccccttgggggtattttgacttcaacagattccactgccacttctccccacgtgactggcaaagactcatcaacaacaattggggattccggcccaaaagactcaacttcaagctctttaacattcaagtcaaggaggtcacgcagaatgacggtacgacgacgattgccaataaccttaccagcacggttcaggtgtttactgactcggagtaccagctcccgtacgtcctcggctcggcgcatcaaggatgcctcccgccgttcccagcagacgtcttcatggtgccacagtatggatacctcaccctgaacaacgggagtcaggcggtaggacgctcttcattttactgcctggagtactttccttctcagatgctgcgtaccggaaacaactttaccttcagctacacctttgaggacgttccttttcacagcagctacgctcacagccggagtttggaccgtctcatgaatcctctcatcgaccagtacctgtattacttgagcagaacaaacactccaagcggaaccactacgcagtccaggcttcagttttctcaagccggagcgagtgacattcgggaccagtctaggaactggcttcctggaccctgttaccgccagcagcgagtatcaaagacagctgcggacaacaacaacagtgattactcgtggactggagctaccaagtatcacctcaatggaagagactctctggtgaatccgggcacagccatggccagccacaaggacgatgaagaaaagtattttcctcagagcggggttctcatcttcggaaaacaagactcgggaaaaactaatgtggacattgaaaaggtcatgattacagacgaagaggaaatcaggaccaccaatcccgtggctacggagcagtatggttctgtatctaccaatctccagagcggcaacacacaagcagctacctcagatgtcaacacacaaggcgttcttccaggcatggtctggcaggacagagacgtgtacctgcagggacccatctgggcaaagattccacacacggacggacattttcacccttctcctcttatgggaggatttggaccgaagcaccctcccccgcagattctcatcaagaataccccggtacctgcgaatccttctaccaccttcagcgcggcaaagtttgcttccttcatcacacagtactccacggggcaggtcagcgtggagatcgagtgggagctgcagaaagagaacagcaaacgctggaaccccgagatccagtatacctccaactacaacaagtctgttaatgtggactttactgtggacactaatggcgtgtattcagagcctcgccccattggcacaagatacctgactcgtaatctgtaa

SEQ ID NO: 3464 - DNA, 2208 bp, Artificial Sequence
  Description of Artificial Sequence: Synthetic polynucleotide
atggctgccgatggttatcttccagattggctcgaggacactctctctgaaggaataagacagtggtggaagctcaaacctggcccaccaccgccaaagcccgcagagcggcataaggacggcagcaggggtcttgtgcttcctgggtacaagtacctcggacccttcaacggactcgacaaaggagagccggtcaacgaggcagacgccgcggccctcgagcacgacaaggcctacgaccggcagctcgacagcggagacaacccgtacctcaagtacaaccacgccgacgcggagtttcaggagcgccttaaagaagatacgtcttttgggggcaacctcgcaagagcagtattccaggcgaaaaagagggttcttgaacctctgggcctggttgaggagcctgttaagacggctccgggaaaaaagaggccggtagagcactctcctgcggagctagattcctcctccggaactggaaagtcgggccaacagcctgcaagaaagagattgaattttggtcagactggagacgcagactccgtacctgacccccagcctctcggacagccaccagcagccccctctggtctgggaactaatacgatggcttcaggcagtggcgcaccaatggcagacaataacgagggcgccgacggagtgggtaattcctcgggaaattggcattgcgattccacatggatgggcgacagagtcatcaccaccagcacccgcacctgggctctgcccacctacaacaaccatctgtacaagcaaatttccagccagtctggggccagcaacgacaaccactactttggctacagcaccccttgggggtattttgacttcaacagattccactgccacttctccccacgtgactggcaaagactcatcaacaacaattggggattccggcccaaaagactcaacttcaagctctttaacattcaagtcaaggaggtcacgcagaatgacggtacgacgacgattgccaataaccttaccagcacggttcaggtgtttactgactcggagtaccagctcccgtacgtcctcggctcggcgcatcaaggatgcctcccgccgttcccagcagacgtcttcatggtgccacagtatggatacctcaccctgaacaacgggagtcaggcggtaggacgctcttcattttactgcctggagtactttccttctcagatgctgcgtaccggaaacaactttaccttcagctacacctttgaggacgttccttttcacagcagctacgctcacagccagagtttggaccgtctcatgaatcctctcatcgaccagtacctgtattacttgagcagaacaaacactccaagcggaaccactacgcagtccaggcttcagttttctcaagccggagcgagtgacattcgggaccagtctaggaactggcttcctggaccctgttaccgccagcagcgagtatcaaagacagctgcggacaacaacaacagtgattactcgtggactggagctaccaagtatcacctcaatggaagagactctctggtgaatccgggcacagccatggccagccacaaggacgatgaagaaaagtattttcctcagagcggggttctcatcttcggaaaacaagactcgggaaaaactaatgtggacattgaaaaggtcatgattacagacgaagaggaaatcaggaccaccaatcccgtggctacggagcagtatggttctgtatctaccaatctccagagcggcaacacacaagcagctacctcagatgtcaacacacaaggcgttcttccaggcatggtctggcaggacagagacgtgtacctgcagggacccatctgggcaaagattccacacacggacggacattttcacccttctcctcttatgggaggatttggaccgaagcaccctcccccgcagattctcatcaagaataccccggtacctgcgaatccttctaccaccttcagcgcggcaaagtttgcttccttcatcacacagtactccacggggcaggtcagcgtggagatcgagtgggagctgcagaaagagaacagcaaacgctggaaccccgagatccagtatacctccaactacaacaagtctgttaatgtggactttactgtggacactaatggcgtgtattcagagcctcgccccattggcacaagatacctgactcgtaatctgtaa

SEQ ID NO: 3465 - DNA, 2208 bp, Artificial Sequence
  Description of Artificial Sequence: Synthetic polynucleotide
atggctgccgatggttatcttccagattggctcgaggacactctctctgaaggaataagacagtggtggaagctcaaacctggcccaccaccgccaaagcccgcagagcggcataaggacgacagcaggggtcttgtgcttcctgggtacaagtacctcggacccttcaacggactcgacaaaggagagccggtcaacgaggcagacgccgcggccctcgagcacgacaaggcctacgaccggcagctcgacagcggagacaacccgtacctcaagtacaaccacgccgacgcggggtttcaggagcgccttaaagaagatacgtcttttgggggcaacctcgcaagagcagtattccaggcgaaaaagagggttcttgaacctctgggcctggttgaggagcctgttaagacggctccgggaaaaaagaggccggtagagcactctcctgcggagctagattcctcctccggaactggaaagtcgggccaacagcctgcaagaaagagattgaattttggtcagactggagacgcagactccgtacctgacccccagcctctcggacagccaccagcagccccctctggtctgggaactaatacgatggcttcaggcagtggcgcaccaatggcagacaataacgagggcgccgacggagtgggtaattcctcgggaaattggcattgcgattccacatggatgggcgacagagtcatcaccaccagcacccgcacctgggctctgcccacctacaacaaccatctgtacaagcaaatttccagccagtctggggccagcaacgacaaccactactttggctacagcaccccttgggggtattttgacttcaacagattccactgccacttctccccacgtgactggcaaagactcatcaacaacaattggggattccggcccaaaagactcaacttcaagctctttaacattcaagtcaaggaggtcacgcagaatgacggtacgacgacgattgccaataaccttaccagcacggttcaggtgtttactgactcggagtaccagctcccgtacgtcctcggctcggcgcatcaaggatgcctcccgccgttcccagcagacgtcttcatggtgccacagtatggatacctcaccctgaacaacgggagtcaggcggtaggacgctcttcattttactgcctggagtactttccttctcagatgctgcgtaccggaaacaactttaccttcagctacacctttgaggacgttccttttcacagcagctacgctcacagccagagtttggaccgtctcatgaatcctctcatcgaccagtacctgtattacttgagcagaacaaacactccaagcggaaccactacgcagtccaggcttcagttttctcaagccggagcgagtgacattcgggaccagtctaggaactggcttcctggaccctgttaccgccagcagcgagtatcaaagacagctgcggacaacaacaacagtgattactcgtggactggagctaccaagtatcacctcaatggaagagactctctggtgaatccgggcacagccatggccagccacaaggacgatgaagaaaagtattttcctcagagcggggttctcatcttcggaaaacaagactcgggaaaaactaatgtggacattgaaaaggtcatgattacagacgaagaggaaatcaggaccaccaatcccgtggctacggagcagtatggttctgtatctaccaatctccagagcggcaacacacaagcagctacctcagatgtcaacacacaaggcgttcttccaggcatggtctggcaggacagagacgtgtacctgcagggacccatctgggcaaagattccacacacggacggacattttcacccttctcctcttatgggaggatttggaccgaagcaccctcccccgcagattctcatcaagaataccccggtacctgcgaatccttctaccaccttcagcgcggcaaagtttgcttccttcatcacacagtactccacggggcaggtcagcgtggagatcgagtgggagctgcagaaagagaacagcaaacgctggaaccccgagatccagtatacctccaactacaacaagtctgttaatgtggactttactgtggacactaatggcgtgtattcagagcctcgccccattggcacaagatacctgactcgtaatctgtaa

SEQ ID NO: 3466 - DNA, 2208 bp, Artificial Sequence
  Description of Artificial Sequence: Synthetic polynucleotide
atggctgccgatggttatcttccagattggctcgaggacactctctctgaaggaataagacagtggtggaagctcaaacctggcccaccaccgccaaagcccgcagagcggcataaggacgacagcaggggtcttgtgcttcctgggtacaagtacctcggacccttcaacggactcgacaaaggagagccggtcaacgaggcagacgccgcggccctcgagcacgacaaggcctacgaccggcagctcgacagcggagacaacccgtacctcaagtacaaccacgccgacgcggagtttcaggagcgccttaaagaagatacgtcttttgggggcaacctcgcaagagcagtattccaggcgaaaaagagggttcttgaacctctgggcctggttgaggagcctgttaagacggctccgggaaaaaagaggccggtagagcactctcctgcggagctagattcctcctccggaactggaaagtcgggccaacagcctgcaagaaagagattgaattttggtcagactggagacgcagactccgtacctgacccccagcctctcggacagccaccagcagccccctctggtctgggaactaatacgatggcttcaggcagtggcgcaccaatggcagacaataacgagggcgccgacggagtgggtaattcctcgggaaattggcattgcgattccacatggatgggcgacagagtcatcaccaccagcacccgcacctgggctctgcccacctacaacaaccatctgtacaagcaaatttccagccagtctggggccagcaacgacaaccactaccttggctacagcaccccttgggggtattttgacttcaacagattccactgccacttctccccacgtgactggcaaagactcatcaacaacaattggggattccggcccaaaagactcaacttcaagctctttaacattcaagtcaaggaggtcacgcagaatgacggtacgacgacgattgccaataaccttaccagcacggttcaggtgtttactgactcggagtaccagctcccgtacgtcctcggctcggcgcatcaaggatgcctcccgccgttcccagcagacgtcttcatggtgccacagtatggatacctcaccctgaacaacgggagtcaggcggtaggacgctcttcattttactgcctggagtactttccttctcagatgctgcgtaccggaaacaactttaccttcagctacacctttgaggacgttccttttcacagcagctacgctcacagccagagtttggaccgtctcatgaatcctctcatcgaccagtacctgtattacttgagcagaacaaacactccaagcggaaccactacgcagtccaggcttcagttttctcaagccggagcgagtgacattcgggaccagtctaggaactggcttcctggaccctgttaccgccagcagcgagtatcaaagacagctgcggacaacaacaacagtgattactcgtggactggagctaccaagtatcacctcaatggaagagactctctggtgaatccgggcacagccatggccagccacaaggacgatgaagaaaagtattttcctcagagcggggttctcatcttcggaaaacaagactcgggaaaaactaatgtggacattgaaaaggtcatgattacagacgaagaggaaatcaggaccaccaatcccgtggctacggagcagtatggttctgtatctaccaatctccagagcggcaacacacaagcagctacctcagatgtcaacacacaaggcgttcttccaggcatggtctggcaggacagagacgtgtacctgcagggacccatctgggcaaagattccacacacggacggacattttcacccttctcctcttatgggaggatttggaccgaagcaccctcccccgcagattctcatcaagaataccccggtacctgcgaatccttctaccaccttcagcgcggcaaagtttgcttccttcatcacacagtactccacggggcaggtcagcgtggagatcgagcgggagctgcagaaagagaacagcaaacgctggaaccccgagatccagtatacctccaactacaacaagtctgttaatgtggactttactgtggacactaatggcgtgtattcagagcctcgccccattggcacaagatacctgactcgtaatctgtaa

SEQ ID NO: 3467 - DNA, 2208 bp, Artificial Sequence
  Description of Artificial Sequence: Synthetic polynucleotide
atggctgccgatggttatcttccagattggctcgaggacactctctctgaaggaataagacagtggtggaagctcaaacctggcccaccaccgccaaagcccgcagagcggcataaggacgacagcaggggtcttgtgcttcctgggtacaagtacctcggacccttcaacggactcgacaaaggagagccggtcaacgaggcagacgccgcggccctcgagcacgacaaggcctacgaccggcagctcgacagcggagacaacccgtacctcaagtacaaccacgccgacgcggagtttcaggagcgccttaaagaagatacgtcttttgggggcaacctcgcaagagcagtattccaggcgaaaaagagggttcttgaacctctgggcctggttgaggagcctgttaagacggctccgggaaaaaagaggccggtagagcactctcctgcggagctagattcctcctccggaactggaaagtcgggccaacagcctgcaagaaagagattgaattttggtcagactggagacgcagactccgtacctgacccccagcctctcggacagccaccagcagccccctctggtctgggaactaatacgatggcttcaggcagtggcgcaccaatggcagacaataacgagggcgccgacggagtgggtaattcctcgggaaattggcattgcgattccacatggatgggcgacagagtcatcaccaccagcacccgcacctgggctctgcccacctacaacaaccatctgtacaagcaaatttccagccagtctggggccagcaacgacaaccactactttggctacagcaccccttgggggtattttgacttcaacagattccactgccacttctccccacgtgactggcaaagactcatcaacaacaattggggattccggcccaaaagactcaacttcaagctctttaacattcaagtcaaggaggtcacgcagaatgacggtacgacgacgattgccaataaccttaccagcacggttcaggtgtttactgactcggagtaccagctcccgtacgtcctcggctcggcgcatcaaggatgcctcccgccgttcccagcagacgtcttcatggtgccacagtatggatacctcaccctgaacaacgggagtcaggcggtaggacgctcttcattttactgcctggagtactttccttctcagatgctgcgtaccggaaacaactttaccttcagctacacctttgaggacgttccttttcacagcagctacgctcacagccagagtttggaccgtctcatgaatcctctcatcgaccagtacctgtattacttgagcagaacaaacactccaagcggaaccactacgcagtccaggcttcagttttctcaagccggagcgagtgacattcgggaccagtctaggaactggcttcctggaccctgttaccgccagcagcgagtatcaaagacagctgcggacaacaacaacagtgattactcgtggactggagctaccaagtatcacctcaatggaagagactctctggtgaatccgggcacagccatggccagccacaaggacgatgaagaaaagtattttcctcagagcggggttctcatcttcggaaaacaagactcgggaaaagctaatgtggacattgaaaaggtcatgattacagacgaagaggaaatcaggaccaccaatcccgtggctacggagcagtatggttctgtatctaccaatctccagagcggcaacacacaagcagctacctcagatgtcaacacacaaggcgttcttccaggcatggtctggcaggacagagacgtgtacctgcagggacccatctgggcaaagattccacacacggacggacattttcacccttctcctcttatgggaggatttggaccgaagcaccctcccccgcagattctcatcaagaataccccggtacctgcgaatccttctaccaccttcagcgcggcaaagtttgcttccttcatcacacagtactccacggggcaggtcagcgtggagatcgagtgggagctgcagaaagagaacagcaaacgctggaaccccgagatccagtatacctccaactacaacaagtctgttaatgtggactttactgtggacactaatggcgtgtattcagagcctcgccccattggcacaagatacctgactcgtaatctgtaa

SEQ ID NO: 3468 - DNA, 2208 bp, Artificial Sequence
  Description of Artificial Sequence: Synthetic polynucleotide
atggctgccgatggttatcttccagattggctcgaggacactctctctgaaggaataagacagtggtggaagctcaaacctggcccaccaccgccaaagcccgcagagcggcataaggacgacagcaggggtcttgtgcttcctgggtacaagtacctcggacccttcaacggactcgacaaaggagagccggtcaacgaggcagacgccgcggccctcgagcacgacaaggcctacgaccggcagctcgacagcggagacaacccgtacctcaagtacaaccacgccgacgcggagtttcaggagcgccttaaagaagatacgtcttttgggggcaacctcgcaagagcagtattccaggcgaaaaagagggttcttgaacctctgggcctggttgaggagcctgttaagacggctccgggaaaaaagaggccggtagagcactctcctgcggagctagattcctcctccggaactggaaagtcgggccaacagcctgcaagaaagagattgaattttggtcagactggagacgcagactccgtacctgacccccagcctctcggacagccaccagcagccccctctggtctgggaactaatacgatggcttcaggcagtggcgcaccaatggcagacaataacgagggcgccgacggagtgggtaattcctcgggaaattggcattgcgattccacatggatgggcgacagagtcatcaccaccagcacccgcacctgggctctgcccacctacaacaaccatctgtacaagcaaatttccagccagtctggggccagcaacgacaaccactactttggctacagcaccccttgggggtattttgacttcaacagattccactgccacttctccccacgtgactggcaaagactcaccaacaacaattggggattccggcccaaaagactcaacttcaagctctttaacattcaagtcaaggaggtcacgcagaatgacggtacgacgacgattgccaataaccttaccagcacggttcaggtgtttactgactcggagtaccagctcccgtacgtcctcggctcggcgcatcaaggatgcctcccgccgttcccagcagacgtcttcatggtgccacagtatggatacctcaccctgaacaacgggagtcaggcggtaggacgctcttcattttactgcctggagtactttccttctcagatgctgcgtaccggaaacaactttaccttcagctacacctttgaggacgttccttttcacagcagctacgctcacagccagagtttggaccgtctcatgaatcctctcatcgaccagtacctgtattacttgagcagaacaaacactccaagcggaaccactacgcagtccaggcttcagttttctcaagccggagcgagtgacattcgggaccagtctaggaactggcttcctggaccctgttaccgccagcagcgagtatcaaagacagctgcggacaacaacaacagtgattactcgtggactggagctaccaagtatcacctcaatggaagagactctctggtgaatccgggcacagccatggccagccacaaggacgatgaagaaaagtattttcctcagagcggggttctcatcttcggaaaacaagactcgggaaaaactaatgtggacattgaaaaggtcatgattacagacgaagaggaaatcaggaccaccaatcccgtggctacggagcagtatggttctgtatctaccaatctccagagcggcaacacacaagcagctacctcagatgtcaacacacaaggcgttcttccaggcatggtctggcaggacagagacgtgtacctgcagggacccatctgggcaaagattccacacacggacggacattttcacccttctcctcttatgggaggatttggaccgaagcaccctcccccgcagattctcatcaagaataccccggtacctgcgaatccttctaccaccttcagcgcggcaaagtttgcttccttcatcacacagtactccacggggcaggtcagcgtggagatcgagtgggagctgcagaaagagaacagcaaacgctggaaccccgagatccagtatacctccaactacaacaagtctgttaatgtggactttactgtggacactaatggcgtgtattcagagcctcgccccattggcacaagatacctgactcgtaatctgtaa

SEQ ID NO: 3469 - DNA, 2208 bp, Artificial Sequence
  Description of Artificial Sequence: Synthetic polynucleotide
atggctgccgatggttatcttccagattggctcgaggacactctctctgaaggaataagacagtggtggaagctcaaacctggcccaccaccgccaaagcccgcagagcggcataaggacgacagcaggggtcttgtgcttcctgggtacaagtacctcggacccttcaacggactcgacaaaggagagccggtcaacgaggcagacgccgcggccctcgagcacgacaaggcctacgaccggcagctcgacagcggagacaacccgtacctcaagtacaaccacgccgacgcggagtttcaggagcgccttaaagaagatacgtcttttgggggcaacctcgcaagagcagtattccaggcgaaaaagagggttcttgaacctctgggcctggttgaggagcctgttaagacggctccgggaaaaaagaggccggtagagcactctcctgcggagctagattcctcctccggaactggaaagtcgggccaacagcctgcaagaaagagattgaattttggtcagactggagacgcagactccgtacctgacccccagcctctcggacagccaccagcagccccctctggtctgggaactaatacgatggcttcaggcagtggcgcaccaatggcagacaataacgagggcgccgacggagtgggtaattcctcgggaaattggcattgcgattccacatggatgggcgacagagtcatcaccaccagcacccgcacctgggctctgcccacctacaacaaccatctgtacaagcaaatttccagccagtctggggccagcaacgacaaccactactttggctacagcaccccttgggggtattttgacttcaacagattccactgccacttctccccacgtgactggcaaagactcatcaacaacaattggggattccggcccaaaagactcaacttcaagctctttaacattcaagtcaaggaggtcacgcagaatgacggtacgacgacgattgccaataaccttaccagcacggttcgggtgtttactgactcggagtaccagctcccgtacgtcctcggctcggcgcatcaaggatgcctcccgccgttcccagcagacgtcttcatggtgccacagtatggatacctcaccctgaacaacgggagtcaggcggtaggacgctcttcattttactgcctggagtactttccttctcagatgctgcgtaccggaaacaactttaccttcagctacacctttgaggacgttccttttcacagcagctacgctcacagccagagtttggaccgtctcatgaatcctctcatcgaccagtacctgtattacttgagcagaacaaacactccaagcggaaccactacgcagtccaggcttcagttttctcaagccggagcgagtgacattcgggaccagtctaggaactggcttcctggaccctgttaccgccagcagcgagtatcaaagacagctgcggacaacaacaacagtgattactcgtggactggagctaccaagtatcacctcaatggaagagactctctggtgaatccgggcacagccatggccagccacaaggacgatgaagaaaagtattttcctcagagcggggttctcatcttcggaaaacaagactcgggaaaaactaatgtggacattgaaaaggtcatgattacagacgaagaggaaatcaggaccaccaatcccgtggctacggagcagtatggttctgtatctaccaatctccagagcggcaacacacaagcagctacctcagatgtcaacacacaaggcgttcttccaggcatggtctggcaggacagagacgtgtacctgcagggacccatctgggcaaagattccacacacggacggacattttcacccttctcctcttatgggaggatttggaccgaagcaccctcccccgcagattctcatcaagaataccccggtacctgcgaatccttctaccaccttcagcgcggcaaagtttgcttccttcatcacacagtactccacggggcaggtcagcgtggagatcgagtgggagctgcagaaagagaacagcaaacgctggaaccccgagatccagtatacctccaactacaacaagtctgttaatgtggactttactgtggacactaatggcgtgtattcagagcctcgccccattggcacaagatacctgactcgtaatctgtaa

SEQ ID NO: 3470 - DNA, 2208 bp, Artificial Sequence
  Description of Artificial Sequence: Synthetic polynucleotide
atggctgccgatggttatcttccagattggctcgaggacactctctctgaaggaataagacagtggtggaagctcaaacctggcccaccaccgccaaagcccgcagagcggcataaggacgacagcaggggtcttgtgcttcctgggtacaagtacctcggacccttcaacggactcgacaaaggagagccggtcaacgaggcagacgccgcggccctcgagcacgacaaggcctacgaccggcagctcgacagcggagacaacccgtacctcaagtacaaccacgccgacgcggagtttcaggagcgccttaaagaagatacgtcttttgggggcaacctcgcaagagcagtattccaggcgaaaaagagggttcttgaacctctgggcctggttggggagcctgttaagacggctccgggaaaaaagaggccggtagagcactctcctgcggagctagattcctcctccggaactggaaagtcgggccaacagcctgcaagaaagagattgaattttggtcagactggagacgcagactccgtacctgacccccagcctctcggacagccaccagcagccccctctggtctgggaactaatacgatggcttcaggcagtggcgcaccaatggcagacaataacgagggcgccgacggagtgggtaattcctcgggaaattggcattgcgattccacatggatgggcgacagagtcatcaccaccagcacccgcacctgggctctgcccacctacaacaaccatctgtacaagcaaatttccagccagtctggggccagcaacgacaaccactactttggctacagcaccccttgggggtattttgacttcaacagattccactgccacttctccccacgtgactggcaaagactcatcaacaacaattggggattccggcccaaaagactcaacttcaagctctttaacattcaagtcaaggaggtcacgcagaatgacggtacgacgacgattgccaataaccttaccagcacggttcaggtgtttactgactcggagtaccagctcccgtacgtcctcggctcggcgcatcaaggatgcctcccgccgttcccagcagacgtcttcatggtgccacagtatggatacctcaccctgaacaacgggagtcaggcggtaggacgctcttcattttactgcctggagtactttccttctcagatgctgcgtaccggaaacaactttaccttcagctacacctttgaggacgttccttttcacagcagctacgctcacagccagagtttggaccgtctcatgaatcctctcatcgaccagtacctgtattacttgagcagaacaaacactccaagcggaaccactacgcagtccaggcttcagttttctcaagccggagcgagtgacattcgggaccagtctaggaactggcttcctggaccctgttaccgccagcagcgagtatcaaagacagctgcggacaacaacaacagtgattactcgtggactggagctaccaagtatcacctcaatggaagagactctctggtgaatccgggcacagccatggccagccacaaggacgatgaagaaaagtattttcctcagagcggggttctcatcttcggaaaacaagactcgggaaaaactaatgtggacattgaaaaggtcatgattacagacgaagaggaaatcaggaccaccaatcccgtggctacggagcagtatggttctgtatctaccaatctccagagcggcaacacacaagcagctacctcagatgtcaacacacaaggcgttcttccaggcatggtctggcaggacagagacgtgtacctgcagggacccatctgggcaaagattccacacacggacggacattttcacccttctcctcttatgggaggatttggaccgaagcaccctcccccgcagattctcatcaagaataccccggtacctgcgaatccttctaccaccttcagcgcggcaaagtttgcttccttcatcacacagtactccacggggcaggtcagcgtggagatcgagtgggagctgcagaaagagaacagcaaacgctggaaccccgagatccagtatacctccaactacaacaagtctgttaatgtggactttactgtggacactaatggcgtgtattcagagcctcgccccattggcacaagatacctgactcgtaatctgtaa

SEQ ID NO: 3471 - DNA, 2208 bp, Artificial Sequence
  Description of Artificial Sequence: Synthetic polynucleotide
atggctgccgatggttatcttccagattggctcgaggacactctctctgaaggaataagacagtggtggaagctcaaacctggcccaccaccgccaaagcccgcagagcggcataaggacgacagcaggggtcttgtgcttcctgggtacaagtacctcggacccttcaacggactcgacaaaggagagccggtcaacgaggcagacgccgcggccctcgagcacgacaaggcctacgaccggcagctcgacagcggagacaacccgtacctcaagtacaaccacgccgacgcggagtttcaggagcgccttaaagaagatacgtcttttgggggcaacctcgcaagagcagtattccaggcgaaaaagagggttcttgaacctctgggcctggttgaggagcctgttaagacggctccgggaaaaaagaggccggtagagcactctcctgcggagctagattcctcctccggaactggaaagtcgggccaacagcctgcaagaaagagattgaattttggtcagactggagacgcagactccgtacctggcccccagcctctcggacagccaccagcagccccctctggtccgggaactaatacgatggcttcaggcagtggcgcaccaatggcagacaataacgagggcgccgacggagtgggtaattcctcgggaaattggcattgcgattccacatggatgggcgacagagtcgtcaccaccagcacccgcacctgggctctgcccacctacaacaaccatctgtacaagcaaatttccagccagtctggggccagcaacgacaaccactactttggctacagcaccccttgggggtattttgacttcaacagattccactgccacttctccccacgtgactggcaaagactcatcaacaacaattggggattccggcccaaaagactcaacttcaagctctttaacattcaagtcaaggaggtcacgcagaatgacggtacgacgacgattgccaataaccttaccagcacggttcaggtgtttactgactcggagtaccagctcccgtacgtcctcggctcggcgcatcaaggatgcctcccgccgttcccagcagacgtcttcatggtgccacagtatggatacctcaccctgaacaacgggagtcaggcggtaggacgctcttcattttactgcctggagtactttccttctcagatgctgcgtaccggaaacaactttaccttcagctacacctttgaggacgttccttttcacagcagctacgctcacagccagagtttggaccgtctcatgaatcctctcatcgaccagtacctgtattacttgagcagaacaaacactccaagcggaaccactacgcagtccaggcttcagttttctcaagccggagcgagtgacattcgggaccagtctaggaactggcttcctggaccctgttaccgccagcagcgagtaccaaagacagctgcggacaacaacaacagtgattactcgtggactggagctaccaagtatcacctcaatggaagagactctctggtgaatccgggcacagccatggccagccacaaggacgatgaagaaaagtattttcctcagagcggggttctcatcttcggaaaacaagactcgggaaaaactaatgtggacattgaaaaggtcatgattacagacgaagaggaaatcaggaccaccaatcccgtggctacggagcagtatggttctgtatctaccaatctccagagcggcaacacacaagcagctacctcagatgtcaacacacaaggcgttcttccaggcatggtctggcaggacagagacgtgtacctgcagggacccatctgggcaaagattccacacacggacggacattttcacccttctcctcttatgggaggatttggaccgaagcaccctcccccgcagattctcatcaagaataccccggtacctgcgaatccttctaccaccttcagcgcggcaaagtttgcttccttcatcacacagtactccacggggcaggtcagcgtggagatcgagtgggagctgcagaaagagaacagcaaacgctggaaccccgagatccagtatacctccaactacaacaagtctgttaatgtggactttactgtggacactaatggcgtgtattcagagcctcgccccattggcacaagatacctgactcgtaatctgtaa

SEQ ID NO: 3472 - DNA, 2208 bp, Artificial Sequence
  Description of Artificial Sequence: Synthetic polynucleotide
atggctgccgatggttatcttccagattggctcgaggacactctctctgaaggaataagacagtggtggaagctcaaacctggcccaccaccgccaaagcccgcagagcggcataaggacgacagcaggggtcttgtgcttcctgggtacaagtacctcggacccttcaacggactcgacaaaggagagccggtcaacgaggcagacgccgcggccctcgagcacgacaaggcctacgaccggcagctcgacagcggagacaacccgtacctcaagtacaaccacgccgacgcggagtttcaggagcgccttaaagaagatacgtcttttgggggcaacctcgcaagagcagtattccaggcgaaaaagagggttcttgaacctctgggcctggttgaggggcctgttaagacggctccgggaaaaaagaggccggtagagcactctcctgcggagctagattcctcctccggaactggaaagtcgggccaacagcctgcaagaaagagattgaattttggtcagactggagacgcagactccgtacctgacccccagcctctcggacagccaccagcagccccctctggtctgggaactaatacgatggcttcaggcagtggcgcaccaatggcagacaataacgagggcgccgacggagtgggtaattcctcgggaaattggcattgcgattccacatggatgggcgacagagtcatcaccaccagcacccgcacctgggctctgcccacctacaacaaccatctgtacaagcaaatttccagccagtctggggccagcaacgacaaccactactttggctacagcaccccttgggggtattttgacttcaacagattccactgccacttctccccacgtgactggcaaagactcatcaacaacaattggggattccggcccaaaagactcaacttcaagctctttaacattcaagtcaaggaggtcacgcagaatgacggtacgacgacgattgccaataaccttaccagcacggttcaggtgtttactgactcggagtaccagctcccgtacgtcctcggctcggcgcatcaaggatgcctcccgccgttcccagcagacgtcttcatggtgccacagtatggatacctcaccctgaacaacgggagtcaggcggtaggacgctcttcattttactgcctggagtactttccttctcagatgctgcgtaccggaaacaactttaccttcagctacacctttgaggacgttccttttcacagcagctacgctcacagccagagtttggaccgtctcatgaatcctctcatcgaccagtacctgtattacttgagcagaacaaacactccaagcggaaccactacgcagtccaggcttcagttttctcaagccggagcgagtgacattcgggaccagtctaggaactggcttcctggaccctgttaccgccagcagcgagtatcaaagacagctgcggacaacaacaacagtgattactcgtggactggagctaccaagtatcacctcaatggaagagactctctggtgaatccgggcacagccatggccagccacaaggacgatgaagaaaagtattttcctcagagcggggttctcatcttcggaaaacaagactcgggaaaaactaatgtggacattgaaaaggtcatgattacagacgaagaggaaatcaggaccaccaatcccgtggctacggagcagtatggttctgtatctaccaatctccagagcggcaacacacaagcagctacctcagatgtcaacacacaaggcgttcttccaggcatggtctggcaggacagagacgtgtacctgcagggacccatctgggcaaagattccacacacggacggacattttcacccttctcctcttatgggaggatttggaccgaagcaccctcccccgcagattctcatcaagaataccccggtacctgcgaatccttctaccaccttcagcgcggcaaagtttgcttccttcatcacacagtactccacggggcaggtcagcgtggagatcgagtgggagctgcagaaagagaacagcaaacgctggaaccccgagatccagtatacctccaactacaacaagtctgttaatgtggactttactgtggacactaatggcgtgtattcagagcctcgccccattggcacaagatacctgactcgtaatctgtaa

SEQ ID NO: 3473 - DNA, 2208 bp, Artificial Sequence
  Description of Artificial Sequence: Synthetic polynucleotide
atggctgccgatggttatcttccagattggctcgaggacactctctctgaaggaataagacagtggtggaagctcaaacctggcccaccaccgccaaagcccgcagagcggcataaggacgacagcaggggtcttgtgcttcctgggtacaagtacctcggacccttcaacggactcgacaaaggagagccggtcaacgaggcagacgccgcggccctcgagcacgacaaggcctacgaccggcagctcgacagcggagacaacccgtacctcaagtacaaccacgccgacgcggagtttcaggagcgccttaaagaagatacgtcttttgggggcaacctcgcaagagcagtattccaggcgaaaaagagggttcttgaacctctgggcctggttgaggagcctgttaagacggctccgggaaaaaagaggccggtagagcactctcctgcggagctagattcctcctccggaactggaaagtcgggccaacagcctgcaagaaagagattgaattttggtcagactggagacgcagactccgtacctgacccccagcctctcggacagccaccagcagccccctctggtctgggaactaatacgatggcttcaggcagtggcgcaccaatggcagacaataacgagggcgccgacggggtgggtaattcctcgggaaattggcattgcgattccacatggatgggcgacagagtcatcaccaccagcacccgcacctgggctctgcccacctacaacaaccatctgtacaagcaaatttccagccagtctggggccagcaacgacaaccactaccttggctacagcaccccttgggggtattttgacttcaacagattccactgccacttctccccacgtgactggcaaagactcatcaacaacaattggggattccggcccaaaagactcaacttcaagctctttaacattcaagtcaaggaggtcacgcagaatgacggtacgacgacgattgccaataaccttaccagcacggttcaggtgtttactgactcggagtaccagctcccgtacgtcctcggctcggcgcatcaaggatgcctcccgccgttcccagcagacgtcttcatggtgccacagtatggatacctcaccctgaacaacgggagtcaggcggtaggacgctcttcattttactgcctggagtactttccttctcagatgctgcgtaccggaaacaactttaccttcagctacacctttgaggacgttccttttcacagcagctacgctcacagccagagtttggaccgtctcatgaatcctctcatcgaccagtacctgtattacttgagcagaacaaacactccaagcggaaccactacgcagtccaggcttcagttttctcaagccggagcgagtgacattcgggaccagtctaggaactggcttcctggaccctgttaccgccagcagcgagtatcaaagacagctgcggacaacaacaacagtgattactcgtggactggagctaccaagtatcacctcaatggaagagactctctggtgaatccgggcacagccatggccagccacaaggacgatgaagaaaagtattttcctcagagcggggttctcatcttcggaaaacaagactcgggaaaaactaatgtggacattgaaaaggtcatgattacagacgaagaggaaatcaggaccaccaatcccgtggctacggagcagtatggttctgtatctaccaatctccagagcggcaacacacaagcagctacctcagatgtcaacacacaaggcgttcttccaggcatggtctggcaggacagagacgtgtacctgcagggacccatctgggcaaagattccacacacggacggacattttcacccttctcctcttatgggaggatttggaccgaagcaccctcccccgcagattctcatcaagaataccccggtacctgcgaatccttctaccaccttcagcgcggcaaagtttgcttccttcatcacacagtactccacggggcaggtcagcgtggagatcgagtgggagctgcagaaagagaacagcaaacgctggaaccccgagatccagtatacctccaactacaacaagtctgttaatgtggactttactgtggacactaatggcgtgtattcagagcctcgccccattggcacaagatacctgactcgtaatctgtaa

SEQ ID NO: 3474 - DNA, 2208 bp, Artificial Sequence
  Description of Artificial Sequence: Synthetic polynucleotide
atggctgccgatggttatcttccagattggctcgaggacactctctctgaaggaataagacagtggtggaagctcaaacctggcccaccaccgccaaagcccgcagagcggcataaggacgacagcaggggtcttgtgcttcctgggtacaagtacctcggacccttcaacggactcgacaaaggagagccggtcaacgaggcagacgccgcggccctcgagcacgacaaggcctacgaccggcagctcgacagcggagacaacccgtacctcaagtacaaccacgccgacgcggagtttcaggagcgccttaaagaagatacgtcttttgggggcaacctcgcaagagcagtattccaggcgaaaaagagggttcttgaacctctgggcctggttgaggagcctgttaagacggctccgggaaaaaaggggccggtagagcactctcctgcggagctagattcctcctccggaactggaaagtcgggccaacagcctgcaagaaagagattgaattttggtcagactggagacgcagactccgtacctgacccccagcctctcggacagccaccagcagccccctctggtctgggaactaatacgatggcttcaggcagtggcgcaccaatggcagacaataacgagggcgccgacggagtgggtaattcctcgggaaattggcattgcgattccacatggatgggcgacagagtcatcaccaccagcacccgcacctgggctctgcccacctacaacaaccatctgtacaagcaaatttccagccagtctggggccagcaacgacaaccactactttggctacagcaccccttgggggtattttgacttcaacagattccactgccacttctccccacgtgactggcaaagactcatcaacaacaattggggattccggcccaaaagactcaacttcaagctctttaacattcaagtcaaggaggtcacgcagaatgacggtacgacgacgattgccaataaccttaccagcacggttcaggtgtttactgactcggagtaccagctcccgtacgtcctcggctcggcgcatcaaggatgcctcccgccgttcccagcagacgtcttcatggtgccacagtatggatacctcaccctgaacaacgggagtcaggcggtaggacgctcttcattttactgcctggagtactttccttctcagatgctgcgtaccggaaacaactttaccttcagctacacctttgaggacgttccttttcacagcagctacgctcacagccagagtttggaccgtctcatgaatcctctcatcgaccagtacctgtattacttgagcagaacaaacactccaagcggaaccactacgcagtccaggcttcagttttctcaagccggagcgagtgacattcgggaccagtctaggaactggcttcctggaccctgttaccgccagcagcgagtatcaaagacagctgcggacaacaacaacagtgattactcgtggactggagctaccaagtatcacctcaatggaagagactctctggtgaatccgggcacagccatggccagccacaaggacgatgaagaaaagtattttcctcagagcggggttctcatcttcggaaaacaagactcgggaaaaactaatgtggacattgaaaaggtcatgattacagacgaagaggaaatcaggaccaccaatcccgtggctacggagcagtatggttctgtatctaccaatctccagagcggcaacacacaagcagctacctcagatgtcaacacacaaggcgttcttccaggcatggtctggcaggacagagacgtgtacctgcagggacccatctgggcaaagattccacacacggacggacattttcacccttctcctcttatgggaggatttggaccgaagcaccctcccccgcagattctcatcaagaataccccggtacctgcgaatccttctaccaccttcagcgcggcaaagtttgcttccttcatcacacagtactccacggggcaggtcagcgtggagatcgagtgggagctgcagaaagagaacagcaaacgctggaaccccgagatccagtatacctccaactacaacaagtctgttaatgtggactttactgtggacactaatggcgtgtattcagagcctcgccccattggcacaagatacctgactcgtaatctgtaa

SEQ ID NO: 3475 - DNA, 2208 bp, Artificial Sequence
  Description of Artificial Sequence: Synthetic polynucleotide
atggctgccgatggttatcttccagattggctcgaggacactctctctgaaggaataagacagtggtggaagctcaaacctggcccaccaccgccaaagcccgcagagcggcataaggacgacagcaggggtcttgtgcttcctgggtacaagtacctcggacccttcaacggactcgacaaaggagagccggtcaacgaggcagacgccgcggccctcgagcacgacaaggcctacgaccggcagctcgacagcggagacaacccgtacctcaagtacaaccacgccgacgcggagtttcaggagcgccttaaagaagatacgccttttgggggcaacctcgcaagagcagtattccaggcgaaaaagagggttcttgaacctctgggcctggttgaggagcctgttaagacggctccgggaaaaaagaggccggtagagcactctcctgcggagctagattcctcctccggaactggaaagtcgggccaacagcctgcaagaaagagattgaattttggtcagactggagacgcagactccgtacctgacccccagcctctcggacagccaccagcagccccctctggtctgggaactaatacgatggcttcaggcagtggcgcaccaatggcagacaataacgagggcgccgacggagtgggtaattcctcgggaaattggcattgcgattccacatggatgggcgacagagtcatcaccaccagcacccgcacctgggctctgcccacctacaacaaccatctgtacaagcaaatttccagccagtctggggccagcaacgacaaccactactttggctacagcaccccttgggggtattttgacttcaacagattccactgccacttctccccacgtgactggcaaagactcatcaacaacaattggggattccggcccaaaagactcaacttcaagctctttaacattcaagtcaaggaggtcacgcagaatgacggtacgacgacgattgccaataaccttaccagcacggttcaggtgtttactgactcggagtaccagctcccgtacgtcctcggctcggcgcatcaaggatgcctcccgccgttcccagcagacgtcttcatggtgccacagtatggatacctcaccctgaacaacgggagtcaggcggtaggacgctcttcattttactgcctggagtactttccttctcagatgctgcgtaccggaaacaactttaccttcagctacacctttgaggacgttccttttcacagcagctacgctcacagccagagtttggaccgtctcatgaatcctctcatcgaccagtacctgtattacttgagcagagcaaacactccaagcggaaccactacgcagtccaggcttcagttttctcaagccggagcgagtgacattcgggaccagtctaggaactggcttcctggaccctgttaccgccagcagcgagtatcaaagacagctgcggacaacaacaacagtgattactcgtggactggagctaccaagtatcacctcaatggaagagactctctggtgaatccgggcacagccatggccagccacaaggacgatgaagaaaagtattttcctcagagcggggttctcatcttcggaaaacaagactcgggaaaaactaatgtggacattgaaaaggtcatgattacagacgaagaggaaatcaggaccaccaatcccgtggctacggagcagtatggttctgtatctaccaatctccagagcggcaacacacaagcagctacctcagatgtcaacacacaaggcgttcttccaggcatggtctggcaggacagagacgtgtacctgcagggacccatctgggcaaagattccacacacggacggacattttcacccttctcctcttatgggaggatttggaccgaagcaccctcccccgcagattctcatcaagaataccccggtacctgcgaatccttctaccaccttcagcgcggcaaagtttgcttccttcatcacacagtactccacggggcaggtcagcgtggagatcgagtgggagctgcagaaagagaacagcaaacgctggaaccccgagatccagtatacctccaactacaacaagtctgttaatgtggactttactgtggacactaatggcgtgtattcagagcctcgccccattggcacaagatacctgactcgtaatctgtaa

SEQ ID NO: 3476 - DNA, 2208 bp, Artificial Sequence
  Description of Artificial Sequence: Synthetic polynucleotide
atggctgccgatggttatcttccagattggctcgaggacactctctctgaaggaataagacagtggtggaagctcaaacctggcccaccaccgccaaagcccgcagagcggcataaggacgacagcaggggtcttgtgcttcctgggtacaagtacctcggacccttcaacggactcgacaaaggagagccggtcaacgaggcagacgccgcggccctcgagcacgacaaggcctacgaccggcagctcgacagcggagacaacccgtacctcaagtacaaccacgccgacgcggagtttcaggagcgccttaaagaagatacgtcttttgggggcaacctcgcaagagcagtattccaggcgaaaaagagggttcttgaacctctgggcctggttgaggagcctgttaagacggctccgggaaaaaagaggccggtagagcactctcctgcggagctagattcctcctccggaactggaaagtcgggccaacagcctgcaagaaagagattgaattttggtcagactggagacgcagactccgtacctgacccccagcctctcggacagccaccagcagccccctctggtctgggaactaatacgatggcttcaggcagtggcgcaccaatggcagacaataacgagggcgccgacggagtgggtaattcctcgggaaattggcattgcgattccacatggatgggcgacagagtcatcaccaccagcacccgcacctgggctctgcccacctacaacaaccatctgtacaagcaaatttccagccagtctggggccagcaacgacaaccactactttggctacagcgccccttgggggtattttgacttcaacagattccactgccacttctccccacgtgactggcaaagactcatcaacaacaattggggattccggcccaaaagactcaacttcaagctctttaacattcaagtcaaggaggtcacgcagaatgacggtacgacgacgattgccaataaccttaccagcacggttcaggtgtttactgactcggagtaccagctcccgtacgtcctcggctcggcgcatcaaggatgcctcccgccgttcccagcagacgtcttcatggtgccacagtatggatacctcaccctgaacaacgggagtcaggcggtaggacgctcttcattttactgcctggagtactttccttctcagatgctgcgtaccggaaacaactttaccttcagctacacctttgaggacgttccttttcacagcagctacgctcacagccagagtttggaccgtctcatgaatcctctcatcgaccagtacctgtattacttgagcagaacaaacactccaagcggaaccactacgcagtccaggcttcagttttctcaagccggagcgagtgacattcgggaccagtctaggaactggcttcctggaccctgttaccgccagcagcgagtatcaaagacagctgcggacaacaacaacagtgattactcgtggactggagctaccaagtatcacctcaatggaagagactctctggtgaatccgggcacagccatggccagccacaaggacgatgaagaaaagtattttcctcagagcggggttctcatcttcggaaaacaagactcgggaaaaactaatgtggacattgaaaaggtcatgattacagacgaagaggaaatcaggaccaccaatcccgtggctacggagcagtatggttctgtatctaccaatctccagagcggcaacacacaagcagctacctcagatgtcaacacacaaggcgttcttccaggcatggtctggcaggacagagacgtgtacctgcagggacccatctgggcaaagattccacacacggacggacattttcacccttctcctcttatgggaggatttggaccgaagcaccctcccccgcagattctcatcaagaataccccggtacctgcgaatccttctaccaccttcagcgcggcaaagtttgcttccttcatcacacagtactccacggggcaggtcagcgtggagatcgagtgggagctgcagaaagagaacagcaaacgctggaaccccgagatccagtatacctccaactacaacaagtctgttaatgtggactttactgtggacactaatggcgtgtattcagagcctcgccccattggcacaagatacctgactcgtaatctgtaa

SEQ ID NO: 3477 - DNA, 2208 bp, Artificial Sequence
  Description of Artificial Sequence: Synthetic polynucleotide
atggctgccgatggttatcttccagattggctcgaggacactctctctgaaggaataagacagtggtggaagctcaaacctggcccaccaccgccaaagcccgcagagcggcataaggacgacagcaggggtcttgtgcttcctgggtacaagtacctcggacccttcaacggactcgacaaaggagagccggtcaacgaggcagacgccgcggccctcgagcacgacaaggcctacgaccggcagctcgacagcggagacaacccgtacctcaagtacaaccacgccgacgcggagtttcaggagcgccttaaagaagatacgtcttttgggggcaacctcgcaagagcagtattccaggcgaaaaagagggttcttgaacctctgggcctggttgaggagcctgttaagacggctccgggaaaaaagaggccggtagagcactctcctgcggagctagattcctcctccggaactggaaagtcgggccaacagcctgcaagaaagagattgaattttggtcagactggagacgcagactccgtacctgacccccagcctctcggacagccaccagcagccccctctggtctgggaactaatacgatggcttcaggcagtggcgcaccaatggcagacaataacgagggcgccgacggagtgggtaattcctcgggaaattggcattgcgattccacatggatgggcgacagagtcatcaccaccagcacccgcacctgggctctgcccacctacaacaaccatctgtacaagcaaatttccagccagtctggggccagcaacgacaaccactactttggctacagcaccccttgggggtattttgacttcaacagattccactgccacttctccccacgtgactggcaaagactcatcaacaacaattggggattccggcccaaaagactcaacttcaagctctttaacattcaagtcaaggaggtcacgcagaatgacggtacgacgacgattgccaataaccttaccagcacggttcaggtgtttactgactcggagtaccagctcccgtacgtcctcggctcggcgcatcaaggatgcctcccgccgttcccagcagacgtcttcatggtgccacagtatggatacctcaccctgaacaacgggagtcaggcggtaggacgctcttcattttactgcctggagtactttccttctcagatgctgcgtaccggaaacaactttaccttcagctacacctttgaggacgttccttttcacagcagctacgctcacagccagagtttggaccgtctcatgaatcctctcatcgaccagtacctgtattacttgagcagaacaaacactccaagcggaaccactacgcagtccaggcttcagttttctcaagccggagcgagtgacattcgggaccagtctaggaactggcttcctggaccctgttaccgccagcagcgagtatcaaagacagctgcggacaacaacaacagtgattactcgtggactggagctaccaagtatcacctcaatggaagagactctctggtgaatccgggcacagccatggccagccacaaggacgatgaagaaaagtattttcctcagagcggggttctcatcttcggaaaacaagactcgggaaaaactaatgtggacattgaaaaggtcatgattacagacgaagaggaaatcaggaccaccaatcccgtggctacggagcagtatggttctgtatctaccaatctccagagcggcaacacacaagcagctacctcagatgtcaacacacaaggcgttcttccaggcatggtctggcaggacagagacgtgtacctgcagggacccatctgggcaaagattccacacacggacggacattttcacccttctcctcttatgggaggatttggaccgaagcaccctcccccgcagattctcatcaagaataccccggtacctgcgaatccttctaccaccttcagcgcggcaaagtttgcttccctcatcacacagtactccacggggcaggtcagcgtggagatcgagtgggagctgcagaaagagaacagcaaacgctggaaccccgagatccagtatacctccaactacaacaagtctgttaatgtggactttactgtggacactaatggcgtgtattcagagcctcgccccattggcacaagatacctgactcgtaatctgtaa

SEQ ID NO: 3478 - DNA, 2208 bp, Artificial Sequence
  Description of Artificial Sequence: Synthetic polynucleotide
atggctgccgatggttatcttccagattggctcgaggacactctctctgaaggaataagacagtggtggaagctcaaacctggcccaccaccgccaaagcccgcagagcggcataaggacgacagcaggggtcttgtgcttcctgggtacaagtacctcggacccttcaacggactcgacaaaggagagccggtcaacgaggcagacgccgcggccctcgagcacgacaaggcctacgaccggcagctcgacagcggagacaacccgtacctcaagtacaaccacgccgacgcggagtttcaggagcgccttaaagaagatacgtcttttgggggcaacctcgcaagagcagtattccaggcgaaaaagagggttcttgaacctctgggcctggttgaggagcctgttaagacggctccgggaaaaaagaggccggtagagcactctcctgcggagctagattcctcctccggaactggaaagtcgggccaacagcctgcaagaaagggattgaattttggtcagactggagacgcagactccgtacctgacccccagcctctcggacagccaccagcagccccctctggtctgggaactaatacgatggcttcaggcagtggcgcaccaatggcagacaataacgagggcgccgacggagtgggtaattcctcgggaaattggcattgcgattccacatggatgggcgacagagtcatcaccaccagcacccgcacctgggctctgcccacctacaacaaccatctgtacaagcaaatttccagccagtctggggccagcaacgacaaccactactttggctacagcaccccttgggggtattttgacttcaacagattccactgccacttctccccacgtgactggcaaagactcatcaacaacaattggggattccggcccaaaagactcaacttcaagctctttaacattcaagtcaaggaggtcacgcagaatgacggtacgacgacgattgccaataaccttaccagcacggttcaggtgtttactgactcggagtaccagctcccgtacgtcctcggctcggcgcatcaaggatgcctcccgccgttcccagcagacgtcttcatggtgccacagtatggatacctcaccctgaacaacgggagtcaggcggtaggacgctcttcattttactgcctggagtactttccttctcagatgctgcgtaccggaaacaactttaccttcagctacacctttgaggacgttccttttcacagcagctacgctcacagccagagtttggaccgtctcatgaatcctctcatcgaccagtacctgtattacttgagcagaacaaacactccaagcggaaccactacgcagtccaggcttcagttttctcaagccggagcgagtgacattcgggaccagtctaggaactggcttcctggaccctgttaccgccagcagcgagtatcaaagacagctgcggacaacaacaacagtgattactcgtggactggagctaccaagtatcacctcaatggaagagactctctggtgaatccgggcacagccatggccagccacaaggacgatgaagaaaagtattttcctcagagcggggttctcatcttcggaaaacaagactcgggaaaaactaatgtggacattgaaaaggtcatgattacagacgaagaggaaatcaggaccaccaatcccgtggctacggagcagtatggttctgtatctaccaatctccagagcggcaacacacaagcagctacctcagatgtcaacacacaaggcgttcttccaggcatggtctggcaggacagagacgtgtacctgcagggacccatctgggcaaagattccacacacggacggacattttcacccttctcctcttatgggaggatttggaccgaagcaccctcccccgcagattctcatcaagaataccccggtacctgcgaatccttctaccaccttcagcgcggcaaagtttgcttccttcatcacacagtactccacggggcaggtcagcgtggagatcgagtgggagctgcagaaagagaacagcaaacgctggaaccccgagatccagtatacctccaactacaacaagtctgttaatgtggactttactgtggacactaatggcgtgtattcagagcctcgccccattggcacaagatacctgactcgtaatctgtaa

SEQ ID NO: 3479 - DNA, 2208 bp, Artificial Sequence
  Description of Artificial Sequence: Synthetic polynucleotide
atggctgccgatggttatcttccagattggctcgaggacactctctctgaaggaataagacagtggtggaagctcaaacctggcccaccaccgccaaagcccgcagagcggcataaggacgacagcaggggtcttgtgcttcctgggtacaagtacctcggacccttcaacggactcgacaaaggagagccggtcaacgaggcagacgccgcggccctcgagcacgacgaggcctacgaccggcagctcgacagcggagacaacccgtacctcaagtacaaccacgccgacgcggagtttcaggagcgccttaaagaagatacgtcttttgggggcaacctcgcaagagcagtattccaggcgaaaaagagggttcttgaacctctgggcctggttgaggagcctgttaagacggctccgggaaaaaagaggccggtagagcactctcctgcggagctagattcctcctccggaactggaaagtcgggccaacagcctgcaagaaagagattgaattttggtcagactggagacgcagactccgtacctgacccccagcctctcggacagccaccagcagccccctctggtctgggaactaatacgatggcttcaggcagtggcgcaccaatggcagacaataacgagggcgccgacggagtgggtaattcctcgggaaattggcattgcgattccacatggatgggcgacagagtcatcaccaccagcacccgcacctgggctctgcccacctacaacaaccatctgtacaagcaaatttccagccagtctggggccagcaacgacaaccactactttggctacagcaccccttgggggtattttgacttcaacagattccactgccacttctccccacgtgactggcaaagactcatcaacaacaattggggattccggcccaaaagactcaacttcaagctctttaacattcaagtcaaggaggtcacgcagaatgacggtacgacgacgattgtcaataaccttaccagcacggttcaggtgtttactgactcggagtaccagctcccgtacgtcctcggctcggcgcatcaaggatgcctcccgccgttcccagcagacgtcttcatggtgccacagtatggatacctcaccctgaacaacgggagtcaggcggtaggacgctcttcattttactgcctggagtactttccttctcagatgctgcgtaccggaaacaactttaccttcagctacacctttgaggacgttccttttcacagcagctacgctcacagccagagtttggaccgtctcatgaatcctctcatcgaccagtacctgtattacttgagcagaacaaacactccaagcggaaccactacgcagtccaggcttcagttttctcaagccggagcgagtgacattcgggaccagtctaggaactggcttcctggaccctgttaccgccagcagcgagtatcaaagacagctgcggacaacaacaacagtgattactcgtggactggagctaccaagtatcacctcaatggaagagactctctggtgaatccgggcacagccatggccagccacaaggacgatgaagaaaagtattttcctcagagcggggttctcatcttcggaaaacaagactcgggaaaaactaatgtggacattgaaaaggtcatgattacagacgaagaggaaatcaggaccaccaatcccgtggctacggagcagtatggttctgtatctaccaatctccagagcggcaacacacaagcagctacctcagatgtcaacacacaaggcgttcttccaggcatggtctggcaggacagagacgtgtacctgcagggacccatctgggcaaagattccacacacggacggacattttcacccttctcctcttatgggaggatttggaccgaagcaccctcccccgcagattctcatcaagaataccccggtacctgcgaatccttctaccaccttcagcgcggcaaagtttgcttacttcatcacacagtactccacggggcaggtcagcgtggagatcgagtgggagctgcagaaagagaacagcaaacgctggaaccccgagatccagtatacctccaactacaacaagtctgttaatgtggactttactgtggacactaatggcgtgtattcagagcctcgccccattggcacaagatacctgactcgtaatctgtaa

SEQ ID NO: 3480 - DNA, 2208 bp, Artificial Sequence
  Description of Artificial Sequence: Synthetic polynucleotide
atggctgccgatggttatcttccagattggctcgaggacactctctctgaaggaataagacagtggtggaagctcaaacctggcccaccaccgccaaagcccgcagagcggcataaggacgacagcaggggtcttgtgcttcctgggtacaagtacctcggacccttcaacggactcgacaaaggagagccggtcaacgaggcagacgccgcggccctcgagcacgacaaggcctacgaccggcagctcgacagcggagacaacccgtacctcaagtacaaccacgccgacgcggagtttcaggagcgccttaaagaagatacgtcttttgggggcaacctcgcaagagcagtattccaggcgaaaaagagggttcttgaacctctgggcctggttgaggagcctgttaagacggctccgggaaaaaagaggccggtagagcactctcctgcggagctagattcctcctccggaactggaaagtcgggccaacagcctgcaagaaagagattgaattttggtcagactggagacgcagactccgtacctgacccccagcctctcggacagccaccagcagccccctctggtctgggaactaatacgatggcttcaggcagtggcgcaccaatggcagacaataacgagggcgccgacggagtgggtaattcctcgggaaattggcattgcgattccacatggatgggcgacagagtcatcaccaccagcacccgcacctgggctctgcccacctacaacaaccatctgtacaagcaaatttccagccagtctggggccagcaacgacaaccactactttggctacagcaccccttgggggtattttgacttcaacagattccactgccacttctccccacgtgactggcaaagactcatcaacaacaattggggattccggcccaaaagactcaacttcaagctctttaacattcaagtcaaggaggtcacgcagaatgacggtacgacgacgattgccaataaccttaccagcacggttcaggtgtttactgactcggagtaccagctcccgtacgtcctcggctcggcgcatcaaggatgcctcccgccgttcccagcagacgtcttcatggtgccacagtatggatacctcaccctgaacaacgggagtcaggcggtaggacgctcttcattttactgcctggagtactttccttctcagatgctgcgtaccggaaacaactttaccttcagctacacctttgaggacgttccttttcacagcagctacgctcacagccagagtttggaccgtctcatgaatcctctcatcgaccagtacctgtattacttgagcagaacaaacactccaagcggaaccactacgcagtccaggcttcagttttctcaagccggagcgagtggcattcgggaccagtctaggaactggcttcctggaccctgttaccgccagcagcgagtatcaaagacagctgcggacaacaacaacagtgattactcgtggactggagctaccaagtatcacctcaatggaagggactctctggtgaatccgggcacagccatggccagccacaaggacgatgaagaaaagtattttcctcagagcggggttctcatcttcggaaaacaagactcgggaaaaactaatgtggacattgaaaaggtcatgattacagacgaagaggaaatcaggaccaccaatcccgtggctacggagcagtatggttctgtatctaccaatctccagagcggcaacacacaagcagctacctcagatgtcaacacacaaggcgttcttccaggcatggtctggcaggacagagacgtgtacctgcagggacccatctgggcaaagattccacacacggacggacattttcacccttctcctcttatgggaggatttggaccgaagcaccctcccccgcagattctcatcaagaataccccggtacctgcgaatccttctaccaccttcagcgcggcaaagtttgcttccttcatcacacagtactccacggggcaggtcagcgtggagatcgagtgggagctgcagaaagagaacagcaaacgctggaaccccgagatccagtatacctccaactacaacaagtctgttaatgtggactttactgtggacactaatggcgtgtattcagagcctcgccccattggcacaagatacctgactcgtaatctgtaa

SEQ ID NO: 3481 - DNA, 2208 bp, Artificial Sequence
  Description of Artificial Sequence: Synthetic polynucleotide
atggctgccgatggttatcttccagattggctcgaggacactctctctgaaggaataagacagtggtggaagctcaaacctggcccaccaccgccaaagcccgcagagcggcataaggacgacagcaggggtcttgtgcttcctgggtacaagtacctcggacccttcaacggactcgacaaaggagagccggtcaacgaggcagacgccgcggccctcgagcacgacaaggcctacgaccggcagctcgacagcggagacaacccgtacctcaagtacaaccacgccgacgcggagtttcaggagcgccttaaagaagatacgtcttttgggggcaacctcgcaagagcagtattccaggcgaaaaagagggttcttgaacctctgggcctggttgaggagcctgttaagacggctccgggaaaaaagaggccggtagagcactctcctgcggagctagattcctcctccggaactggaaagtcgggccaacagcctgcaagaaagagattgaattttggtcagactggagacgcagactccgtacctgacccccagcctctcggacagccaccagcagccccctctggtctgggaactaatacgatggcttcaggcagtggcgcaccaatggcagacaataacgagggcgccgacggagtgggtaattcctcgggaaattggcattgcgattccacatggatgggcgacagagtcatcaccaccagcacccgcacctgggctctgcccacctacaacaaccatctgtacaagcaaatttccagccagtctggggccagcaacgacaaccactactttggctacagcaccccttgggggtattttgacttcaacagattccactgccacttctccccacgtgactggcaaagactcatcaacaacaattggggattccggcccaaaagactcaacttcaagctctttaacattcaagtcaaggaggtcacgcagaatgacggtacgacgacgattgccaataaccttaccagcacggttcaggtgtttactgactcggagtaccagctcccgtacgtcctcggctcggcgcatcaaggatgcctcccgccgttcccagcagacgtcttcatggtgccacagtatggatacctcaccctgaacaacgggagtcaggcggtaggacgctcttcattttactgcctggagtactttccttctcagatgctgcgtaccggaaacaactttaccttcagctacacctttgaggacgttccttttcacagcagctacgctcacagccagagtttggaccgtctcatgaatcctctcatcgaccagtacctgtattacttgagcagaacaaacactccaagcggaaccactacgcagtccaggcttcagttttctcaagccggagcgagtgacattcgggaccagtctaggaactggcttcctggaccctgttaccgccagcagcgagtatcaaagacagctgcggacaacaacaacagtgattactcgtggactggagctaccaagtatcacctcaatggaagagactctctggtgaatccgggcacagccatggccagccacaaggacgatgaagaaaagtattttcctcagagcggggttctcatcttcggaaaacaagactcgggaaaaactaatgtggacattgaaaaggtcgtgattacagacgaagaggaaatcaggaccaccaatcccgtggctacggagcagtatggttctgtatctaccaatctccagagcggcaacacacaagcagctacctcagatgtcaacacacaaggcgttcttccaggcatggtctggcaggacagagacgtgtacctgcagggacccatctgggcaaagattccacacacggacggacattttcacccttctcctcttatgggaggatttggaccgaagcaccctcccccgcagattctcatcaagaataccccggtacctgcgaatccttctaccaccttcagcgcggcaaagtttgcttccttcatcacacagtactccacggggcaggtcagcgtggagatcgagtgggagctgcagaaagagaacagcaaacgctggaaccccgagatccagtatacctccaactacaacaagtctgttaatgtggactttactgtggacactaatggcgtgtattcagagcctcgccccattggcacaagatacctgactcgtaatctgtaa

SEQ ID NO: 3482 - DNA, 2208 bp, Artificial Sequence
  Description of Artificial Sequence: Synthetic polynucleotide
atggctgccgatggttatcttccagattggctcgaggacactctctctgaaggaataagacagtggtggaagctcaaacctggcccaccaccgccaaagcccgcagagcggcataaggacgacagcaggggtcttgtgcttcctgggtacaagtacctcggacccttcaacggactcgacaaaggagagccggtcaacgaggcagacgccgcggccctcgagcacgacaaggcctacgaccggcagctcgacagcggagacaacccgtacctcaagtacaaccacgccgacgcggagtttcaggagcgccttaaagaagatacgtcttttgggggcaacctcgcaagagcagtattccaggcgaaaaagagggttcttgaacctctgggcctggttgaggagcctgttaagacggctccgggaaaaaagaggccggtagagcactctcctgcggagctagattcctcctccggaactggaaagtcgggccaacagcctgcaagaaagagattgaattttggtcagactggagacgcagactccgtacctgacccccagcctctcggacagccaccagcagccccctctggtctgggaactaatacgatggcttcaggcagtggcgcaccaatggcagacaataacgagggcgccgacggagtgggtaattcctcgggaaattggcattgcgattccacatggatgggcgacagagtcatcaccaccagcacccgcacctgggctctgcccacctacaacaaccatctgtacaagcaaatttccagccagtctggggccagcaacgacaaccactactttggctacagcaccccttgggggtattttgacttcaacagattccactgccacttctccccacgtgactggcaaagactcatcaacaacaattggggattccggcccaaaagactcaacttcaagctctttaacattcaagtcaaggaggtcacgcagaatgacggtacgacgacgattgccaataaccttaccagcacggttcaggtgtttactgactcggagtaccagctcccgtacgtcctcggctcggcgcatcaaggatgcctcccgccgttcccagcagacgtcttcatggtgccacagtatggatacctcaccctgaacaacgggagtcaggcggtaggacgctcttcattttactgcctggagtactttccttctcagatgctgcgtaccggaaacaactttaccttcagctacacctttgaggacgttccttttcacagcagctacgctcacagccagagtttggaccgtctcatgaatcctctcatcgaccagtacctgtattacttgagcagaacaaacactccaagcggaaccactacgcagtccaggcttcagttttctcaagccggagcgagtgacattcgggaccagtctaggaactggcttcctggaccctgttaccgccagcagcgagtatcaaagacagctgcggacaacaacaacagtgattactcgtggactggagctaccaagtatcacctcaatggaagagactctctggtgaatccgggcacagccatggccagccacaaggacgatgaagaaaagtattttcctcagagcggggttctcatcttcggaaaacaagactcgggaaaaactaatgtggacattgaaaaggtcatgattacagacgaagaggaaatcaggaccaccaatcccgtggctacggagcagtatggttctgtatctaccaatctccagagcggcgacacacaagcagctacctcagatgtcaacacacaaggcgttcttccaggcatggtctggcaggacagagacgtgtacctgcagggacccatctgggcaaagattccacacacggacggacattttcacccttctcctcttatgggaggatttggaccgaagcaccctcccccgcagattctcatcaagaataccccggtacctgcgaatccttctaccaccttcagcgcggcaaagtttgcttccttcatcacacagtactccacggggcaggtcagcgtggagatcgagtgggagctgcagaaagagaacagcaaacgctggaaccccgagatccagtatacctccaactacaacaagtctgttaatgtggactttactgtggacactaatggcgtgtattcagagcctcgccccattggcacaagatacctgactcgtaatctgtaa

SEQ ID NO: 3483 - DNA, 2208 bp, Artificial Sequence
  Description of Artificial Sequence: Synthetic polynucleotide
atggctgccgatggttatcttccagattggctcgaggacactctctctgaaggaataagacagtggtggaagctcaaacctggcccaccaccgccaaagcccgcagagcggcataaggacgacagcaggggtcttgtgcttcctgggtacaagtacctcggacccttcaacggactcgacaaaggagagccggtcaacgaggcagacgccgcggccctcgagcacgacaaggcctacgaccggcagctcgacagcggagacaacccgtacctcaagtacaaccacgccgacgcggagtttcaggagcgccttaaagaagatacgtcttttgggggcaacctcgcaagagcagtattccaggcgaaaaagagggttcttgaacctctgggcctggttgaggagcctgttaagacggctccgggaaaaaagaggccggtagagcactctcctgcggagctagattcctcctccggaactggaaagtcgggccaacagcctgcaagaaagagattgaattttggtcagactggagacgcagactccgtacctgacccccagcctctcggacagccaccagcagccccctctggtctgggaactaatacgatggcttcaggcagtggcgcaccaatggcagacaataacgagggcgccgacggagtgggtaattcctcgggaaattggcattgcgattccacatggatgggcgacagagtcatcaccaccagcacccgcacctgggctctgcccacctacaacaaccatctgtacaagcaaatttccagccagtctggggccagcaacgacaaccactactttggctacagcaccccttgggggtattttgacttcaacagattccactgccacttctccccacgtgactggcaaagactcatcaacaacaattggggattccggcccaaaagactcaacttcaggctctttaacattcaagtcaaggaggtcacgcagaatgacggtacgacgacgattgccaataaccttaccagcacggttcaggtgtttactgactcggagtaccagctcccgtacgtcctcggctcggcgcatcaaggatgcctcccgccgttcccagcagacgtcttcatggtgccacagtatggatacctcaccctgaacaacgggagtcaggcggtaggacgctcttcattttactgcctggagtactttccttctcagatgctgcgtaccggaaacaactttaccttcagctacacctttgaggacgttccttttcacagcagctacgctcacagccagagtttggaccgtctcatgaatcctctcatcgaccagtacctgtattacttgagcagaacaaacactccaagcggaaccactacgcagtccaggcttcagttttctcaagccggagcgagtgacattcgggaccagtctaggaactggcttcctggaccctgttaccgccagcagcgagtatcaaagacagctgcggacaacaacaacagtgattactcgtggactggagctaccaagtatcacctcaatggaagagactctctggtgaatccgggcacagccatggccagccacaaggacgatgaagaaaagtattttcctcagagcggggttctcatcttcggaaaacaagactcgggaaaaactaatgtggacattgaaaaggtcatgattacagacgaagaggaaatcaggaccaccaatcccgtggctacggagcagtatggttctgtatctaccaatctccagagcggcaacacacaagcagctacctcagatgtcaacacacaaggcgttcttccaggcatggtctggcaggacagagacgtgtacctgcagggacccatctgggcaaagattccacacacggacggacattttcacccttctcctcttatgggaggatttggaccgaagcaccctcccccgcagattctcatcaagaataccccggtacctgcgaatccttctaccaccttcagcgcggcaaagtttgcttccttcatcacacagtactccacggggcaggtcagcgtggagatcgagtgggagctgcagaaagagaacagcaaacgctggaaccccgagatccagtatacctccaactacaacaagtctgttaatgtggactttactgtggacactaatggcgtgtattcagagcctcgccccattggcacaagatacctgactcgtaatctgtaa

SEQ ID NO: 3484 - DNA, 2208 bp, Artificial Sequence
  Description of Artificial Sequence: Synthetic polynucleotide
atggctgccgatggttatcttccagattggctcgaggacactctctctgaaggaataagacagtggtggaagctcaaacctggcccaccaccgccaaagcccgcagagcggcataaggacgacagcaggggtcttgtgcttcctgggtacaagtacctcggacccttcaacggactcgacaaaggagagccggtcaacgaggcagacgccgcggccctcgagcacggcaaggcctacgaccggcagctcgacagcggagacaacccgtacctcaagtacaaccacgccgacgcggagtttcaggagcgccttaaagaagatacgtcttttgggggcaacctcgcaagagcagtattccaggcgaaaaagagggttcttgaacctctgggcctggttgaggagcctgttaagacggctccgggaaaaaagaggccggtagagcactctcctgcggagctagattcctcctccggaactggaaagtcgggccaacagcctgcaagaaagagattgaattttggtcagactggagacgcagactccgtacctgacccccagcctctcggacagccaccagcagccccctctggtctgggaactaatacgatggcttcaggcagtggcgcaccaatggcagacaataacgagggcgccgacggagtgggtaattcctcgggaaattggcattgcgattccacatggatgggcgacagagtcatcaccaccagcacccgcacctgggctctgcccacctacaacaaccatctgtacaagcaaatttccagccagtctggggccagcaacgacaaccactactttggctacagcaccccttgggggtattttgacttcaacagattccactgccacttctccccacgtgactggcaaagactcatcaacaacaattggggattccggcccaaaagactcaacttcaagctctttaacattcaagtcaaggaggtcacgcagaatgacggtacgacgacgattgccaataaccttaccagcacggttcaggtgtttactgactcggagtaccagctcccgtacgtcctcggctcggcgcatcaaggatgcctcccgccgttcccagcagacgtcttcatggtgccacagtatggatacctcaccctgaacaacgggagtcaggcggtaggacgctcttcattttactgcctggagtactttccttctcagatgctgcgtaccggaaacaactttaccttcagctacacctttgaggacgttccttttcacagcagctacgctcacagccagagtttggaccgtctcatgaatcctctcatcgaccagtacctgtattacttgagcagaacaaacactccaagcggaaccactacgcagtccaggcttcagttttctcaagccggagcgagtgacattcgggaccagtctaggaactggcttcctggaccctgttaccgccagcagcgagtatcaaagacagctgcggacaacaacaacagtgattactcgtggactggagctaccaagtatcacctcaatggaagagactctctggtgaatccgggcacagccatggccagccacaaggacgatgaagaaaagtattttcctcagagcggggttctcatcttcggaaaacaagactcgggaaaaactaatgtggacattgaaaaggtcatgattacagacgaagaggaaatcaggaccaccaatcccgtggctacggagcagtatggttctgtatctaccaatctccagagcggcaacacacaagcagctacctcagatgtcaacacacaaggcgttcttccaggcatggtctggcaggacagagacgtgtacctgcagggacccatctgggcaaagattccacacacggacggacattttcacccttctcctcttatgggaggatttggaccgaagcaccctcccccgcagattctcatcaagaataccccggtacctgcgaatccttctaccaccttcagcgcggcaaagtttgcttccttcatcacacagtactccacggggcaggtcagcgtggagatcgagtgggagctgcagaaagagaacagcaaacgctggaaccccgagatccagtatacctccaactacaacaagtctgttaatgtggactttactgtggacactaatggcgtgtattcagagcctcgccccattggcacaagatacctgactcgtaatctgtaa

SEQ ID NO: 3485 - DNA, 2208 bp, Artificial Sequence
  Description of Artificial Sequence: Synthetic polynucleotide
atggctgccgatggttatcttccagattggctcgaggacactctctctgaaggaataagacagtggtggaagctcaaacctggcccaccaccgccaaagcccgcagagcggcataaggacgacagcaggggtcttgtgcttcctgggtacaagtacctcggacccttcaacggactcgacaaaggagagccggtcaacgaggcagacgccgcggccctcgagcacgacaaggcctacgaccggcagctcgacagcggagacaacccgtacctcaagtacaaccacgccgacgcggagtttcaggagcgccttaaagaagatacgtcttttgggggcaacctcgcaagagcagtattccaggcgaaaaagagggttcttgaacctctgggcctggttgaggagcctgttaagacggctccgggaaaaaagaggccggtagagcactctcctgcggagctagattcctcctccggaactggaaagtcgggccaacagcctgcaagaaagagattgaattttggtcagactggagacgcagactccgtacctgacccccagcctctcggacagccaccagcagccccctctggtccgggaactaatacgatggcttcaggcagtggcgcaccaatggcagacaataacgagggcgccgacggagtgggtaattcctcgggaaattggcattgcgattccacatggatgggcgacagagtcatcaccaccagcacccgcacctgggctctgcccacctacaacaaccatctgtacaagcaaatttccagccagtctggggccagcaacgacaaccactactttggctacagcaccccttgggggtattttgacttcaacagattccactgccacttctccccacgtgactggcaaagactcatcaacaacaattggggattccggcccaaaagactcaacttcaagctctttaacattcaagtcaaggaggtcacgcagaatgacggtacgacgacgattgccaataaccttaccagcacggttcaggtgtttactgactcggagtaccagctcccgtacgtcctcggctcggcgcatcaaggatgcctcccgccgttcccagcagacgtcttcatggtgccacagtatggatacctcaccctgaacaacgggagtcaggcggtaggacgctcttcattttactgcctggagtactttccttctcagatgctgcgtaccggaaacaactttaccttcagctacacctttgaggacgttccttttcacagcagctacgctcacagccagagtttggaccgtctcatgaatcctctcatcgaccagtacctgtattacttgagcagaacaaacactccaagcggaaccactacgcagtccaggcttcagttttctcaagccggagcgagtgacattcgggaccagtctaggaactggcttcctggaccctgttaccgccagcagcgagtatcaaagacagctgcggacaacaacaacagtgattactcgtggactggagctaccaagtatcacctcaatggaagagactctctggtgaatccgggcacagccatggccagccacaaggacgatgaagaaaagtattttcctcagagcggggttctcatcttcggaaaacaagactcgggaaaaactaatgtggacattgaaaaggtcatgattacagacgaagaggaaatcaggaccaccaatcccgtggctacggagcagtatggttctgtatctaccaatctccagagcggcaacacacaagcagctacctcagatgtcaacacacaaggcgttcttccaggcatggtctggcaggacagagacgtgtacctgcagggacccatctgggcaaagattccacacacggacggacattttcacccttctcctcttatgggaggatttggaccgaagcaccctcccccgcagattctcatcaagaataccccggtacctgcgaatccttctaccaccttcagcgcggcaaagtttgcttccttcatcacacagtactccacggggcaggtcagcgtggagatcgagtgggagctgcagaaagagaacagcaaacgctggaaccccgagatccagtatacctccaactacaacaagtctgttaatgtggactttactgtggacaccaatggcgtgtattcagagcctcgccccattggcacaagatacctgactcgtaatctgtaa

SEQ ID NO: 3486 - DNA, 2208 bp, Artificial Sequence
  Description of Artificial Sequence: Synthetic polynucleotide
atggctgccgatggttatcttccagattggctcgaggacactctctctgaaggaataagacagtggtggaagctcaaacctggcccaccaccgccaaagcccgcagagcggcataaggacgacagcaggggtcttgtgcttcctgggtacaagtacctcggacccttcaacggactcgacaaaggagagccggtcaacgaggcagacgccgcggccctcgagcacgacaaggcctacgaccggcagctcgacagcggagacaacccgtacctcaagtacaaccacgccgacgcggagtttcaggagcgccttaaagaagatacgtcttttgggggcaacctcgcaagagcagtattccaggcgaaaaagagggttcttgaacctctgggcctggttgaggagcctgttaagacggctccgggaaaaaagaggccggtagagcactctcctgcggggccagattcctcctccggaactggaaagtcgggccaacagcctgcaagaaagagattgaattttggtcagactggagacgcagactccgtacctgacccccagcctctcggacagccaccagcagccccctctggtctgggaactaatacgatggcttcaggcagtggcgcaccaatggcagacaataacgagggcgccgacggagtgggtaattcctcgggaaattggcattgcgattccacatggatgggcgacagagtcatcaccaccagcacccgcacctgggctctgcccacctacaacaaccatctgtacaagcaaatttccagccagtctggagccagcaacgacaaccactactttggctacagcaccccttgggggtattttgacttcaacagattccactgccacttctccccacgtgactggcaaagactcatcaacaacaattggggattccggcccaaaagactcaacttcgagctctttaacattcaagtcaaggaggtcacgcagaatgacggtacgacgacgattgccaataaccttaccagcacggttcaggtgtttactgactcggagtaccagctcccgtacgtcctcggctcggcgcatcaaggatgcctcccgccgttcccagcagacgtcttcatggtgccacagtatggatacctcaccctgaacaacgggagtcaggcggtaggacgctcttcattttactgcctggagtactttccttctcagatgctgcgtaccggaaacaactttaccttcagctacacctttgaggacgttccttttcacagcagctacgctcacagccagagtttggaccgtctcatgaatcctctcatcgaccagtacctgtattacttgagcagaacaaacactccaagcggaaccactacgcagtccaggcttcagttttctcaagccggagcgagtgacattcgggaccagtctaggaactggcttcctggaccctgttaccgccagcagcgagtatcaaagacagctgcggacaacaacaacagtgattactcgtggactggagctaccaagtatcacctcaatggaagagactctctggtgaatccgggcacagccatggccagccacaaggacgatgaagaaaagtattttcctcagagcggggttctcatcttcggaaaacaagactcggaaaaaactaatgtggacattgaaaaggtcatgattacagacgaagaggaaatcaggaccaccaatcccgtggctacggagcagtatggttctgtatctaccaatctccagagcggcaacacacaagcagctacctcagatgtcaacacacaaggcgttcttccaggcatggtctggcaggacagagacgtgtacctgcagggacccatctgggcaaagattccacacacggacggacactttcacccttctcctcttatgggaggatttggactgaagcaccctcccccgcagattctcatcaagagtaccccggtacctgcgaatccttctaccaccttcagcgcggcaaagtttgcttccttcatcacacagtactccacggggcaggtcagcgtggagatcgagtgggagctgcagaaagagaacagcaaacgctggaaccccgagatccagtatacctccaactacaacaagtctgttaatgtggactttactgtggacactaatggcgtgtattcagagcctcgccccattggcacaagatacctgactcgtaatctgtaa

SEQ ID NO: 3487 - DNA, 2208 bp, Artificial Sequence
  Description of Artificial Sequence: Synthetic polynucleotide
atggctgccgatggttatcttccagattggctcgaggacactctctctgaaggaataagacagtggtggaagctcaaacctggcccaccaccgccaaagcccgcagagcggcataaggacgacagcaggggtcttgtgcttcctgggtacaagtacctcggacccttcaacggactcgacaaaggagagccggtcaacgaggcagacgccgcggccctcgagcacgacaaggcctacgaccggcagctcgacagcggagacaacccgtacctcaagtacaaccacgccgacgcggagtttcaggagcgccttaaagaagatacgtcttttgggggcaacctcgcaagagcagtattccaggcgaaaaagagggttcttgaacctctgggcctggttgaggagcctgttaagacggctccgggaaaaaagaggccggtagagcactctcctgcggggccagattcctcctccggaactggaaagtcgggccaacagcctgcaagaaagagattgaattttggtcagactggagacgcagactccgtacctgacccccagcctctcggacagccaccagcagccccctctggtctgggaactaatacgatggcttcaggcagtggcgcaccaatggcagacaataacgagggcgccgacggagtgggtaattcctcgggaaattggcattgcgattccacatggatgggcgacagagtcatcaccaccagcacccgcacctgggctctgcccacctacaacaaccatctgtacaagcaaatttccagccagtctggagccagcaacgacaaccactactttggctacagcaccccttgggggtattttgacttcaacagattccactgccacttctccccacgtgactggcaaagactcatcaacaacaattggggattccggcccaaaagactcaacttcgagctctttaacattcaagtcaaggaggtcacgcagaatgacggtacgacgacgattgccaataaccttaccagcacggttcaggtgtttactgactcggagtaccagctcccgtacgtcctcggctcggcgcatcaaggatgcctcccgccgttcccagcagacgtcttcatggtgccacagtatggatacctcaccctgaacaacgggagtcaggcggtaggacgctcttcattttactgcctggagtactttccttctcagatgctgcgtaccggaaacaactttaccttcagctacacctttgaggacgttccttttcacagcagctacgctcacagccagagtttggaccgtctcatgaatcctctcatcgaccagtacctgtattacttgagcagaacaaacactccaagcggaaccactacgcagtccaggcttcagttttctcaagccggagcgagtgacattcgggaccagtctaggaactggcttcctggaccctgttaccgccagcagcgagtatcaaagacagctgcggacaacaacaacagtgattactcgtggactggagctaccaagtatcacctcaatggaagagactctctggtgaatccgggcacagccatggccagccacaaggacgatgaagaaaagtattttcctcagagcggggttctcatcttcggaaaacaagactcgggaaaaactaatgtggacattgaaaaggtcatgattacagacgaagaggaaatcaggaccaccaatcccgtggctacggagcagtatggttctgtatctaccaatctccagagcggcaacacacaagcagctacctcagatgtcaacacacaaggcgttcttccaggcatggtctggcaggacagagacgtgtacctgcagggacccatctgggcaaagattccacacacggacggacactttcacccttctcctcttatgggaggatttggactgaagcaccctcccccgcagattctcatcaagagtaccccggtacctgcgaatccttctaccaccctcagcgcggcaaagtttgcttccttcatcacacagtactccacggggcaggtcagcgtggagatcgagtgggagctgcagaaagagaacagcaaacgctggaaccccgagatccagtatacctccaactacaacaagtctgttaatgtggactttactgtggacactaatggcgtgtattcagagcctcgccccattggcacaagatacctgactcgtaatctgtaa

SEQ ID NO: 3488 - DNA, 2205 bp, Artificial Sequence
  Description of Artificial Sequence: Synthetic polynucleotide
atggctgccgatggttatcttccagattggctcgaggacactctctctgaaggaataagacagtggtggaagctcaaacctggcccaccaccgccaaagcccgcagagcggcataaggacgacagcaggggtcttgtgcttcctgggtacaagtacctcggacccttcaacggactcgacaaaggagagccggtcaacgaggcagacgccgcggccctcgagcacgacaaggcctacgaccggcagctcgacagcggagacaacccgtacctcaagtacaaccacgccgacgcggagtttcaggagcgccttaaagaagatacgtcttttgggggcaacctcgcaagagcagtattccaggcgaaaaagagggttcttgaacctctgggcctggttgaggagcctgttaagacggctccgggaaaaaagaggccggtagagcactctcctgcggggccagattcctcctccggaactggaaagtcgggccaacagcctgcaagaaagagattgaattttggtcagactggagacgcagactccgtacctgacccccagcctctcggacagccaccagcagccccctctggtctgggaactaatacgatggcttcaggcagtggcgcaccaatggcagacaataacgagggcgccgacggagtgggtaattcctcgggaaattggcattgcgattccacatggatgggcgacagagtcatcaccaccagcacccgcacctgggctctgcccacctacaacaaccatctgtacaagcaaatttccagccagtctggagccagcaacgacaaccactactttggctacagcaccccttgggggtattttgacttcaacagattccactgccacttctccccacgtgactggcaaagactcatcaacaacaattggggattccggcccaaaagactcaacttcgagctctttaacattcaagtcaaggaggtcacgcagaatgacggtacgacgacgattgccaataaccttaccagcacggttcaggtgtttactgactcggagtaccagctcccgtacgtcctcggctcggcgcatcaaggatgcctcccgccgttcccagcagacgtcttcatggtgccacagtatggatacctcaccctgaacaacgggagtcaggcggtaggacgctcttcattttactgcctggagtactttccttctcagatgctgcgtaccggaaacaactttaccttcagctacacctttgaggacgttccttttcacagcagctacgctcacagccagagtttggaccgtctcatgaatcctctcatcgaccagtacctgtattacttgagcagaacaaacactccaagcggaaccactacgcagtccaggcttcagttttctcaagccggagcgagtgacattcgggaccagtctaggaactggcttcctggaccctgttaccgccagcagcgagtatcaaagacagctgcggacaacaacagtgattactcgtggactggagctaccaagtatcacctcaatggaagagactctctggtgaatccgggcacagccatggccagccacaaggacgatgaagaaaagtattttcctcagagcggggttctcatcttcggaaaacaagactcgggaaaaactaatgtggacattgaaaaggtcatgattacagacgaagaggaaatcaggaccaccaatcccgtggctacggagcagtatggttctgtatctaccaatctccagagcggcaacacacaagcagctacctcagatgtcaacacacaaggcgttcttccaggcatggtctggcaggacagagacgtgtacctgcagggacccatctgggcaaagattccacacacggacggacactttcacccttctcctcttatgggaggatttggactgaagcaccctcccccgcagattctcatcaagagtaccccggtacctgcgaatccttctaccaccttcagcgcggcaaagtttgcttccttcatcacacagtactccacggggcaggtcagcgtggagatcgagtgggagctgcagaaagagaacagcaaacgctggaaccccgagatccagtatacctccaactacaacaagtctgttaatgtggactttactgtggacactaatggcgtgtattcagagcctcgccccattggcacaagatacctgactcgtaatctgtaa

SEQ ID NO: 3489 - DNA, 2208 bp, Artificial Sequence
  Description of Artificial Sequence: Synthetic polynucleotide
atggctgccgatggttatcttccagattggctcgaggacactctctctgaaggaataagacagtggtggaagctcaaacctggcccaccaccgccaaagcccgcagagcggcataaggacgacagcaggggtcttgtgcttcctgggtacaagtacctcggacccttcaacggactcgacaagggggagccggtcaacgaggcagacgccgcggccctcgagcacgacaaggcctacgaccggcagctcgacagcggagacaacccgtacctcaagtacaaccacgccgacgcggagtttcaggagcgtcttaaagaagatacgtcttttgggggcaacctcggacgaacagtcttccaggcgaaaaagagggttcttgaacctctgggcctggttgaggaacctgttaagacggctccgggaaaaaagaggccggtagagcactctcctgtggagccagactcctcctcgggaaccggaaaggcgggccagcagcctgcaagaaaaagattgaatttcggtcagactggagacgcagactccgtacctgacccccagcctctcggacagccaccagcagccccctctggtctgggaactaatacgatggctacaggcagtggcgcaccaatggcagacaataacgagggcgccgacggagtgggtaattcctcgggaaattggcattgcgattccacatggatgggcgacagagtcatcaccaccagcacccgcacctgggctctgcccacctacaacaaccatctgtacaagcaaatttccagccaatcaggagcatcgaacgacaaccactactttggctacagcaccccctgggggtattttgacttcaacagattccactgccacttttcgccacgtgactggcaaagactcatcaacaacaactggggattccggcccaagagactcagcttcaagctctttaacattcaagtcaaggaggtcacgcagaatgacggtacgacgacgattgccaataaccttaccagcacggttcaggtctttactgactcggagtaccagctcccgtacgtcctcggctcggcgcatcaaggatgcctcccgccgttcccagcagacgtcttcatggtgccacagtatggatacctcaccctgaacaacgggagtcaggcggtaggacgctcttcattttactgcctggagtacttcccttctcagatgcttcgcacgggaaacaactttaccttcagctacacctttgaggacgtgccttttcacagcagctacgctcacagccaaagtctggaccgtctcatgaatcctctcatcgaccaatacctgtattacttgagcaaaacaaacgctccaagcggaaccaccacgatgtccaggcttcagttttctcaggccggagcgagtgacattcgggaccagtctagaaactggcttcctggaccctgttaccgccagcagcgagtatcaaagacagctgcggacaacaacaacagtgattactcgtggactggagctaccaagtaccacctcaatggaagagactctctggtgaacccgggcccagctatggccagccacaaggatgatgaagaaaaatattttcctcagagcggggttctcatcttcgggaaacaaggctcaaataaaactaatgtggacattgaaaaggttatgattacagacgaagaggaaatcaggaccaccaatcccgtggctacggagcagtatggttctgtatctaccaaccttcaaagcggcaacacacaagcagctacctcagatgtcaacacacaaggcgttcttcctggcatggtctggcaggacagagatgtgtacctgcaggggcccatctgggcaaagattcctcacacggacggacactttcacccttctcccctcatgggcggatttggattgaagcaccctcccccacagattctcatcaagaataccccggtacctgcgaatccttcgaccaccttcagtgcggcaaagtttgcttccttcatcacacagtattccacgggacaggtcagcgtggagatagagtgggagctgcagaaggagaacagcaaacgctggaaccccgagatccagtatacttccaactacaacaaatctgttaatgtggactttactgtggacactaatggtgtgtattcagagcctcgccccattggcaccagatacctgactcgtaatctgtaa

SEQ ID NO: 3490 - DNA, 2208 bp, Artificial Sequence
  Description of Artificial Sequence: Synthetic polynucleotide
atggctgccgatggttatcttccagattggctcgaggacactctctctgaaggaataagacagtggtggaagctcaaacctggcccaccaccgccaaagcccgcagagcggcataaggacgacagcaggggtcttgtgcttcctgggtacaagtacctcggacccttcaacggactcgacaagggggagccggtcaacgaggcagacgccgcggccctcgagcacgacaaggcctacgaccggcagctcgacagcggagacaacccgtacctcaagtacaaccacgccgacgcggagtttcaggagcgtcttaaagaagatacgtcttttgggggcaacctcggacgagcagtcttccaggcgaaaaagagggttcttgaacctctgggcctggttgaggaacctgttaagacggctccgggaaaaaagaggccggtagagcactctcctgtggagccagactcctcctcgggaaccggaaaggcgggccagcagcctgcaagaaaaagattgaatttcggtcagactggagacgcagactccgtacctgacccccagcctctcggacagccaccagcagccccctctggtctgggaactaatacgatggctacaggcagtggcgcaccaatggcagacaataacgagggcgccgacggagtgggtaattcctcgggaaattggcattgcgattccacatggatgggcgacagagtcatcaccaccagcacccgcacctgggctctgcccacctacaacaaccatctgtacaagcaaatttccagccaatcaggagcatcgaacgacaaccactactttggctacagcaccccctgggggtattttgacttcaacagattccactgccacttttcgccacgtgactggcaaagactcatcaacaacaactggggattccggcccaagagactcagcttcaagctctttaacattcaagtcaaggaggtcacgcagaatgacggtacgacgacgattgccaataaccttaccagcacggttcaggtctttactgactcggagtaccagctcccgtacgtcctcggctcggcgcatcaaggatgcctcccgccgttcccagcagacgtcttcatggtgccacagtatggatacctcaccctgaacaacgggagtcaggcggtaggacgctcttcattttactgcctggagtacttcccttctcagatgcttcgcacgggaaacaactttaccttcagctacacctttgaggacgtgccttttcacagcagctacgctcacagccaaagtctggaccgtctcatgaatcctctcatcgaccaatacctgtattacttgagcaaaacaaacgctccaagcggaaccaccacgatgtccaggcttcagttttctcaggccggagcgagtgacattcgggaccagtctagaaactggcttcctggaccctgttaccgccagcagcgagtatcaaagacagctgcggacaacaacaacagtgattactcgtggactggagctaccaagtaccacctcaatggaagagactctctggtgaacccgggcccagctatggccaaccacaaggatgatgaagaaaaatattttcctcagagcggggttctcatcttcgggaaacaaggctcaaataaaactaatgtggacattgaaaaggttatgattacagacgaagaggaaatcaggaccaccaatcccgtggctacggagcagtatggttctgtatctaccaaccttcaaagcggcaacacacaagcagctacctcagatgtcaacacacaaggcgttcttcctggcatggtctggcaggacagagatgtgtacctgcaggggcccatctgggcaaagattcctcacacggacggacactttcacccttctcccctcatgggcggatttggattgaagcaccctcccccacagattctcatcaagaataccccggtacctgcgaatccttcgaccaccttcagtgcggcaaagtttgcttccttcatcacacagtattccacgggacaggtcagcgtggagatagagtgggagctgcagaaggagaacagcaaacgctggaaccccgagatccagtatacttccaactacaacaaatctgttaatgtggactttactgtggacactaatggtgtgtattcagagcctcgccccattggcaccagatacctgactcgtaatctgtaa

SEQ ID NO: 3491 - DNA, 2208 bp, Artificial Sequence
  Description of Artificial Sequence: Synthetic polynucleotide
atggctgccgatggttatcttccagattggctcgaggacactctctctgaaggaataagacagtggtggaagctcaaacctggcccaccaccgccaaagcccgcagagcggcataaggacgacagcaggggtcttgtgcttcctgggtacaagtacctcggacccttcaacggactcgacaagggggagccggtcaacgaggcagacgccgcggccctcgagcacgacaaggcctacgaccggcagctcgacagcggagacaacccgtacctcaagtacaaccacgccgacgcggagtttcaggagcgtcttaaagaagatacgtcttttgggggcaacctcggacgagcagtcttccaggcgaaaaagagggttcttgaacctctgggcctggttgaggaacctgttaagacggctccgggaaaaaagaggccggtagagcactctcctgtggagccagactcctcctcgggaaccggaaaggcgggccagcagcctgcaagaaaaagattgaatttcggtcagactggagacgcagactccgtacctgacccccagcctctcggacagccaccagcagccccctctggtctgggaactaatacgatggctacaggcagtggcgcaccaatggcagacaataacgagggcgccgacggagtgggtaattcctcgggaaattggcattgcgattccacatggatgggcgacagagtcatcaccaccagcacccgcacctgggctctgcccacctacaacaaccatctgtacaagcaaatttccagccaatcaggagcatcgaacgacaaccactactttggctacagcaccccctgggggtattttgacttcaacagattccactgccacttttcgccacgtgactggcaaagactcatcaacaacaactggggattccggcccaagagactcagcttcaagctctttaacattcaagtcaaggaggtcacgcagaatgacggtacgacgacgattgccaataaccttaccagcacggttcaggtctttactgactcggagtaccagctcccgtacgtcctcggctcggcgcatcaaggatgcctcccgccgttcccagcagacgtcttcatggtgccacagtatggatacctcaccctgaacaacgggagtcaggcggtaggacgctcttcattttactgcctggagtacttcccttctcagatgcttcgcacgggaaacaactttaccttcagctacacctttgaggacgtgccttttcacagcagctacgctcacagccaaagtctggaccgtctcatgaatcctctcatcgaccaatacctgtattacttgagcaaaacaaacgctccaagcggaaccaccacgatgtccaggcttcagttttctcaggccggagcgagtgacattcgggaccagtctagaaactggcttcctggaccctgttaccgccagcagcgagtatcaaagacagctgcggacaacaacaacagtgattactcgtggactggagctaccaagtaccacctcaatggaagagactctctggtgaacccgggcccagctatggccagccacaaggatgatgaagaaaaatattttcctcagagcggggttctcatcttcgggaaacaaggctcaaataaaactaatgtggacattgaaaaggttatgattacagacgaagaggaaatcaggaccaccaatcccgtggctacggagcagtatggttctgtatctaccaaccttcaaagcggcaacacacaagcagctacctcagatgtcaacacacaaggcgttcttcctggcatggtctggcaggacagagatgtgtacctgcaggggcccatctgggcaaagattcctcacacggacggacactttcacccttctcccctcatgggcggatttggattgaagcaccctcccccacagattctcatcaagaataccccggtacctgcgaatccttcgaccaccttcagtgcggcaaagtttgcttccttcatcacacagtattccacgggacaggtcagcgtggagatagagtgggagctgcagaaggagaacagcaaacgctggaaccccgagatccagtatacttccaactacaacaaatctgttaatgtggactttactgtggacactaatggtgtgtattcagagcctcgccccattggcaccagatacccgactcgtaatctgtaa

SEQ ID NO: 3492 - DNA, 2208 bp, Artificial Sequence
  Description of Artificial Sequence: Synthetic polynucleotide
atggctgccgatggttatcttccagattggctcgaggacactctctctgaaggaataagacagtggtggaagctcaaacctggcccaccaccgccaaagcccgcagagcggcataaggacgacagcaggggtcttgtgcttcctgggtacaagtacctcggacccttcaacggactcgacaagggggagccggtcaacgaggcagacgccgcggccctcgagcacgacaaggcctacgaccggcagctcgacagcggagacaacccgtacctcaagtacaaccacgccgacgcggagtttcaggagcgtcttaaagaagatacgtcttttgggggcaacctcggacgagcagtcttccaggcgaaaaagagggttcttgaacctctgggcctggttgaggaacctgttaagacggctccgggaaaaaagaggccggtagagcactctcctgtggagccagactcctcctcgggaaccggaaaggcgggccagcagcctgcaagaaaaagattgaatttcggtcagactggagacgcagactccgtacctgacccccagcctctcggacagccaccagcagccccctctggtctgggaactaatacgatggctacaggcagtggcgcaccaatggcagacaataacgagggcgccgacggagtgggtaattcctcgggaaattggcattgcgattccacatggatgggcgacagagtcatcaccaccagcacccgcacctgggctctgcccacctacaacaaccatctgtacaagcaaatttccagccaatcaggagcatcgaacgacaaccactactttggctacagcaccccctgggggtattttgacttcaacagattccactgccacttttcgccacgtgactggcaaagactcatcaacaacaactggggattccggcccaagagactcagcttcaagctctttaacattcaagtcaaggaggtcacgcagaatgacggtacgacgacgattgccaataaccttaccagcacggttcaggtctttactgactcggagtaccagctcccgtacgtcctcggctcggcgcatcaaggatgcctcccgccgttcccagcagacgtcttcatggtgccacagtatggatacctcaccctgaacaacgggagtcaggcggtaggacgctcttcattttactgcctggagtacttcccttctcagatgcttcgcacgggaaacaactttaccttcagctacacctttgaggacgtgccttttcacagcagctacgctcacagccaaagtctggaccgtctcatgaatcctctcatcgaccaatacctgtattacttgagcaaaacaaacgctccaagcggaaccaccacgatgtccaggcttcagttttctcaggccggagcgagtgacattcgggaccagtctagaaactggcttcctggaccctgttaccgccagcagcgagtatcaaagacagctgcggacaacaacaacagtgattactcgtggactggagctaccaagtaccacctcaatggaagagactctctggtgaacccgggcccagctatggccagccacaaggatgatgaagaaaaatattttcctcagagcggggttctcatcttcgggaaacaaggctcaaataaaactaatgtggacattgaaaaggttatgattacagacgaagaggaaatcaggaccaccaatcccgtggctacggagcagtatggttctgtatctaccaaccttcaaagcggcaacacacaagcagctacctcagatgtcaacacacaaggcgttcttcctggcatggtctggcaggacagagatgtgtacctgcaggggcccatctgggcaaagattcctcacacggacggacactttcacccttctcccctcatgggcggatttggattgaagcaccctcccccacagattctcatcaagaataccccggtacctgcgaatccttcgaccaccttcagtgcggcaaagtttgcttccttcatcacacagtattccacgggacaggtcagcgtggagatagagtgggagctgcagaaggagaacagcaaacgctggaaccccgagatccagtatacttccaactacaacaaatctgttaatgtggactttactgtgggcactaatggtgtgtattcagagcctcgccccattggcaccagatacctgactcgtaatctgtaa

SEQ ID NO: 3493 - DNA, 2208 bp, Artificial Sequence
  Description of Artificial Sequence: Synthetic polynucleotide
atggctgccgatggttatcttccagattggctcgaggacactctctctgaaggaataagacagtggtggaagctcaaacctggcccaccaccgccaaagcccgcagagcggcataaggacgacagcaggggtcttgtgcttcctgggtacaagtacctcggacccttcaacggactcgacaagggggagccggtcaacgaggcagacgccgcggccctcgagcacgacaaggcctacgaccggcagctcgacagcggagacaacccgtacctcaagtacaaccacgccgacgcggagtttcaggagcgtcttaaagaagatacgtcttttgggggcaacctcggacgagcagtcttccaggcgaaaaagagggttcttgaacctctgggcctggttgaggaacctgttaagacggctccgggaaaaaagaggccggtagagcactctcctgtggagccagactcctcctcgggaaccggaaaggcgggccagcagcctgcaagaaaaagattgaatttcggtcagactggagacgcagactccgtacctgacccccagcctctcggacagccaccagcagccccctctggtctgggaactaatacgatggctacaggcagtggcgcaccaatggcagacaataacgagggcgccgacggagtgggtaattcctcgggaaattggcattgcgattccacatggatgggcgacagagtcatcaccaccagcacccgcacctgggctctgcccacctacaacaaccatctgtacaagcaaatttccagccaatcaggagcatcgaacgacaaccactactttggctacagcaccccctgggggtattttgacttcaacagattccactgccacttttcgccacgtgactggcaaagactcatcaacaacaactggggattccggcccaagagactcagcttcaagctctttaacattcaagtcaaggaggtcacgcagaatgacggtacgacgacgattgccaataaccttaccagcacggttcaggtctttactgactcggagtaccagctcccgtacgtcctcggctcggcgcatcaaggatgcctcccgccgttcccagcagacgtcttcatggtgccacagtatggatacctcaccctgaacaacgggagtcaggcggtaggacgctcttcattttactgcctggagtacttcccttctcagatgcttcgcacgggaaacaactttaccttcagctacacctttgaggacgtgccttttcacagcagctacgctcacagccaaagtctggaccgtctcatgaatcctctcatcgaccaatacctgtattacttgagcaaaacaaacgctccaagcggaaccaccacgatgtccaggcttcagttttctcaggccggagcgagtgacattcgggaccagtctagaaactggcttcctggaccctgttaccgccagcagcgagtatcaaagacagctgcggacaacaacaacagtgattactcgtggactggagctaccaagtaccacctcaatggaagagactctctggtgaacccgggcccagctatggccagccacaaggatgatgaagaaaaatattttcctcagagcggggttctcatcttcgggaaacaaggctcaaataaaactaatgtggacattgaaaaggttatgattacagacgaagaggaaatcaggaccaccaatcccgtggctacggagcagtatggttctgtatctaccaaccttcaaagcggcaacacacaagcagctacctcagatgtcaacacacaaggcgttcttcctggcatggtctggcaggacagagatgtgtacctgcaggggcccatctgggcaaagattcctcacacggacggacactttcacccttctcccctcatgggcggatttggattgaagtaccctcccccacagattctcatcaagaataccccggtacctgcgaatccttcgaccaccttcagtgcggcaaagtttgcttccttcatcacacagtattccacgggacaggtcagcgtggagatagagtgggagctgcagaaggagaacagcaaacgctggaaccccgagatccagtatacttccaactacaacaaatctgttaatgtggactttactgtggacactaatggtgtgtattcagagcctcgccccattggcaccagatacctgactcgtaatctgtaa

SEQ ID NO: 3494 - DNA, 2208 bp, Artificial Sequence
  Description of Artificial Sequence: Synthetic polynucleotide
atggctgccgatggttatcttccagattggctcgaggacactctctctgaaggaataagacagtggtggaagctcaaacctggcccaccaccgccaaagcccgcagagcggcataaggacgacagcaggggtcttgtgcttcctgggtacaagtacctcggacccttcaacggactcgacaagggggagccggtcaacgaggcagacgccgcggccctcgagcacgacaaggcctacgaccggcagctcgacagcggagacaacccgtacctcaagtacaaccacgccgacgcggagtttcaggagcgtcttaaagaagatacgtcttttgggggcaacctcggacgagcagtcttccaggcgaaaaagagggttcttgaacctctgggcctggttgaggaacctgttaagacggctccgggaaaaaagaggccggtagagcactctcctgtggagccagactcctcctcgggaaccggaaaggcgggccagcagcctgcaagaaaaagattgaatttcggtcagactggagacgcagactccgtacctgacccccagcctctcggacagccaccagcagccccctctggtctgggaactaatacgatggctacaggcagtggcgcaccaatggcagacaataacgagggcgccgacggagtgggtaattcctcgggaaattggcattgcgattccacatggatgggcgacagagtcatcaccaccagcacccgcacctgggctctgcccacctacaacaaccatctgtacaagcaaatttccggccaatcaggagcatcgaacgacaaccactactttggctacagcaccccctgggggtattttgacttcaacagattccactgccacttttcgccacgtgactggcaaagactcatcaacaacaactggggattccggcccaagagactcagcttcaagctctttaacattcaagtcaaggaggtcacgcagaatgacggtacgacgacgattgccaataaccttaccagcacggttcaggtctttactgactcggagtaccagctcccgtacgtcctcggctcggcgcatcaaggatgcctcccgccgttcccagcagacgtcttcatggtgccacagtatggatacctcaccctgaacaacgggagtcaggcggtaggacgctcttcattttactgcctggagtacttcccttctcagatgcttcgcacgggaaacaactttaccttcagctacacctttgaggacgtgccttttcacagcagctacgctcacagccaaagtctggaccgtctcatgaatcctctcatcgaccaatacctgtattacttgagcaaaacaaacgctccaagcggaaccaccacgatgtccaggcttcagttttctcaggccggagcgagtgacattcgggaccagtctagaaactggcttcctggaccctgttaccgccagcagcgagtatcaaagacagctgcggacaacaacaacagtgattactcgtggactggagctaccaagtaccacctcaatggaagagactctctggtgaacccgggcccagctatggccagccacaaggatgatgaagaaaaatattttcctcagagcggggttctcatcttcgggaaacaaggctcaaataaaactaatgtggacattgaaaaggttatgattacagacgaagaggaaatcaggaccaccaatcccgtggctacggagcagtatggttctgtatctaccaaccttcaaagcggcaacacacaagcagctacctcagatgtcaacacacaaggcgttcttcctggcatggtctggcaggacagagatgtgtacctgcaggggcccatctgggcaaagattcctcacacggacggacactttcacccttctcccctcatgggcggatttggattgaagcaccctcccccacagattctcatcaagaataccccggtacctgcgaatccttcgaccaccttcagtgcggcaaagtttgcttccttcatcacacagtattccacgggacaggtcagcgtggagatagagtgggagctgcagaaggagaacagcaaacgctggaaccccgagatccagtatacttccaactacaacaaatctgttaatgtggactttactgtggacactaatggtgtgtattcagagcctcgccccattggcaccagatacctgactcgtaatctgtaa

SEQ ID NO: 3495 - DNA, 2208 bp, Artificial Sequence
  Description of Artificial Sequence: Synthetic polynucleotide
atggctgccgatggttatcttccagattggctcgaggacactctctctgaaggaataagacagtggtggaagctcaaacctggcccaccaccgccaaagcccgcagagcggcataaggacgacagcaggggtcttgtgcttcctgggtacaagtacctcggacccttcaacggactcgacaagggggagccggtcaacgaggcagacgccgcggccctcgagcacgacaaggcctacgaccggcagctcgacagcggagacaacccgtacctcaagtacaaccacgccgacgcggagtttcaggagcgtcttaaagaagatacgtcttttgggggcaacctcggacgagcagtcttccaggcgaaaaagagggttcttgaacctctgggcctggttgaggaacctgttaagacggctccgggaaaaaagaggccggtagagcactctcctgtggagccagactcctcctcgggaaccggaaaggcgggccagcagcctgcaagaaaaagattgaatttcggtcagactggagacgcagactccgtacctgacccccagcctctcggacagccaccagcagccccctctggtctgggaactaatacgatggctacaggcagtggcgcaccaatggcagacaataacgagggcgccgacggagtgggtaattcctcgggaaattggcattgcgattccacatggatgggcgacagagtcatcaccaccagcacccgcacctgggctctgcccacctacaacaaccatctgtacaagcaaatttccagccaatcaggagcatcgaacgacaaccactactttggctacagcaccccctgggggtattttgacttcaacagattccactgccacttttcgccacgtgactggcaaagactcatcaacaacaactggggattccggcccaagagactcagcttcaagctctttaacattcaagtcaaggaggtcacgcagaatgacggtacgacgacgattgccaataaccttaccagcacggttcaggtctttactgactcggagtaccggctcccgtacgtcctcggctcggcgcatcaaggatgcctcccgccgttcccagcagacgtcttcatggtgccacagtatggatacctcaccctgaacaacgggagtcaggcggtaggacgctcttcattttactgcctggagtacttcccttctcagatgcttcgcacgggaaacaactttaccttcagctacacctttgaggacgtgccttttcacagcagctacgctcacagccaaagtctggaccgtctcatgaatcctctcatcgaccaatacctgtattacttgagcaaaacaaacgctccaagcggaaccaccacgatgtccaggcttcagttttctcaggccggagcgagtgacattcgggaccagtctagaaactggcttcctggaccctgttaccgccagcagcgagtatcaaagacagctgcggacaacaacaacagtgattactcgtggactggagctaccaagtaccacctcaatggaagagactctctggtgaacccgggcccagctatggccagccacaaggatgatgaagaaaaatattttcctcagagcggggttctcatcttcgggaaacaaggctcaaataaaactaatgtggacattgaaaaggttatgattacagacgaagaggaaatcaggaccaccaatcccgtggctacggagcagtatggttctgtatctaccaaccttcaaagcggcaacacacaagcagctacctcagatgtcaacacacaaggcgttcttcctggcatggtctggcaggacagagatgtgtacctgcaggggcccatctgggcaaagattcctcacacggacggacactttcacccttctcccctcatgggcggatttggattgaagcaccctcccccacagattctcatcaagaataccccggtacctgcgaatccttcgaccaccttcagtgcggcaaagtttgcttccttcatcacacagtattccacgggacaggtcagcgtggagatagagtgggagctgcagaaggagaacagcaaacgctggaaccccgagatccagtatacttccaactacaacaaatctgttaatgtggactttactgtggacactaatggtgtgtattcagagcctcgccccattggcaccagatacctgactcgtaatctgtaa

SEQ ID NO: 3496 - DNA, 2208 bp, Artificial Sequence
  Description of Artificial Sequence: Synthetic polynucleotide
atggctgccgatggttatcttccagattggctcgaggacactctctctgaaggaataagacagtggtggaagctcaaacctggcccaccaccgccaaagcccgcagagcggcataaggacgacagcaggggtcttgtgcttcctgggtacaagtacctcggacccttcaacggactcgacaagggggagccggtcaacgaggcagacgccgcggccctcgagcacgacaaggcctacgaccggcagctcgacagcggagacaacccgtacctcaagtacaaccacgccgacgcggagtttcaggagcgtcttaaagaagatacgtcttttgggggcaacctcggacgagcagtcttccaggcgaaaaagagggttcttgaacctctgggcctggttgaggaacctgttaagacggctccgggaaaaaagaggccggtagagcactctcctgtggagccagactcctcctcgggaaccggaaaggcgggccagcagcctgcaagaaaaagattgaatttcggtcagactggagacgcagactccgtacctgacccccagcctctcggacagccaccagcagccccctctggtctgggaactaatacgatggctacaggcagtggcgcaccaatggcagacaataacgagggcgccgacggagtgggtaattcctcgggaaattggcattgcgattccacatggatgggcgacagagtcatcaccaccagcacccgcacctgggctctgcccacctacaacaaccatctgtacaagcaaatttccagccaatcaggagcatcgaacgacaaccactactttggctacagcaccccctgggggtattttgacttcaacagattccactgccacttttcgccacgtgactggcaaagactcatcaacaacaactggggattccggcccaagagactcagcttcaagctctttaacattcaagtcaaggaggtcacgcagaatgacggtacgacgacgattgccaataaccttaccagcacggttcaggtctttactgactcggagtaccagctcccgtacgtcctcggctcggcgcatcgaggatgcctcccgccgttcccagcagacgtcttcatggtgccacagtatggatacctcaccctgaacaacgggagtcaggcggtaggacgctcttcattttactgcctggagtacttcccttctcagatgcttcgcacgggaaacaactttaccttcagctacacctttgaggacgtgccttttcacagcagctacgctcacagccaaagtctggaccgtctcatgaatcctctcatcgaccaatacctgtattacttgagcaaaacaaacgctccaagcggaaccaccacgatgtccaggcttcagttttctcaggccggagcgagtgacattcgggaccagtctagaaactggcttcctggaccctgttaccgccagcagcgagtatcaaagacagctgcggacaacaacaacagtgattactcgtggactggagctaccaagtaccacctcaatggaagagactctctggtgaacccgggcccagctatggccagccacaaggatgatgaagaaaaatattttcctcagagcggggttctcatcttcgggaaacaaggctcaaataaaactaatgtggacattgaaaaggttatgattacagacgaagaggaaatcaggaccaccaatcccgtggctacggagcagtatggttctgtatctaccaaccttcaaagcggcaacacacaagcagctacctcagatgtcaacacacaaggcgttcttcctggcatggtctggcaggacagagatgtgtacctgcaggggcccatctgggcaaagattcctcacacggacggacactttcacccttctcccctcatgggcggatttggattgaagcaccctcccccacagattctcatcaagaataccccggtacctgcgaatccttcgaccaccttcagtgcggcaaagtttgcttccttcatcacacagtattccacgggacaggtcagcgtggagatagagtgggagctgcagaaggagaacagcaaacgctggaaccccgagatccagtatacttccaactacaacaaatctgttaatgtggactttactgtggacactaatggtgtgtattcagagcctcgccccattggcaccagatacctgactcgtaatctgtaa

SEQ ID NO: 3497 - DNA, 2208 bp, Artificial Sequence
  Description of Artificial Sequence: Synthetic polynucleotide
atggctgccgatggttatcttccagattggctcgaggacactctctctgaaggaataagacagtggtggaagctcaaacctggcccaccaccgccaaagcccgcagagcggcataaggacgacagcaggggtcttgtgcttcctgggtacaagtacctcggacccttcaacggactcgacaagggggagccggtcaacgaggcagacgccgcggccctcgagcacgacaaggcctacgaccggcagctcgacagcggagacaacccgtacctcaagtacaaccacgccgacgcggagtttcaggagcgtcttaaagaagatacgtcttttgggggcaacctcggacgagcagtcttccaggcgaaaaagagggttcttgaacctctgggcctggttgaggaacctgttaagacggctccgggaaaaaagaggccggtagagcactctcctgtggagccagactcctcctcgggaaccggaaaggcgggccagcagcctgcaagaaaaagattgaatttcggtcagactggagacgcagactccgtacctgacccccagcctctcggacagccaccagcagccccctctggtctgggaactaatacgatggctacaggcagtggcgcaccaatggcagacaataacgagggcgccgacggagtgggtaattcctcgggaaattggcattgcgattccacatggatgggcgacagagtcatcaccaccagcacccgcacctgggctctgcccacctacaacaaccatctgtacaagcaaatttccagccaatcaggagcatcgaacgacaaccactactttggctacagcaccccctgggggtattttgacttcaacagattccactgccacttttcgccacgtgactggcaaagactcatcaacaacaactggggattccggcccaagagactcagcttcaagctctttaacattcaagtcaaggaggtcacgcagaatgacggtacgacgacgattgccaataaccttaccagcacggttcaggtctttactgactcggagtaccagctcccgtacgtcctcggctcggcgcatcaaggatgcctcccgccgttcccagcagacgtcttcatggtgccacagtatggatacctcaccctgaacaacgggagtcaggcggtaggacgctcttcattttactgcctggagtacttcccttctcagatgcttcgcgcgggaaacaactttaccttcagctacacctttgaggacgtgccttttcacagcagctacgctcacagccaaagtctggaccgtctcatgaatcctctcatcgaccaatacctgtattacttgagcaaaacaaacgctccaagcggaaccaccacgatgtccaggcttcagttttctcaggccggagcgagtgacattcgggaccagtctagaaactggcttcctggaccctgttaccgccagcagcgagtatcaaagacagctgcggacaacaacaacagtgattactcgtggactggagctaccaagtaccacctcaatggaagagactctctggtgaacccgggcccagctatggccagccacaaggatgatgaagaaaaatattttcctcagagcggggttctcatcttcgggaaacaaggctcaaataaaactaatgtggacattgaaaaggttatgattacagacgaagaggaaatcaggaccaccaatcccgtggctacggagcagtatggttctgtatctaccaaccttcaaagcrgcaacacacaagcagctacctcagatgtcaacacacaaggcgttcttcctggcatggtctggcaggacagagatgtgtacctgcaggggcccatctgggcaaagattcctcacacggacggacactttcacccttctcccctcatgggcggatttggattgaagcaccctcccccacagattctcatcaagaataccccggtacctgcgaatccttcgaccaccttcagtgcggcaaagtttgcttccttcatcacacagtattccacgggacaggtcagcgtggagatagagtgggagctgcagaaggagaacagcaaacgctggaaccccgagatccagtatacttccaactacaacaaatctgttaatgtggactttactgtggacactaatggtgtgtattcagagcctcgccccattggcaccagatacctgactcgtaatctgtaa

SEQ ID NO: 3498 - DNA, 2208 bp, Artificial Sequence
  Description of Artificial Sequence: Synthetic polynucleotide
atggctgccgatggttatcttccagattggctcgaggacactctctctgaaggaataagacagtggtggaagctcaaacctggcccaccaccgccaaagcccgcagagcggcataaggacgacagcaggggtcttgtgcttcctgggtacaagtacctcggacccttcaacggactcgacaagggggagccggtcaacgaggcagacgccgcggccctcgagcacgacaaggcctacgaccggcagctcgacagcggagacaacccgtacctcaagtacaaccacgccgacgcggagtttcaggagcgtcttaaagaagatacgtcttttgggggcaacctcggacgagcagtcttccaggcgaaaaagagggttcttgaacctctgggcctggttgaggaacctgttaagacggctccgggaaaaaagaggccggtagagcactctcctgtggagccagactcctcctcgggaaccggaaaggcgggccagcagcctgcaagaaaaagattgaatttcggtcagactggagacgcagactccgtacctgacccccagcctctcggacagccaccagcagccccctctggtctgggaactaatacgatggctacaggcagtggcgcaccaatggcagacaataacgagggcgccgacggagtgggtaattcctcgggaaattggcattgcgattccacatggatgggcgacagagtcatcaccaccagcacccgcacctgggctctgcccacctacaacaaccatctgtacaagcaaatttccagccaatcaggagcatcgaacgacaaccactactttggctacagcaccccctgggggtattttgacttcaacagattccactgccacttttcgccacgtgactggcaaagactcatcaacaacaactggggattccggcccaagagactcggcttcaagctctttaacattcaagtcaaggaggtcacgcagaatgacggtacgacgacgattgccaataaccttaccagcacggttcaggtctttactgactcggagtaccagctcccgtacgtcctcggctcggcgcatcaaggatgcctcccgccgttcccagcagacgtcttcatggtgccacagtatggatacctcaccctgaacaacgggagtcaggcggtaggacgctcttcattttactgcctggagtacttcccttctcagatgcttcgcacgggaaacaactttaccttcagctacacctttgaggacgtgccttttcacagcagctacgctcacagccaaagtctggaccgtctcatgaatcctctcatcgaccaatacctgtattacttgagcaaaacaaacgctccaagcggaaccaccacgatgtccaggcttcagttttctcaggccggagcgagtgacattcgggaccagtctagaaactggcttcctggaccctgttaccgccagcagcgagtatcaaagacagctgcggacaacaacaacagtgattactcgtggactggagctaccaagtaccacctcaatggaagagactctctggtgaacccgggcccagctatggccagccacaaggatgatgaagaaaaatattttcctcagagcggggttctcatcttcgggaaacaaggctcaaataaaactaatgtggacattgaaaaggttatgattacagacgaagaggaaatcaggaccaccaatcccgtggctacggagcagtatggttctgtatctaccaaccttcaaagcggcaacacacaagcagctacctcagatgtcaacacacaaggcgttcttcctggcatggtctggcaggacagagatgtgtacctgcaggggcccatctgggcaaagattcctcacacggacggacactttcacccttctcccctcatgggcggatttggattgaagcaccctcccccacagattctcatcaagaataccccggtacctgcgaatccttcgaccaccttcagtgcggcaaagtttgcttccttcatcacacagtattccacgggacaggtcagcgtggagatagagtgggagctgcagaaggagaacagcaaacgctggaaccccgagatccagtatacttccaactacaacaaatctgttaatgtggactttactgtggacactaatggtgtgtattcagagcctcgccccattggcaccagatacctgactcgtaatctgtaa

SEQ ID NO: 3499 - DNA, 2208 bp, Artificial Sequence
  Description of Artificial Sequence: Synthetic polynucleotide
atggctgccgatggttatcttccagattggctcgaggacactctctctgaaggaataagacagtggtggaagctcaaacctggcccaccaccgccaaagcccgcagagcggcataaggacgacagcaggggtcttgtgcttcctgggtacaagtacctcggacccttcaacggactcgacaagggggagccggtcaacgaggcagacgccgcggccctcgagcacgacaaggcctacgaccggcagctcgacagcggagacaacccgtacctcaagtacaaccacgccgacgcggagtttcaggagcgtcttaaagaagatacgtcttttgggggcaacctcggacgagcagtcttccaggcgaaaaagagggttcttgaacctctgggcctggttgaggaacctgttaagacggctccgggaaaaaagaggccggtagagcactctcctgtggagccagactcctcctcgggaaccggaaaggcgggccagcagcctgcaagaaaaagattgaatttcggtcagactggagacgcagactccgtacctgacccccagcctctcggacagccaccagcagccccctctggtctgggaactaatacgatggctacaggcagtggcgcaccaatggcagacaataacgagggcgccgacggagtgggtaattcctcgggaaattggcattgcgattccacatggatgggcgacagagtcatcaccaccagcacccgcacctgggctctgcccacctacaacaaccatctgtacaagcaaatttccagccaatcaggagtatcgaacgacaaccactactttggctacagcaccccctgggggtattttgacttcaacagattccactgccacttttcgccacgtgactggcaaagactcatcaacaacaactggggattccggcccaagagactcagcttcaagctctttaacattcaagtcaaggaggtcacgcagaatgacggtacgacgacgattgccaataaccttaccagcacggttcaggtctttactgactcggagtaccagctcccgtacgtcctcggctcggcgcatcaaggatgcctcccgccgttcccagcagacgtcttcatggtgccacagtatggatacctcaccctgaacaacgggagtcaggcggtaggacgctcttcattttactgcctggagtacttcccttctcagatgcttcgcacgggaaacaactttaccttcagctacacctttgaggacgtgccttttcacagcagctacgctcacagccaaagtctggaccgtctcatgaatcctctcatcgaccaatacctgtattacttgagcaaaacaaacgctccaagcggaaccaccacgatgtccaggcttcagttttctcaggccggagcgagtgacattcgggaccagtctagaaactggcttcctggaccctgttaccgccagcagcgagtatcaaagacagctgcggacaacaacaacagtgattactcgtggactggagctaccaagtaccacctcaatggaagagactctctggtgaacccgggcccagctatggccagccacaaggatgatgaagaaaaatattttcctcagagcggggttctcatcttcgggaaacaaggctcaaataaaactaatgtggacattgaaaaggttatgattacagacgaagaggaaatcaggaccaccaatcccgtggctacggagcagtatggttctgtatctaccaaccttcaaagcggcaacacacaagcagctacctcagatgtcaacacacaaggcgttcttcctggcatggtctggcaggacagagatgtgtacctgcaggggcccatctgggcaaagattcctcacacggacggacactttcacccttctcccctcatgggcggatttggattgaagcaccctcccccacagattctcatcaagaataccccggtacctgcgaatccttcgaccaccttcagtgcggcaaagtttgcttccttcatcacacagtattccacgggacaggtcagcgtggagatagagtgggagctgcagaaggagaacagcaaacgctggaaccccgagatccagtatacttccaactacaacaaatctgttaatgtggactttactgtggacactaatggtgtgtattcagagcctcgccccattggcaccagatacctgactcgtaatctgtaa

SEQ ID NO: 3500 - DNA, 2208 bp, Artificial Sequence
  Description of Artificial Sequence: Synthetic polynucleotide
atggctgccgatggttatcttccagattggctcgaggacactctctctgaaggaataagacagtggtggaagctcaaacctggcccaccaccgccaaagcccgcagagcggcataaggacgacagcaggggtcttgtgcttcctgggtacaagtacctcggacccttcaacggactcgacaagggggagccggtcaacgaggcagacgccgcggccctcgagcacgacaaggcctacgaccggcagctcgacagcggagacaacccgtacctcaagtacaaccacgccgacgcggagtttcaggagcgtcttaaagaagatacgtcttttgggggcaacctcggacgagcagtcttccaggcgaaaaagagggttcttgaacctctgggcctggttgaggaacctgttaagacggctccgggaaaaaagaggccggtagagcactctcctgtggagccagactcctcctcgggaaccggaaaggcgggccagcagcctgcaagaaaaagattgaatttcggtcagactggagacgcagactccgtacctgacccccagcctctcggacagccaccagcagccccctctggtctgggaactaatacgatggctacaggcagtggcgcaccaatggcagacaataacgagggcgccgacggagtgggtaattcctcgggaaattggcattgcgattccacatggatgggcgacagagtcatcaccaccagcacccgcacctgggctctgcccacctacaacaaccatctgtacaagcaaatttccagccaatcaggagcatcgaacgacaaccactactttggctacagcaccccctgggggtattttgacttcaacagattccactgccacttttcgccacgtgactggcaaagactcatcaacaacaactggggattccggcccaagagactcagcttcaagctctttaacattcaagtcaaggaggtcacgcagaatgacggtacgacgacgattgccaataaccttaccagcacggttcaggtctttactgactcggagtaccagctcccgtacgtcctcggctcggcgcatcaaggatgcctcccgccgttcccagcagacgtcttcatggtgccacagtatggatacctcaccctgaacaacgggagtcaggcggtaggacgctcttcattttactgcctggagtacttcccttctcagatgcttcgcacgggaaacaactttaccttcagctacacctttgaggacgtgccttttcacagcagctacgctcacagccaaagtctggaccgtctcatgaatcctctcatcgaccaatacctgtattacttgagcaaaacaaacgctccaagcggaaccaccacgatgtccaggcttcagttttctcaggccggagcgagtgacattcgggaccagtctagaaactggcttcctggaccctgttaccgccagcagcgagtatcaaagacagctgcggacaacaacaacagtgattactcgtggactggagctaccaagtaccacctcaatggaagagactctctggtgaacccgggcccagctatggccagccacaaggatgatgaagaaaaatattttcctcagagcggggttctcatcttcgggaaacaaggctcaaataaaactaatgtggacattgaaaaggttatgattacagacgaagaggaaatcaggaccaccaatcccatggctacggagcagtatggttctgtatctaccaaccttcaaagcggcaacacacaagcagctacctcagatgtcaacacacaaggcgttcttcctggcatggtctggcaggacagagatgtgtacctgcaggggcccatctgggcaaagattcctcacacggacggacactttcacccttctcccctcatgggcggatttggattgaagcaccctcccccacagattctcatcaagaataccccggtacctgcgaatccttcgaccaccttcagtgcggcaaagtttgcttccttcatcacacagtattccacgggacaggtcagcgtggagatagagtgggagctgcagaaggagaacagcaaacgctggaaccccgagatccagtatacttccaactacaacaaatctgttaatgtggactttactgtggacactaatggtgtgtattcagagcctcgccccattggcaccagatacctgactcgtaatctgtaa

SEQ ID NO: 3501 - DNA, 2208 bp, Artificial Sequence
  Description of Artificial Sequence: Synthetic polynucleotide
atggctgccgatggttatcttccagattggctcgaggacactctctctgaaggaataagacagtggtggaagctcaaacctggcccaccaccgccaaagcccgcagagcggcataaggacgacagcaggggtcttgtgcttcctgggtacaagtacctcggacccttcaacggactcgacaagggggagccggtcaacgaggcagacgccgcggccctcgagcacgacaaggcctacgaccggcagctcgacagcggagacaacccgtacctcaagtacaaccacgccgacgcggagtttcaggagcgtcttaaagaagatacgtcttttgggggcaacctcggacgagcagtcttccaggcgaaaaagagggttcttgaacctctgggcctggttgaggaacctgttaagacggctccgggaaaaaagaggccgatagagcactctcctgtggagccagactcctcctcgggaaccggaaaggcgggccagcagcctgcaagaaaaagattgaatttcggtcagactggagacgcagactccgtacctgacccccagcctctcggacagccaccagcagccccctctggtctgggaactaatacgatggctacaggcagtggcgcaccaatggcagacaataacgagggcgccgacggagtgggtaattcctcgggaaattggcattgcgattccacatggatgggcgacagagtcatcaccaccagcacccgcacctgggctctgcccacctacaacaaccatctgtacaagcaaatttccagccaatcaggagcatcgaacgacaaccactactttggctacagcaccccctgggggtattttgacttcaacagattccactgccacttttcgccacgtgactggcaaagactcatcaacaacaactggggattccggcccaagagactcagcttcaagctctttaacattcaagtcaaggaggtcacgcagaatgacggtacgacgacgattgccaataaccttaccagcacggttcaggtctttactgactcggagtaccagctcccgtacgtcctcggctcggcgcatcaaggatgcctcccgccgttcccagtagacgtcttcatggtgccacagtatggatacctcaccctgaacaacgggagtcaggcggtaggacgctcttcattttactgcctggagtacttcccttctcagatgcttcgcacgggaaacaactttaccttcagctacacctttgaggacgtgccttttcacagcagctacgctcacagccaaagtctggaccgtctcatgaatcctctcatcgaccaatacctgtattacttgagcaaaacaaacgctccaagcggaaccaccacgatgtccaggcttcagttttctcaggccggagcgagtgacattcgggaccagtctagaaactggcttcctggaccctgttaccgccagcagcgagtatcaaagacagctgcggacaacaacaacagtgattactcgtggactggagctaccaagtaccacctcaatggaagagactctctggtgaacccgggcccagctatggccagccacaaggatgatgaagaaaaatattttcctcagagcggggttctcatcttcgggaaacaaggctcaaataaaactaatgtggacattgaaaaggttatgattacagacgaagaggaaatcaggaccaccaatcccgtggctacggagcagtatggttctgtatctaccaaccttcaaagcggcaacacacaagcagctacctcagatgtcaacacacaaggcgttcttcctggcatggtctggcaggacagagatgtgtacctgcaggggcccatctgggcaaagattcctcacacggacggacactttcacccttctcccctcatgggcggatttggattgaagcaccctcccccacagattctcatcaagaataccccggtacctgcgaatccttcgaccaccttcagtgcggcaaagtttgcttccttcatcacacagtattccacgggacaggtcagcgtggagatagagtgggagctgcagaaggagaacagcaaacgctggaaccccgagatccagtatacttccaactacaacaaatctgttaatgtggactttactgtggacactaatggtgtgtattcagagcctcgccccattggcaccagatacctgactcgtaatctgtaa

SEQ ID NO: 3502 - DNA, 2208 bp, Artificial Sequence
  Description of Artificial Sequence: Synthetic polynucleotide
atggctgccgatggttatcttccagattggctcgaggacactctctctgaaggaataagacagtggtggaagctcaaacctggcccaccaccgccaaagcccgcagagcggcataaggacgacagcaggggtcttgtgcttcctgggtacaagtacctcggacccttcaacggactcgacaagggggagccggtcaacgaggcagacgccgcggccctcgagcacgacaaggcctacgaccggcagctcgacagcggagacaacccgtacctcaagtacaaccacgccgacgcggagtttcaggagcgtcttaaagaagatacgtcttttgggggcaacctcggacgagcagtcttccaggcgaaaaagagggttcttgaacctctgggcctggttgaggaacctgttaagacggctccgggaaaaaagaggccggtagagcactctcctgtggagccagactcctcctcgggaaccggaaaggcgggccagcagcctgcaagaaaaagattgaatttcggtcagactggagacgcagactccgtacctgacccccagcctctcggacagccaccagcagccccctctggtctgggaactaatacgatgactacaggcagtggcgcaccaatggcagacaataacgagggcgccgacggagtgggtaattcctcgggaaattggcattgcgattccacatggatgggcgacagagtcatcaccaccagcacccgcacctgggctctgcccacctacaacaaccatctgtacaagcaaatttccagccaatcaggagcatcgaacgacaaccactactttggctacagcaccccctgggggtattttgacttcaacagattccactgccacttttcgccacgtgactggcaaagactcatcaacaacaactggggattccggcccaagagactcagcttcaagctctttaacattcaagtcaaggaggtcacgcagaatgacggtacgacgacgattgccaataaccttaccagcacggttcaggtctttactgactcggagtaccagctcccgtacgtcctcggctcggcgcatcaaggatgcctcccgccgttcccagcagacgtcttcatggtgccacagtatggatacctcaccctgaacaacgggagtcaggcggtaggacgctcttcattttactgcctggagtacttcccttctcagatgcttcgcacgggaaacaactttaccttcagctacacctttgaggacgtgccttttcacagcagctacgctcacagccaaagtctggaccgtctcatgaatcctctcatcgaccaatacctgtattacttgagcaaaacaaacgctccaagcggaaccaccacgatgtccaggcttcagttttctcaggccggagcgagtgacattcgggaccagtctagaaactggcttcctggaccctgttaccgccagcagcgagtatcaaagacagctgcggacaacaacaacagtgattactcgtggactggagctaccaagtaccacctcaatggaagagactctctggtgaacccgggcccagctatggccagccacaaggatgatgaagaaaaatattttcctcagagcggggttctcatcttcgggaaacaaggctcaaataaaactaatgtggacattgaaaaggttatgattacagacgaagaggaaatcaggaccaccaatcccgtggctacggagcagtatggttctgtatctaccaaccttcaaagcggcaacacacaagcagctacctcagatgtcaacacacaaggcgttcttcctggcatggtctggcaggacagagatgtgtacctgcaggggcccatctgggcaaagattcctcacacggacggacactttcacccttctcccctcatgggcggatttggattgaagcaccctcccccacagattctcatcaagaataccccggtacctgcgaatccttcgaccaccttcagtgcggcaaagtttgcttccttcatcacacagtattccacgggacaggtcagcgtggagatagagtgggagctgcagaaggagaacagcaaacgctggaaccccgagatccagtatacttccaactacaacaaatctgttaatgtggactttactgtggacactaatggtgtgtattcagagcctcgccccattggcaccagatacctgactcgtaatctgtaa

SEQ ID NO: 3503 - DNA, 2208 bp, Artificial Sequence
  Description of Artificial Sequence: Synthetic polynucleotide
atggctgccgatggttatcttccagattggctcgaggacactctctctgaaggaataagacagtggtggaagctcaaacctggcccaccaccgccaaagcccgcagagcggcataaggacgacagcaggggtcttgtgcttcctgggtacaagtacctcggacccttcaacggactcgacaagggggagccggtcaacgaggcagacgccgcggccctcgagcacgacaaggcctacgaccggcagctcgacagcggagacaacccgtacctcaagtacaaccacgccgacgcggagtttcaggagcgtcttaaagaagatacgtcttttgggggcaacctcggacgagcagtcttccaggcgaaaaagagggttcttgaacctctgggcctggttgaggaacctgttaagacggctccgggaaaaaagaggtcggtagagcactctcctgtggagccagactcctcctcgggaaccggaaaggcgggccagcagcctgcaagaaaaagattgaatttcggtcagactggagacgcagactccgtacctgacccccagcctctcggacagccaccagcagccccctctggtctgggaactaatacgatggctacaggcagtggcgcaccaatggcagacaataacgagggcgccgacggagtgggtaattcctcgggaaattggcattgcgattccacatggatgggcgacagagtcatcaccaccagcacccgcacctgggctctgcccacctacaacaaccatctgtacaagcaaatttccagccaatcaggagcatcgaacgacaaccactactttggctacagcaccccctgggggtattttgacttcaacagattccactgccacttttcgccacgtgactggcaaagactcatcaacaacaactggggattccggcccaagagactcagcttcaagctctttaacattcaagtcaaggaggtcacgcagaatgacggtacgacgacgattgccaataaccttaccagcacggttcaggtctttactgactcggagtaccagctcccgtacgtcctcggctcggcgcatcaaggatgcctcccgccgttcccagcagacgtcttcatggtgccacagtatggatacctcaccctgaacaacgggagtcaggcggtaggacgctcttcattttactgcctggagtacttcccttctcagatgcttcgcacgggaaacaactttaccttcagctacacctttgaggacgtgccttttcacagcagctacgctcacagccaaagtctggaccgtctcatgaatcctctcatcgaccaatacctgtattacttgagcaaaacaaacgctccaagcggaaccaccacgatgtccaggcttcagttttctcaggccggagcgagtgacattcgggaccagtctagaaactggcttcctggaccctgttaccgccagcagcgagtatcaaagacagctgcggacaacaacaacagtgattactcgtggactggagctaccaagtaccacctcaatggaagagactctctggtgaacccgggcccagctatggccagccacaaggatgatgaagaaaaatattttcctcagagcggggttctcatcttcgggaaacaaggctcaaataaaactaatgtggacattgaaaaggttatgattacagacgaagaggaaatcaggaccaccaatcccgtggctacggagcagtatggttctgtatctaccaaccttcaaagcggcaacacacaagcagctacctcagatgtcaacacacaaggcgttcttcctggcatggtctggcaggacagagatgtgtacctgcaggggcccatctgggcaaagattcctcacacggacggacactttcacccttctcccctcatgggcggatttggattgaagcaccctcccccacagattctcatcaagaataccccggtacctgcgaatccttcgaccaccttcagtgcggcaaagtttgcttccttcatcacacagtattccacgggacaggtcagcgtggagatagagtgggagctgcagaaggagaacagcaaacgctggaaccccgagatccagtatacttccaactacaacaaatctgttaatgtggactttactgtggacactaatggtgtgtattcagagcctcgccccattggcaccagatacctgactcgtaatctgtaa

SEQ ID NO: 3504 - DNA, 2208 bp, Artificial Sequence
  Description of Artificial Sequence: Synthetic polynucleotide
atggctgccgatggttatcttccagattggctcgaggacactctctctgaaggaataagacagtggtggaagctcaaacctggcccaccaccgccaaagcccgcagagcggcataaggacgacagcaggggtcttgtgcttcctgggtacaagtacctcggacccttcaacggactcgacaagggggagccggtcaacgaggcagacgccgcggccctcgagcacgacaaggcctacgaccggcagctcgacagcggagacaacccgtacctcaagtacaaccacgccgacgcggagtttcaggagcgtcttaaagaagatacgtcttttgggggcaacctcggacgagcagtcttccaggcgaaaaagagggttcttgaacctctgggcctggttgaggaacctgttaagacggctccgggaaaaaagaggccggtagagcactctcctgtggagccagactcctcctcgggaaccggaaaggcgggccagcagcctgcaagaaaaagattgaatttcggtcagactggagacgcagactccgtacctgacccccagcctctcggacagccaccagcagccccctctggtctgggaactaatacgatggctacaggcagtggcgcaccaatggcagacaataacgagggcgccgacggagtgggtaattcctcgggaaattggcattgcgattccacatggatgggcgacagagtcatcaccaccagcacccgcacctgggctctgcccacctacaacaaccatctgtacaagcaaatttccagccaatcaggagcatcgaacgacaaccactactttggctacagcaccccctgggggtattttgacttcaacagattccactgccacttttcgccacgtgactggcaaagactcatcaacaacaactggggattccggcccaagagactcagcttcaagctctttaacattcaagtcaaggaggtcacgcagaatgacggtacgacgacgattgccaataaccttaccagcacggttcaggtctttactgactcggagtaccagctcccgtacgtcctcggctcggcgcatcaaggatgcctcccgccgttcccagcagacgtcttcgtggtgccacagtatggatacctcaccctgaacaacgggagtcaggcggtaggacgctcttcattttactgcctggagtacttcccttctcagatgcttcgcacgggaaacaactttaccttcagctacacctttgaggacgtgccttttcacagcagctacgctcacagccaaagtctggaccgtctcatgaatcctctcatcgaccaatacctgtattacttgagcaaaacaaacgctccaagcggaaccaccacgatgtccaggcttcagttttctcaggccggagcgagtgacattcgggaccagtctagaaactggcttcctggaccctgttaccgccagcagcgagtatcaaagacagctgcggacaacaacaacagtgattactcgtggactggagctaccaagtaccacctcaatggaagagactctctggtgaacccgggcccagctatggccagccacaaggatgatgaagaaaaatattttcctcagagcggggttctcatcttcgggaaacaaggctcaaataaaactaatgtggacattgaaaaggttatgattacagacgaagaggaaatcaggaccaccaatcccgtggctacggagcagtatggttctgtatctaccaaccttcaaagcggcaacacacaagcagctacctcagatgtcaacacacaaggcgttcttcctggcatggtctggcaggacagagatgtgtacctgcaggggcccatctgggcaaagattcctcacacggacggacactttcacccttctcccctcatgggcggatttggattgaagcaccctcccccacagattctcatcaagaataccccggtacctgcgaatccttcgaccaccttcagtgcggcaaagtttgcttccttcatcacacagtattccacgggacaggtcggcgtggagatagagtgggagctgcagaaggagaacagcaaacgctggaaccccgagatccagtatacttccaactacaacaaatctgttaatgtggactttactgtggacactaatggtgtgtattcagagcctcgccccattggcaccagatacctgactcgtaatctgtaa

SEQ ID NO: 3505 - DNA, 2208 bp, Artificial Sequence
  Description of Artificial Sequence: Synthetic polynucleotide
atggctgccgatggttatcttccagattggctcgaggacactctctctgaaggaataagacagtggtggaagctcaaacctggcccaccaccgccaaagcccgcagagcggcataaggacgacagcaggggtcttgtgcttcctgggtacaagtacctcggacccttcaacggactcgacaagggggagccggtcaacgaggcagacgccgcggccctcgagcacgacaaggcctacgaccggcagctcgacagcggagacaacccgtacctcaagtacaaccacgccgacgcggagtttcaggagcgtcttaaagaagatacgtcttttgggggcaacctcggacgagcagtcttccaggcgaaaaagagggttcttgaacctctgggcctggttgaggaacctgttaagacggctccgggaaaaaagaggccggtagagcactctcctgtggagccagactcctcctcgggaaccggaaaggcgggccagcagcctgcaagaaaaagattgaatttcggtcagactggagacgcagactccgtacctgacccccagcctctcggacagccaccagcagccccctctggtctgggaactaatacgatggctacaggcagtggcgcaccaatggcagacaataacgagggcgccgacggagtgggtaattcctcgggaaattggcattgcgattccacatggatgggcgacagagtcatcaccaccagcacccgcacctgggctctgcccacctacaacaaccatctgtacaagcaaatttccagccaatcaggagcatcgaacgacaaccactactttggctacagcaccccctgggggtattttgacttcaacagattccactgccacttttcgccacgtgactggcaaagactcatcaacaacaactggggattccggcccaagagactcagcttcaagctctttaacattcaagtcaaggaggtcacgcagaatgacggtacgacgacgattgccaataaccttaccagcacggttcaggtctttactgactcggagtaccagctcccgtacgtcctcggctcggcgcatcaaggatgcctcccgccgttcccagcagacgtcttcatggtgccacagtatggatacctcaccctgaacaacgggagtcaggcggtaggacgctcttcattttactgcctggagtacttcccttctcagatgcttcgcacgggaaacaactttaccttcagctacacctttgaggacgtgccttttcacagcagctacgctcacagccaaagtctggaccgtctcatgaatcctctcatcgaccaatacctgtattacttgagcaaaacaaacgctccaagcggaaccaccgcgatgtccaggcttcagttttctcaggccggagcgagtgacattcgggaccagtctagaaactggcttcctggaccctgttaccgccagcagcgagtatcaaagacagctgcggacaacaacaacagtgattactcgtggactggagctaccaagtaccacctcaatggaagagactctctggtgaacccgggcccagctatggccagccacaaggatgatgaagaaaaatattttcctcagagcggggttctcatcttcgggaaacaaggctcaaataaaactaatgtggacattgaaaaggttatgattacagacgaagaggaaatcaggaccaccaatcccgtggctacggagcagtatggttctgtatctaccaaccttcaaagcggcaacacacaagcagctacctcagatgtcaacacacaaggcgttcttcctggcatggtctggcaggacagagatgtgtacctgcaggggcccatctgggcaaagattcctcacacggacggacactttcacccttctcccctcatgggcggatttggattgaagcaccctcccccacagattctcatcaagaataccccggtacctgcgaatccttcgaccaccttcagtgcggcaaagtttgcttccttcatcacacagtattccacgggacaggtcagcgtggagatagagtgggagctgcagaaggagaacagcaaacgctggaaccccgagatccagtatacttccaactacaacaaatctgttaatgtggactttactgtggacactaatggtgtgtattcagagcctcgccccattggcaccagatacctgactcgtaatctgtaa

SEQ ID NO: 3506 - DNA, 2208 bp, Artificial Sequence
  Description of Artificial Sequence: Synthetic polynucleotide
atggctgccgatggttatcttccagattggctcgaggacactctctctgaaggaataagacagtggtggaagctcaaacctggcccaccaccgccaaagcccgcagagcggcataaggacgacagcaggggtcttgtgcttcctgggtacaagtacctcggacccttcaacggactcgacaagggggagccggtcaacgaggcagacgccgcggccctcgagcacgacaaggcctacgaccggcagctcgacagcggagacaacccgtacctcaagtacaaccacgccgacgcggagtttcaggagcgtcttaaagaagatacgtcttttgggggcaacctcggacgagcagtcttccaggcgaaaaagagggttcttgaacctctgggcctggttgaggaacctgttaagacggctccgggaaaaaagaggccggtagagcactctcctgtggagccagactcctcctcgggaaccggaaaggcgggccagcagcctgcaagaaaaagattgaatttcggtcagactggagacgcagactccgtacctgacccccagcctctcggacagccaccagcagccccctctggtctgggaactaatacgatggctacaggcagtggcgcaccaatggcagacaataacgagggcgccgacggagtgggtaattcctcgggaaattggcattgcgattccacatggatgggcgacagagtcatcaccaccagcacccgcacctgggctctgcccacctacaacaaccatctgtacaagcaaatttccagccaatcaggagcatcgaacgacaaccactactttggctacagcaccccctgggggtattttgacttcaacagattccactgccacttttcgccacgtgactggcaaagactcatcaacaacaactggggattccggcccaagagactcagcttcaagctctttaacattcaagtcaaggaggtcacgcagaatgacggtacgacgacgattgccaataaccttaccagcacggttcaggtctttactgactcggagtaccagctcccgtacgtcctcggctcggcgcatcaaggatgcctcccgccgttcccagcagacgtcttcatggtgccacagtatggatacctcaccctgaacaacgggagtcaggcggtaggacgctcttcattttactgcctggagtacttcccttctcagatgcttcgcacgggaaacaactttaccttcagctacacctttgaggacgtgccttttcacagcagctacgctcacagccaaagtctggaccgtctcatgaatcctcccatcgaccaatacctgtattacttgagcaaaacaaacgctccaagcggaaccaccacgatgtccaggcttcagttttctcaggccggagcgagtgacattcgggaccagtctagaaactggcttcctggaccctgttaccgccagcagcgagtatcaaagacagctgcggacaacaacaacagtgattactcgtggactggagctaccaagtaccacctcaatggaagagactctctggtgaacccgggcccagctatggccagccacaaggatgatgaagaaaaatattttcctcagagcggggttctcatcttcgggaaacaaggctcaaataaaactaatgtggacattgaaaaggttatgattacagacgaagaggaaatcaggaccaccaatcccgtggctacggagcagtatggttctgtatctaccaaccttcaaagcggcaacacacaagcagctacctcagatgtcaacacacaaggcgttcttcctggcatggtctggcaggacagagatgtgtacctgcaggggcccatctgggcaaagattcctcacacggacggacactttcacccttctcccctcatgggcggatttggattgaagcaccctcccccacagattctcatcaagaataccccggtacctgcgaatccttcgaccaccttcagtgcggcaaagtttgcttccttcatcacacagtattccacgggacaggtcagcgtggagatagagtgggagctgcagaaggagaacagcaaacgctggaaccccgagatccagtatacttccaactacaacaaatctgttaatgtggactttactgtggacactaatggtgtgtattcagagcctcgccccattggcaccagatacctgactcgtaatctgtaa

SEQ ID NO: 3507 - DNA, 2208 bp, Artificial Sequence
  Description of Artificial Sequence: Synthetic polynucleotide
atggctgccgatggttatcttccagattggctcgaggacactctctctgaaggaataagacagtggtggaagctcaaacctggcccaccaccgccaaagcccgcagagcggcataaggacgacagcaggggtcttgtgcttcctgggtacaagtacctcggacccttcaacggactcgacaagggggagccggtcaacgaggcagacgccgcggccctcgagcacgacaaggcctacgaccggcagctcgacagcggagacaacccgtacctcaagtacaaccacgccgacgcggagtttcaggagcgtcttaaagaagatacgtcttttgggggcaacctcggacgagcagtcttccaggcgaaaaagagggttcttgaacctctgggcctggttgaggaacctgttaagacggctccgggaaaaaagaggccggtagagcactctcctgtggagccagactcctcctcgggaaccggaaaggcgggccagcagcctgcaagaaaaagattgaatttcggtcagactggagacgcagactccgtacctgacccccagcctctcggacagccaccagcagccccctctggtctgggaactaatacgatggctacaggcagtggcgcaccaatggcagacaataacgagggcgccgacggagtgggtaattcctcgggaaattggcattgcgattccacatggatgggcgacagagtcatcaccaccagcacccgcacctgggctctgcccacctacaacaaccatctgtacaagcaaatttccagccaatcaggagcatcgaacgacaaccactactttggctacagcaccccctgggggtattttgacttcaacagattccactgccacttttcgccacgtgactggcaaagactcatcaacaacaactggggattccggcccaagagactcagcttcaagctctttaacattcaagtcaaggaggtcacgcagaatgacggtacgacgacgattgccaataaccttaccagcacggttcaggtctttactgactcggagtaccagctcccgtacgtcctcggctcggcgcatcaaggatgcctcccgccgttcccagcagacgtcttcatggtgccacagtatggatacctcaccctgaacaacgggagtcaggcggtaggacgctcttcattttactgcctggagtacttcccttctcagatgcttcgcacgggaaacaactttaccttcagctacacctttgaggacgtgccttttcacagcagctacgctcacggccaaagtctggaccgtctcatgaatcctctcatcgaccaatacctgtattacttgagcaaaacaaacgctccaagcggaaccaccacgatgtccaggcttcagttttctcaggccggagcgagtgacattcgggaccagtctagaaactggcttcctggaccctgttaccgccagcagcgagtatcaaagacagctgcggacaacaacaacagtgattactcgtggactggagctaccaagtaccacctcaatggaagagactctctggtgaacccgggcccagctatggccagccacaaggatgatgaagaaaaatattttcctcagagcggggttctcatcttcgggaaacaaggctcaaataaaactaatgtggacattgaaaaggttatgattacagacgaagaggaaatcaggaccaccaatcccgtggctacggagcagtatggttctgtatctaccaaccttcaaagcggcaacacacaagcagctacctcagatgtcaacacacaaggcgttcttcctggcatggtctggcaggacagagatgtgtacctgcaggggcccatctgggcaaagattcctcacacggacggacactttcacccttctcccctcatgggcggatttggattgaagcaccctcccccacagattctcatcaagaataccccggtacctgcgaatccttcgaccaccttcagtgcggcaaagtttgcttccttcatcacacagtattccacgggacaggtcagcgtggagatagagtgggagctgcagaaggagaacagcaaacgctggaaccccgagatccagtatacttccaactacaacaaatctgttaatgtggactttactgtggacactaatggtgtgtattcagagcctcgccccattggcaccagatacctgactcgtaatctgtaa

SEQ ID NO: 3508 - DNA, 2208 bp, Artificial Sequence
  Description of Artificial Sequence: Synthetic polynucleotide
atggctgccgatggttatcttccagattggctcgaggacactctctctgaaggaataagacagtggtggaagctcaaacctggcccaccaccgccaaagcccgcagagcggcataaggacgacagcaggggtcttgtgcttcctgggtacaagtacctcggacccttcaacggactcgacaagggggagccggtcaacgaggcagacgccgcggccctcgagcacgacaaggcctacgaccggcagctcgacagcggagacaacccgtacctcaagtacaaccacgccgacgcggagtttcaggagcgtcttaaagaagatacgtcttttgggggcaacctcggacgagcagtcttccaggcgaaaaagagggttcttgaacctctgggcctggttgaggaacctgttaagacggctccgggaaaaaagaggccggtagagcactctcctgtggagccagactcctcctcgggaaccggaaaggcgggccagcagcctgcaagaaaaagattgaatttcggtcagactggagacgcagactccgtacctgacccccagcctctcggacagccaccagcagccccctctggtctgggaactaatacgatggctacaggcagtggcgcaccaatggcagacaataacgagggcgccgacggagtgggtaattcctcgggaaattggcattgcgattccacatggatgggcgacagagtcatcaccaccagcacccgcacctgggctctgcccacctacaacaaccatctgtacaagcaaatttccagccaatcaggagcatcgaacgacaaccactactttggctacagcaccccctgggggtattttgacttcaacagattccactgccacttttcgccacgtgactggcaaagactcatcaacaacaactggggattccggcccaagagactcagcttcaagctctttaacattcaagtcaaggaggtcacgcagaatgacggtacgacgacgattgccaataaccttaccagcacggttcaggtctttactgactcggagtaccagctcccgtacgtcctcggctcggcgcatcaaggatgcctcccgccgttcccagcagacgtcttcatggtgccacagtatggatacctcaccctgaacaacgggagtcaggcggtaggacgctcttcattttactgcctggagtacttcccttctcagatgcttcgcacgggaaacaactttaccttcagctacacctttgaggacgtgccttttcacagcagctacgctcacagccaaagtctggaccgtctcatgaatcctctcatcgaccaatacctgtattacttgagcaaaacaaacgctccaagcggaaccaccacgatgtccaggcctcagttttctcaggccggagcgagtgacattcgggaccagtctagaaactggcttcctggaccctgttaccgccagcagcgagtatcaaagacagctgcggacaacaacaacagtgattactcgtggactggagctaccaagtaccacctcaatggaagagactctctggtgaacccgggcccagctatggccagccacaaggatgatgaagaaaaatattttcctcagagcggggttctcatcttcgggaaacaaggctcaaataaaactaatgtggacattgaaaaggttatgattacagacgaagaggaaatcaggaccaccaatcccgtggctacggagcagtatggttctgtatctaccaaccttcaaagcggcaacacacaagcagctacctcagatgtcaacacacaaggcgttcttcctggcatggtctggcaggacagagatgtgtacctgcaggggcccatctgggcaaagattcctcacacggacggacactttcacccttctcccctcatgggcggatttggattgaagcaccctcccccacagattctcatcaagaataccccggtacctgcgaatccttcgaccaccttcagtgcggcaaagtttgcttccttcatcacacagtattccacgggacaggtcagcgtggagatagagtgggagctgcagaaggagaacagcaaacgctggaaccccgagatccagtatacttccaactacaacaaatctgttaatgtggactttactgtggacactaatggtgtgtattcagagcctcgccccattggcaccagatacctgactcgtaatctgtaa

SEQ ID NO: 3509 - DNA, 2208 bp, Artificial Sequence
  Description of Artificial Sequence: Synthetic polynucleotide
atggctgccgatggttatcttccagattggctcgaggacactctctctgaaggaataagacagtggtggaagctcaaacctggcccaccaccgccaaagcccgcagagcggcataaggacgacagcaggggtcttgtgcttcctgggtacaagtacctcggacccttcaacggactcgacaagggggagccggtcaacgaggcagacgccgcggccctcgagcacgacaaggcctacgaccggcagctcgacagcggagacaacccgtacctcaagtacaaccacgccgacgcggagtttcaggagcgtcttaaagaagatacgtcttttgggggcaacctcggacgagcagtcttccaggcgaaaaagagggttcttgaacctctgggcctggttgaggaacctgttaagacggctccgggaaaaaagaggccggtagagcactctcctgtggagccagactcctcctcgggaaccggaaaggcgggccagcagcctgcaagaaaaagattgaatttcggtcagactggagacgcagactccgtacctgacccccagcctctcggacagccaccagcagccccctctggtctgggaactaatacgatggctacaggcagtggcgcaccaatggcagacaataacgagggcgccgacggagtgggtaattcctcgggaaattggcattgcgattccacatggatgggcgacagagtcatcaccaccagcacccgcacctgggctctgcccacctacaacaaccatctgtacaagcaaatttccagccaatcaggaacatcgaacgacaaccactactttggctacagcaccccctgggggtattttgacttcaacagattccactgccacttttcgccacgtgactggcaaagactcatcaacaacaactggggattccggcccaagagactcagcttcaagctctttaacattcaagtcaaggaggtcacgcagaatgacggtacgacgacgattgccaataaccttaccagcacggttcaggtctttactgactcggagtaccagctcccgtacgtcctcggctcggcgcatcaaggatgcctcccgccgttcccagcagacgtcttcatggtgccacagtatggatacctcaccctgaacaacgggagtcaggcggtaggacgctcttcattttactgcctggagtacttcccttctcagatgcttcgcacgggaaacaactttaccttcagctacacctttgaggacgtgccttttcacagcagctacgctcacagccaaagtctggaccgtctcatgaatcctctcatcgaccaatacctgtattacttgagcaaaacaaacgctccaagcggaaccaccacgatgtccaggcttcagttttctcaggccggagcgagtgacattcgggaccagtctagaaactggcttcctggaccctgttaccgccagcagcgagtatcaaagacagctgcggacaacaacaacagtgattactcgtggactggagctaccaagtaccacctcaatggaagagactctctggtgaacccgggcccagctatggccagccacaaggatgatgaagaaaaatattttcctcagagcggggttctcatcttcgggaaacaaggctcaaataaaactaatgtggacattgaaaaggttatgattacagacgaagaggaaatcaggaccaccaatcccgtggctacggagcagtatggttctgtatctaccaaccttcaaagcggcaacacacaagcagctacctcagatgtcaacacacaaggcgttcttcctggcatggtctggcaggacagagatgtgtacctgcaggggcccatctgggcaaagattcctcacacggacggacactttcacccttctcccctcatgggcggatttggattgaagcaccctcccccacagattctcatcaagaataccccggtacctgcgaatccttcgaccaccttcagtgcggcaaagtttgcttccttcatcacacagtattccacgggacaggtcagcgtggagatagagtgggagctgcagaaggagaacagcaaacgctggaaccccgagatccagtatacttccaactacaacaaatctgttaatgtggactttactgtggacactaatggtgtgtattcagagcctcgccccattggcaccagatacctgactcgtaatctgtaa

SEQ ID NO: 3510 - DNA, 2208 bp, Artificial Sequence
  Description of Artificial Sequence: Synthetic polynucleotide
atggctgccgatggttatcttccagattggctcgaggacactctctctgaaggaataagacagtggtggaagctcaaacctggcccaccaccgccaaagcccgcagagcggcataaggrcgacagcaggggtcttgtgcttcctgggtacaagtacctcggacccttcaacggactcgacaagggggagccggtcaacgaggcagacgccgcggccctcgagcacgacaaggcctacgaccggcagctcgacagcggagacaacccgtacctcaagtacaaccacgccgacgcggagtttcaggagcgtcttaaagaagatacgtcttttgggggcaacctcggacgagcagtcttccaggcgaaaaagagggttcttgaacctctgggcctggttgaggaacctgttaagacggctccgggaaaaaagaggccggtagagcactctcctgtggagccagactcctcctcgggaaccggaaaggcgggccagcagcctgcaagaaaaagattgaatttcggtcagactggagacgcagactccgtacctgacccccagcctctcggacagccaccagcagccccctctggtctgggaactaatacgatggctacaggcagtggcgcaccaatggcagacaataacgagggcgccgacggagtgggtaattcctcgggaaattggcattgcgattccacatggatgggcgacagagtcatcaccaccagcacccgcacctgggctctgcccacctacaacaaccatctgtacaagcaaatttccagccaatcaggagcatcgaacgacaaccactactttggctacagcaccccctgggggtattttgacttcaacagattccactgccacttttcgccacgtgactggcaaagactcatcaacaacaactggggattccggcccaagagactcagcttcaagctctttaacattcaagtcaaggaggtcacgcagaatgacggtacgacgacgattgccaataaccttaccagcacggttcaggtctttactgactcggagtaccagctcccgtacgtcctcggctcggcgcatcaaggatgcctcccgccgttcccagcagacgtcttcatggtgccacagtatggatacctcaccctgaacaacgggagtcaggcggtaggacgctcttcattttactgcctggagtacttcccttctcagatgcttcgcacgggaaacaactttaccttcagctacacctttgaggacgtgccttttcacagcagctacgctcacagccaaagtctggaccgtctcatgaatcctctcatcgaccaatacctgtattacttgagcaaaacaaacgctccaagcggaaccaccacgatgtccaggcttcagttttctcaggccggagcgagtgacattcgggaccagtctagaaactggcttcctggaccctgttaccgccagcagcgagtatcaaagacagctgcggacaacaacaacagtgattactcgtggactggagctaccaagtaccacctcaatggaagagactctctggtgaacccgggcccagctatggccagccacaaggatgatgaagaaaaatattttcctcagagcggggttctcatcttcgggaaacaaggctcaaataaaactaatgtggacattgaaaaggttatgattacagacgaagaggaaatcaggaccaccaatcccgtggctacggagcagtatggttctgtatctaccaaccttcaaagcggcaacacacaagcagctacctcagatgtcaacacacaaggcgttcttcctggcatggtctggcaggacagagatgtgtacctgcaggggcccatctgggcaaagattcctcacacggacggacactttcacccttctcccctcatgggcggatttggattgaagcaccctcccccacagattctcatcaagaataccccggtacctgcgaatccttcgaccaccttcagtgcggcaaagtttgcttccttcatcacacagtattccacgggacaggtcagcgtggagatagagtgggagctgcagaaggagaacagcaaacgctggaaccccgagatccagtatacttccaactacaacaaatctgttaatgtggactttactgtggacactaatggtgtgtattcagagcctcaccccattggcaccagatacctgactcgtaatctgtaa

SEQ ID NO: 3511 - DNA, 2208 bp, Artificial Sequence
  Description of Artificial Sequence: Synthetic polynucleotide
atggctgccgatggttatcttccagattggctcgaggacactctctctgaaggaataagacagtggtggaagttcaaacctggcccaccaccgccaaagcccgcagagcggcataaggacgacagcaggggtcttgtgcttcctgggtacaagtacctcggacccttcaacggactcgacaagggggagccggtcaacgaggcagacgccgcggccctcgagcacgacaaggcctacgaccggcagctcgacagcggagacaacccgtacctcaagtacaaccacgccgacgcggagtttcaggagcgtcttaaagaagatacgtcttttgggggcaacctcggacgagcagtcttccaggcgaaaaagagggttcttgaacctctgggcctggttgaggaacctgttaagacggctccgggaaaaaagaggccggtagagcactctcctgtggagccagactcctcctcgggaaccggaaaggcgggccagcagcctgcaagaaaaagattgaatttcggtcagactggagacgcagactccgtacctgacccccagcctctcggacagccaccagcagccccctctggtctgggaactaatacgatggctacaggcagtggcgcaccaatggcagacaataacgagggcgccgacggagtgggtaattcctcgggaaattggcattgcgattccacatggatgggcgacagagtcatcaccaccagcacccgcacctgggctctgcccacctacaacaaccatctgtacaagcaaatttccagccaatcaggagcatcgaacgacaaccactactttggctacagcaccccctgggggtattttgacttcaacagattccactgccacttttcgccacgtgactggcaaagactcatcaacaacaactggggattccggcccaagagactcagcttcaagctctttaacattcaagtcaaggaggtcacgcagaatgacggtacgacgacgattgccaataaccttaccagcacggttcaggtctttactgactcggagtaccagctcccgtacgtcctcggctcggcgcatcaaggatgcctcccgccgttcccagcagacgtcttcatggtgccacagtatggatacctcaccctgaacaacgggagtcaggcggtaggacgctcttcattttactgcctggagtacttcccttctcagatgcttcgcacgggaaacaactttaccttcagctacacctttgaggacgtgccttttcacagcagctacgctcacagccaaagtctggaccgtctcatgaatcctctcatcgaccaatacctgtattacttgagcaaaacaaacgctccaagcggaaccaccacgatgtccaggcttcagttttctcaggccggagcgagtgacattcgggaccagtctagaaactggcttcctggaccctgttaccgccagcagcgagtatcaaagacagctgcggacaacaacaacagtgattactcgtggactggagctaccaagtaccacctcaatggaagagactctctggtgaacccgggcccagctatggccagccacaaggatgatgaagaaaaatattttcctcagagcggggttctcatcttcgggaaacaaggctcaaataaaactaatgtggacattgaaaaggttatgattacagacgaagaggaaatcaggaccaccaatcccgtggctacggagcagtatggttctgtatctaccaaccttcaaagcggcaacacacaagcagctacctcagatgtcaacacacaaggcgttcttcctggcatggtctggcaggacagagatgtgtacctgcaggggcccatctgggcaaagattcctcacacggacggacactttcacccttctcccctcatgggcggatttggattgaagcaccctcccccacagattctcatcaagaataccccggtacctgcgaatccttcgaccaccttcagtgcggcaaagtttgcttccttcatcacacagtattccacgggacaggtcagcgtggagatagagtgggagctgcagaaggagaacagcaaacgctggaaccccgagatccagtatacttccaactacaacaaatctgttaatgtggactttactgtggacactaatggtgtgtattcagagcctcgccccattggcaccagatacctgactcgtaatctgtaa

SEQ ID NO: 3512 - DNA, 2208 bp, Artificial Sequence
  Description of Artificial Sequence: Synthetic polynucleotide
atggctgccgatggttatcttccagattggctcgaggacactctctctgaaggaataagacagtggtggaagctcaaacctggcccaccaccgccaaagcccgcagagcggcataaggacgacagcaggggtcttgtgcttcctgggtacaagtacctcggacccttcaacggactcgacaagggggagccggtcaacgaggcagacgccgcggccctcgagcacgacaaggcctacgaccggcagctcgacagcggagacaacccgtacctcaagtacaaccacgccgacgcggagtttcaggagcgtcttaaagaagatacgtcttttgggggcaacctcggacgagcagtcttccaggcgaaaaagagggttcttgaacctctgggcctggttgaggaacctgttaagacggctccgggaaaaaagaggccggtagagcactctcctgtggagccagactcctcctcgggaaccggaaaggcgggccagcagcctgcaagaaaaagattgaatttcggtcagactggagacgcagactccgtacctgacccccagcctctcggacagccaccagcagccccctctggtctgggaactaatacgatggctacaggcagtggcgcaccaatggcagacaataacgagggcgccgacggagtgggtaattcctcgggaaattggcattgcgattccacatggatgggcgacagagtcatcaccaccagcacccgcacctgggctctgcccacctacaacaaccatctgtacaagcaaatttccagccaatcaggagcatcgaacgacaaccactactttggctacagcaccccctgggggtattttgacttcaacagattccactgccacttttcgtcacgtgactggcaaagactcatcaacaacaactggggattccggcccaagagactcagcttcaagctctttaacattcaagtcaaggaggtcacgcagaatgacggtacgacgacgattgccaataaccttaccagcacggttcaggtctttactgactcggagtaccagctcccgtacgtcctcggctcggcgcatcaaggatgcctcccgccgttcccagcagacgtcttcatggtgccacagtatggatacctcaccctgaacaacgggagtcaggcggtaggacgctcttcattttactgcctggagtacttcccttctcagatgcttcgcacgggaaacaactttaccttcagctacacctttgaggacgtgccttttcacagcagctacgctcacagccaaagtctggaccgtctcatgaatcctctcatcgaccaatacctgtattacttgagcaaaacaaacgctccaagcggaaccaccacgatgtccaggcttcagttttctcaggccggagcgagtgacattcgggaccagtctagaaactggcttcctggaccctgttaccgccagcagcgagtatcaaagacagctgcggacaacaacaacagtgattactcgtggactggagctaccaagtaccacctcaatggaagagactctctggtgaacccgggcccagctatggccagccacaaggatgatgaagaaaaatattttcctcagagcggggttctcatcttcgggaaacaaggctcaaataaaactaatgtggacattgaaaaggttatgattacagacgaagaggaaatcaggaccaccaatcccgtggctacggagcagtatggttctgtatctaccaaccttcaaagcggcaacacacaagcagctacctcagatgtcaacacacaaggcgttcttcctggcatggtctggcaggacagagatgtgtacctgcaggggcccatctgggcaaagattcctcacacggacggacactttcacccttctcccctcatgggcggatttggattgaagcaccctcccccacagattctcatcaagaataccccggtacctgcgaatccttcgaccaccttcagtgcggcaaagtttgcttccttcatcacacagtattccacgggacaggtcagcgtggagatagagtgggagctgcagaaggagaacagcaaacgctggaaccccgagatccagtatacttccaactacaacaaatctgttaatgtggactttactgtggacactaatggtgtgtattcagagcctcgccccattggcaccagatacctgactcgtaatctgtaa

SEQ ID NO: 3513 - DNA, 2208 bp, Artificial Sequence
  Description of Artificial Sequence: Synthetic polynucleotide
atggctgccgatggttatcttccagattggctcgaggacactctctctgaaggaataagacagtggtggaagctcaaacctggcccaccaccgccaaagcccgcagagcggcatgaggacgacagcaggggtcttgtgcttcctgggtacaagtacctcggacccttcaacggactcgacaagggggagccggtcaacgaggcagacgccgcggccctcgagcacgacaaggcctacgaccggcagctcgacagcggagacaacccgtacctcaagtacaaccacgccgacgcggagtttcaggagcgtcttaaagaagatacgtcttttgggggcaacctcggacgagcagtcttccaggcgaaaaagagggttcttgaacctctgggcctggttgaggaacctgttaagacggctccgggaaaaaagaggccggtagagcactctcctgtggagccagactcctcctcgggaaccggaaaggcgggccagcagcctgcaagaaaaagattgaatttcggtcagactggagacgcagactccgtacctgacccccagcctctcggacagccaccagcagccccctctggtctgggaactaatacgatggctacaggcagtggcgcaccaatggcagacaataacgagggcgccgacggagtgggtaattcctcgggaaattggcattgcgattccacatggatgggcgacagagtcatcaccaccagcacccgcacctgggctctgcccacctacaacaaccatctgtacaagcaaatttccagccaatcaggagcatcgaacgacaaccactactttggctacagcaccccctgggggtattttgacttcaacagattccactgccacttttcgccacgtgactggcaaagactcatcaacaacaactggggattccggcccaagagactcagcttcaagctctttaacattcaagtcaaggaggtcacgcagaatgacggtacgacgacgattgccaataaccttaccagcacggttcaggtctttactgactcggagtaccagctcccgtacgtcctcggctcggcgcatcaaggatgcctcccgccgttcccagcagacgtcttcatggtgccacagtatggatacctcaccctgaacaacgggagtcaggcggtaggacgctcttcattttactgcctggagtacttcccttctcagatgcttcgcacgggaaacaactttaccttcagctacacctttgaggacgtgccttttcacagcagctacgctcacagccaaagtctggaccgtctcatgaatcctctcatcgaccaatacctgtattacttgagcaaaacaaacgctccaagcggaaccaccacgatgtccaggcttcagttttctcaggccggagcgagtgacattcgggaccagtctagaaactggcttcctggaccctgttaccgccagcagcgagtatcaaagacagctgcggacaacaacaacagtgattactcgtggactggagctaccaagtaccacctcaatggaagagactctctggtgaacccgggcccagctatggccagccacaaggatgatgaagaaaaatattttcctcagagcggggttctcatcttcgggaaacaaggctcaaataaaactaatgtggacattgaaaaggttatgattacagacgaagaggaaatcaggaccaccaatcccgtggctacggagcagtatggttctgtatctaccaaccttcaaagcggcaacacacaagcagctacctcagatgtcaacacacaaggcgttcttcctggcatggtctggcaggacagagatgtgtacctgcaggggcccatctgggcaaagattcctcacacggacggacactttcacccttctcccctcatgggcggatttggattgaagcaccctcccccacagattctcatcaagaataccccggtacctgcgaatccttcgaccaccttcagtgcggcaaagtttgcttccttcatcacacagtattccacgggacaggtcagcgtggagatagagtgggagctgcagaaggagaacagcaaacgctggaaccccgagatccagtatacttccaactacaacaaatctgttaatgtggactttactgtggacactaatggtgtgtattcagagcctcgccccattggcaccagatacctgactcgtaatctgtaa

SEQ ID NO: 3514 - DNA, 2205 bp, Artificial Sequence
  Description of Artificial Sequence: Synthetic polynucleotide
atggctgccgatggttatcttccagattggctcgaggacactctctctgaaggaataagacagtggtggaagctcaaacctggcccaccaccgccaaagcccgcagagcggcataaggacgacagcaggggtcttgtgcttcctgggtacaagtacctcggacccttcaacggactcgacaagggggagccggtcaacgaggcagacgccgcggccctcgagcacgacaaggcctacgaccggcagctcgacagcggagacaacccgtacctcaagtacaaccacgccgacgcggagtttcaggagcgtcttaaagaagatacgtcttttgggggcaacctcggacgagcagtcttccaggcgaaaaagagggttcttgaacctctgggcctggttgaggaacctgttaagacggctccgggaaaaaagaggccggtagagcactctcctgtggagccagactcctcctcgggaaccggaaaggcgggccagcagcctgcaagaaaaagattgaatttcggtcagactggagacgcagactccgtacctgacccccagcctctcggacagccaccagcagccccctctggtctgggaactaatacgatggctacaggcagtggcgcaccaatggcagacaataacgagggcgccgacggagtgggtaattcctcgggaaattggcattgcgattccacatggatgggcgacagagtcatcaccaccagcacccgcacctgggctctgcccacctacaacaaccatctgtacaagcaaatttccagccaatcaggagcatcgaacgacaaccactactttggctacagcaccccctgggggtattttgacttcaacagattccactgccacttttcgccacgtgactggcaaagactcatcaacaacaactggggattccggcccaagagactcagcttcaagctctttaacattcaagtcaaggaggtcacgcagaatgacggtacgacgacgattgccaataaccttaccagcacggttcaggtctttactgactcggagtaccagctcccgtacgtcctcggctcggcgcatcaaggatgcctcccgccgttcccagcagacgtcttcatggtgccacagtatggatacctcaccctgaacaacgggagtcaggcggtaggacgctcttcattttactgcctggagtacttcccttctcagatgcttcgcacgggaaacaactttaccttcagctacacctttgaggacgtgccttttcacagcagctacgctcacagccaaagtctggaccgtctcatgaatcctctcatcgaccaatacctgtattacttgagcaaaacaaacgctccaagcggaaccaccacgatgtccaggcttcagttttctcaggccggagcgagtgacattcgggaccagtctagaaactggcttcctggaccctgttaccgccagcagcgagtatcaaagacagctgcggacaacaacagtgattactcgtggactggagctaccaagtaccacctcaatggaagagactctctggtgaacccgggcccagctatggccagccacaaggatgatgaagaaaaatattttcctcagagcggggttctcatcttcgggaaacaaggctcaaataaaactaatgtggacattgaaaaggttatgattacagacgaagaggaaatcaggaccaccaatcccgtggctacggagcagtatggttctgtatctaccaaccttcaaagcggcaacacacaagcagctacctcagatgtcaacacacaaggcgttcttcctggcatggtctggcaggacagagatgtgtacctgcaggggcccatctgggcaaagattcctcacacggacggacactttcacccttctcccctcatgggcggatttggattgaagcaccctcccccacagattctcatcaagaataccccggtacctgcgaatccttcgaccaccttcagtgcggcaaagtttgcttccttcatcacacagtattccacgggacaggtcagcgtggagatagagtgggagctgcagaaggagaacagcaaacgctggaaccccgagatccagtatacttccaactacaacaaatctgttaatgtggactttactgtggacactaatggtgtgtattcagagcctcgccccattggcaccagatacctgactcgtaatctgtaa

SEQ ID NO: 3515 - DNA, 2208 bp, Artificial Sequence
  Description of Artificial Sequence: Synthetic polynucleotide
atggctgccgatggttatcttccagattggctcgaggacactctctctgaaggaataagacagtggtggaagctcaaacctggcccaccaccgccaaagcccgcagagtggcataaggacgacagcaggggtcttgtgcttcctgggtacaagtacctcggacccttcaacggactcgacaagggggagccggtcaacgaggcagacgccgcggccctcgagcacgacaaggcctacgaccggcagctcgacagcggagacaacccgtacctcaagtacaaccacgccgacgcggagtttcaggagcgtcttaaagaagatacgtcttttgggggcaacctcggacgagcagtcttccaggcgaaaaagagggttcttgaacctctgggcctggttgaggaacctgttaagacggctccgggaaaaaagaggccggtagagcactctcctgtggagccagactcctcctcgggaaccggaaaggcgggccagcagcctgcaagaaaaagattgaatttcggtcagactggagacgcagactccgtacctgacccccagcctctcggacagccaccagcagccccctctggtctgggaactaatacgatggctacaggcagtggcgcaccaatggcagacaataacgagggcgccgacggagtgggtaattcctcgggaaattggcattgcgattccacatggatgggcgacagagtcatcaccaccagcacccgcacctgggctctgcccacctacaacaaccatctgtacaagcaaatttccagccaatcaggagcatcgaacgacaaccactactttggctacagcaccccctgggggtattttgacttcaacagattccactgccacttttcgccacgtgactggcaaagactcatcaacaacaactggggattccggcccaagagactcagcttcaagctctttaacattcaagtcaaggaggtcacgcagaatgacggtacgacgacgattgccaataaccttaccagcacggttcaggtctttactgactcggagtaccagctcccgtacgtcctcggctcggcgcatcaaggatgcctcccgccgttcccagcagacgtcttcatggtgccacagtatggatacctcaccctgaacaacgggagtcaggcggtaggacgctcttcattttactgcctggagtacttcccttctcagatgcttcgcacgggaaacaactttaccttcagctacacctttgaggacgtgccttttcacagcagctacgctcacagccaaagtctggaccgtctcatgaatcctctcatcgaccaatacctgtattacttgagcaaaacaaacgctccaagcggaaccaccacgatgtccaggcttcagttttctcaggccggagcgagtgacattcgggaccagtctagaaactggcttcctggaccctgttaccgccagcagcgagtatcaaagacagctgcggacaacaacaacagtgattactcgtggactggagctaccaagtaccacctcaatggaagagactctctggtgaacccgggcccagctatggccagccacaaggatgatgaagaaaaatattttcctcagagcggggttctcatcttcgggaaacaaggctcaaataaaactaatgtggacattgaaaaggttatgattacagacgaagaggaaatcaggaccaccaatcccgtggctacggagcagtatggttctgtatctaccaaccttcaaagcggcaacacacaagcagctacctcagatgtcaacacacaaggcgttcttcctggcatggtctggcaggacagagatgtgtacctgcaggggcccatctgggcaaagattcctcacacggacggacactttcacccttctcccctcatgggcggatttggattgaagcaccctcccccacagattctcatcaagaataccccggtacctgcgaatccttcgaccaccttcagtgcggcaaagtttgcttccttcatcacacagtattccacgggacaggtcagcgtggagatagagtgggagctgcagaaggagaacagcaaacgctggaaccccgagatccagtatacttccaactacaacaaatctgttaatgtggactttactgtggacactaatggtgtgtattcagagcctcgccccattggcaccagatacctgactcgtaatctgtaa

SEQ ID NO: 3516 - DNA, 2208 bp, Artificial Sequence
  Description of Artificial Sequence: Synthetic polynucleotide
atggctgccgatggttatcttccagattggctcgaggacactctctctgaaggaataagacagtggtggaagctcaaacctggcccaccaccgccaaagcccgcagagcggcataaggacgacagcaggggtcttgtgcttcctgggtacaagtacctcggacccttcaacggactcgacaagggggagccggtcaacgaggcagacgccgcggccctcgagcacgacaaggcctacgaccggcagctcgacagcggagacaacccgtacctcaagtacaaccacgccgacgcggagtttcaggagcgtcttaaagaagatacgtcttttgggggcaacctcggacgagcagtcttccaggcgaaaaagagggttcttgaacctctgggcctggttgaggaacctgttaagacggctccgggaaaaaagaggccggtagagcactctcctgtggagccagactcctcctcgggaaccggaaaggcgggccagcagcctgcaagaaaaagattgaatttcggtcagactggagacgcagactccgtacctgacccccagcctctcggacagccaccagcagccccctctggtctgggaactaatacgatggctacaggcagtggcgcaccaatggcagacaataacgagggcgccgacggagtgggtaattcctcgggaaattggcattgcgattccacatggatgggcgacagagtcatcaccaccagcacccgcacctgggctctgcccacctacaacaaccatctgtacaagcaaatttccagccaatcaggagcatcgaacgacaaccactactttggctacagcaccccctgggggtattttgacttcaacagattccactgccacttttcgccacgtgactggcaaagactcatcaacaacaactggggattccggcccaagagactcagcttcaagctctttaacattcaagtcaaggaggtcacgcagaatgacggtacgacgacgattgccaataaccttaccagcacggttcaggtctttactgactcggagtaccagctcccgtacgtcctcggctcggcgcatcaaggatgcctcccgccgttcccagcagacgtcttcatggtgccacagtatggatacctcaccctgaacaacgggagtcaggcggtaggacgctcttcattttactgcctggagtacttcccttctcagatgcttcgcacgggaaacaactttaccttcagctacacctttgaggacgtgccttttcacagcagctacgctcacagccaaagtctggaccgtctcatgaatcctctcatcgaccaatacctgtattacttgagcaaaacaaacgctccaagcggaaccaccacgatgtccaggcttcagttttctcaggccggagcgagtgacattcgggaccagtctagaaactggcttcctggaccctgttaccgccagcagcgagtatcaaagacagctgcggacaacaacaacagtgattactcgtggactggagctaccaagtaccacctcaatggaagagactctctggtgaacccgggcccagctatggccagccacaaggatgatgaagaaaaatattttcctcagagcggggttctcatcttcgggaaacaaggctcaaataaaactaatgtggacattgaaaaggttatgattacagacgaagaggaaatcaggaccaccaatcccgtggctacggagcagtatggttctgtatctaccaaccttcaaagcggcaacacacaagcagctacctcagatgtcaacacacaaggcgttcttcctgacatggtctggcaggacagagatgtgtacctgcaggggcccatctgggcaaagattcctcacacggacggacactttcacccttctcccctcatgggcggatttggattgaagcaccctcccccacagattctcatcaagaataccccggtacctgcgaatccttcgaccaccttcagtgcggcaaagtttgcttccttcatcacacagtattccacgggacaggtcagcgtggagatagagtgggagctgcagaaggagaacagcaaacgctggaaccccgagatccagtatacttccaactacaacaaatctgttaatgtggactttactgtggacactaatggtgtgtattcagagcctcgccccattggcaccagatacctgactcgtaatctgtaa

SEQ ID NO: 3517 - DNA, 2208 bp, Artificial Sequence
  Description of Artificial Sequence: Synthetic polynucleotide
atggctgccgatggttatcttccagattggctcgaggacactctctctgaaggaataagacagtggtggaagctcaaacctggcccaccaccgccaaagcccgcagagcggcataaggacgacagcaggggtcttgtgcttcctgggtacaagtacctcggacccttcaacggactcgacaagggggagccggtcaacgaggcagacgccgcggccctcgagcacgacaaggcctacgaccggcagctcgacagcggagacaacccgtacctcaagtacaaccacgccgacgcggagtttcaggagcgtcttaaagaagatacgtcttttggggacaacctcggacgagcagtcttccaggcgaaaaagagggttcttgaacctctgggcctggttgaggaacctgttaagacggctccgggaaaaaagaggccggtagagcactctcctgtggagccagactcctcctcgggaaccggaaaggcgggccagcagcctgcaagaaaaagattgaatttcggtcagactggagacgcagactccgtacctgacccccagcctctcggacagccaccagcagccccctctggtctgggaactaatacgatggctacaggcagtggcgcaccaatggcagacaataacgagggcgccgacggagtgggtaattcctcgggaaattggcattgcgattccacatggatgggcgacagagtcatcaccaccagcacccgcacctgggctctgcccacctacaacaaccatctgtacaagcaaatttccagccaatcaggagcatcgaacgacaaccactactttggctacagcaccccctgggggtattttgacttcaacagattccactgccacttttcgccacgtgactggcaaagactcatcaacaacaactggggattccggcccaagagactcagcttcaagctctttaacattcaagtcaaggaggtcacgcagaatgacggtacgacgacgattgccaataaccttaccagcacggttcaggtctttactgactcggagtaccagctcccgtacgtcctcggctcggcgcatcaaggatgcctcccgccgttcccagcagacgtcttcatggtgccacagtatggatacctcaccctgaacaacgggagtcaggcggtaggacgctcttcattttactgcctggagtacttcccttctcagatgcttcgcacgggaaacaactttaccttcagctacacctttgaggacgtgccttttcacagcagctacgctcacagccaaagtctggaccgtctcatgaatcctctcatcgaccaatacctgtattacttgagcaaaacaaacgctccaagcggaaccaccacgatgtccaggcttcagttttctcaggccggagcgagtgacattcgggaccagtctagaaactggcttcctggaccctgttaccgccagcagcgagtatcaaagacagctgcggacaacaacaacagtgattactcgtggactggagctaccaagtaccacctcaatggaagagactctctggtgaacccgggcccagctatggccagccacaaggatgatgaagaaaaatattttcctcagagcggggttctcatcttcgggaaacaaggctcaaataaaactaatgtggacattgaaaaggttatgattacagacgaagaggaaatcaggaccaccaatcccgtggctacggagcagtatggttctgtatctaccaaccttcaaagcggcaacacacaagcagctacctcagatgtcaacacacaaggcgttcttcctggcatggtctggcaggacagagatgtgtacctgcaggggcccatctgggcaaagattcctcacacggacggacactttcacccttctcccctcatgggcggatttggattgaagcaccctcccccacagattctcatcaagaataccccggtacctgcgaatccttcgaccaccttcagtgcggcaaagtttgcttccttcatcacacagtattccacgggacaggtcagcgtggagatagagtgggagctgcagaaggagaacagcaaacgctggaaccccgagatccagtatacttccaactacaacaaatctgttaatgtggactttactgtggacactaatggtgtgtattcagagcctcgccccattggcaccagatacctgactcgtaatctgtaa

SEQ ID NO: 3518 - DNA, 2208 bp, Artificial Sequence
  Description of Artificial Sequence: Synthetic polynucleotide
atggctgccgatggttatcttccagattggctcgaggacactctctctgaaggaataagacagtggtggaagctcaaacctggcccaccaccgccaaagcccgcagagcggcataaggacgacagcaggggtcttgtgcttcctgggtacaagtacctcggacccttcaacggactcgacaagggggagccggtcaacgaggcagacgccgcggccctcgagcacgacaaggcctacgaccggcagctcgacagcggagacaacccgtacctcaagtacaaccacgccgacgcggagtttcaggagcgtcttaaagaagatacgtcttttgggggcaacctcggacgagcagtcttccaggcgaaaaagagggttcttgaacctctgggcctggttgaggaacctgttaagacggctccgggaaaaaagaggccggtagagcactctcctgtggagccagactcctcctcgggaaccggaaaggcgggccagcagcctgcaagaaaaagattgaatttcggtcagactggagacgcagactccgtacctgacccccagcctctcggacagccaccagcagccccctctggtctgggaactaatacgatggctacaggcagtggcgcaccaatggcagacaataacgagggcgccgacggagtgggtaattcctcgggaaattggcattgcgattccacatggatgggcgacagagtcatcaccaccagcacccgcacctgggctctgcccacctacaacaaccatctgtacaagcaaatttccagccaatcaggagcatcgaacgacaaccactactttggctacagcaccccctgggggtattttgacttcaacagattccactgccacttttcgccacgtgactggcaaagactcatcaacaacaactggggattccggcccaagagactcagcttcaagctctttaacattcaagtcaaggaggtcacgcagaatgacggtacgacgacgattgccaataaccttaccagcacggttcaggtctttactgactcggagtaccagctcccgtacgtcctcgactcggcgcatcaaggatgcctcccgccgttcccagcagacgtcttcatggtgccacagtatggatacctcaccctgaacaacgggagtcaggcggtaggacgctcttcattttactgcctggagtacttcccttctcagatgcttcgcacgggaaacaactttaccttcagctacacctttgaggacgtgccttttcacagcagctacgctcacagccaaagtctggaccgtctcatgaatcctctcatcgaccaatacctgtattacttgagcaaaacaaacgctccaagcggaaccaccacgatgtccaggcttcagttttctcaggccggagcgagtgacattcgggaccagtctagaaactggcttcctggaccctgttaccgccagcagcgagtatcaaagacagctgcggacaacaacaacagtgattactcgtggactggagctaccaagtaccacctcaatggaagagactctctggtgaacccgggcccagctatggccagccacaaggatgatgaagaaaaatattttcctcagagcggggttctcatcttcgggaaacaaggctcaaataaaactaatgtggacattgaaaaggttatgattacagacgaagaggaaatcaggaccaccaatcccgtggctacggagcagtatggttctgtatctaccaaccttcaaagcggcaacacacaagcagctacctcagatgtcaacacacaaggcgttcttcctggcatggtctggcaggacagagatgtgtacctgcaggggcccatctgggcaaagattcctcacacggacggacactttcacccttctcccctcatgggcggatttggattgaagcaccctcccccacagattctcatcaagaataccccggtacctgcgaatccttcgaccaccttcagtgcggcaaagtttgcttccttcatcacacagtattccacgggacaggtcagcgtggagatagagtgggagctgcagaaggagaacagcaaacgctggaaccccgagatccagtatacttccaactacaacaaatctgttaatgtggactttactgtggacactaatggtgtgtattcagagcctcgccccattggcaccagatacctgactcgtaatctgtaa

SEQ ID NO: 3519 - DNA, 2208 bp, Artificial Sequence
  Description of Artificial Sequence: Synthetic polynucleotide
atggctgccgatggttatcttccagattggctcgaggacactctctctgaaggaataagacagtggtggaagctcaaacctggcccaccaccgccaaagcccgcagagcggcataaggacgacagcaggggtcttgtgcttcctgggtacaagtacctcggacccttcaacggactcgacaagggggagccggtcaacgaggcagacgccgcggccctcgagcacgacaaggcctacgaccggcagctcgacagcggagacaacccgtacctcaagtacaaccacgccgacgcggagtttcaggagcgtcttaaagaagatacgtcttttgggggcaacctcggacgagcagtcttccaggcgaaaaagagggttcttgaacctctgggcctggttgaggaacctgttaagacggctccgggaaaaaagaggccggtagagcactctcctgtggagccagactcctcctcgggaaccggaaaggcgggccagcagcctgcaagaaaaagattgaatttcggtcagactggagacgcagactccgtacctgacccccagcctctcggacagccaccagcagccccctctggtctgggaactaatacgatggctacaggcagtggcgcaccaatggcagacaataacgagggcgccgacggagtgggtaattcctcgggaaattggcattgcgattccacatggatgggcgacagagtcatcaccaccagcacccgcacctgggctctgcccacctacaacaaccatctgtacaagcaaatttccagccaatcaggagcatcgaacgacaaccactactttggctacagcaccccctgggggtattttgacttcaacagattccactgccacttttcgccacgtgactggcaaagactcatcaacaacaactggggattccggcccaagagactcagcttcaagctctttaacattcaagtcaaggaggtcacgcagaatgacggtacgacgacgattgccaataaccttaccagcacggttcaggtctttactgactcggagtaccagctcccgtacgtcctcggctcggcgcatcaaggatgcctcccgccgttcccagcagacgtcttcatggtgccacagtatggatacctcaccctgaacaacgggagtcaggcggtaggacgctcttcattttactgcctggagtacttcccttctcagatgcttcgcacgggaaacaactttaccttcagctacacctttgaggacgtgccttttcacagcagctacgctcacagccaaagtctggaccgtctcatgaatcctctcatcgaccaatacctgtattacttgagcaaaacaaacgctccaagcggaaccaccacgatgtccaggcttcagttttctcaggccggagcgagtgacattcgggaccagtctagaaactggcttcctggaccctgttaccgccagcagcgagtatcaaagacagctgcggacaacaacaacagtgattactcgtggactggagctaccaagtaccacctcaatggaagagactctctggtgaacccgggcccagctatggccagccacaaggatgatgaagaaaaatattttcctcagagcggggttctcatcttcgggaaacaaggctcaaataaaactaatgtggacattgaaaaggttatgattacagacgaagaggaaatcaggaccaccaatcccgtggctacggagcagtatggttctgtatctaccaaccttcaaagcggcaacacacaagcagctacctcagatgtcaacacacaaggcgttcttcctggcatggtctggcaggacagagatgtgtacctgcaggggcccatctgggcaaagattcctcacacggacggacactttcacccttctcccctcatgggcggatttggattgaagcaccctcccccacagattctcatcaagaataccccggtacctgcgaatccttcgaccaccttcagtgcgacaaagtttgcttccttcatcacacagtattccacgggacaggtcagcgtggagatagagtgggagctgcagaaggagaacagcaaacgctggaaccccgagatccagtatacttccaactacaacaaatctgttaatgtggactttactgtggacactaatggtgtgtattcagagcctcgccccattggcaccagatacctgactcgtaatctgtaa

SEQ ID NO: 3520 - DNA, 2208 bp, Artificial Sequence
  Description of Artificial Sequence: Synthetic polynucleotide
atggctgccgatggttatcttccagattggctcgaggacactctctctgaaggaataagacagtggtggaagctcaaacctggcccaccaccgccaaagcccgcagagcggcataaggacgacagcaggggtcttgtgcttcctgggtacaagtacctcggacccttcaacggactcgacaagggggagtcggtcaacgaggcagacgccgcggccctcgagcacgacaaggcctacgaccggcagctcgacagcggagacaacccgtacctcaagtacaaccacgccgacgcggagtttcaggagcgtcttaaagaagatacgtcttttgggggcaacctcggacgagcagtcttccaggcgaaaaagagggttcttgaacctctgggcctggttgaggaacctgttaagacggctccgggaaaaaagaggccggtagagcactctcctgtggagccagactcctcctcgggaaccggaaaggcgggccagcagcctgcaagaaaaagattgaatttcggtcagactggagacgcagactccgtacctgacccccagcctctcggacagccaccagcagccccctctggtctgggaactaatacgatggctacaggcagtggcgcaccaatggcagacaataacgagggcgccgacggagtgggtaattcctcgggaaattggcattgcgattccacatggatgggcgacagagtcatcaccaccagcacccgcacctgggctctgcccacctacaacaaccatctgtacaagcaaatttccagccaatcaggagcatcgaacgacaaccactactttggctacagcaccccctgggggtattttgacttcaacagattccactgccacttttcgccacgtgactggcaaagactcatcaacaacaactggggattccggcccaagagactcagcttcaagctctttaacattcaagtcaaggaggtcacgcagaatgacggtacgacgacgattgccaataaccttaccagcacggttcaggtctttactgactcggagtaccagctcccgtacgtcctcggctcggcgcatcaaggatgcctcccgccgttcccagcagacgtcttcatggtgccacagtatggatacctcaccctgaacaacgggagtcaggcggtaggacgctcttcattttactgcctggagtacttcccttctcagatgcttcgcacgggaaacaactttaccttcagctacacctttgaggacgtgccttttcacagcagctacgctcacagccaaagtctggaccgtctcatgaatcctctcatcgaccaatacctgtattacttgagcaaaacaaacgctccaagcggaaccaccacgatgtccaggcttcagttttctcaggccggagcgagtgacattcgggaccagtctagaaactggcttcctggaccctgttaccgccagcagcgagtatcaaagacagctgcggacaacaacaacagtgattactcgtggactggagctaccaagtaccacctcaatggaagagactctctggtgaacccgggcccagctatggccagccacaaggatgatgaagaaaaatattttcctcagagcggggttctcatcttcgggaaacaaggctcaaataaaactaatgtggacattgaaaaggttatgattacagacgaagaggaaatcaggaccaccaatcccgtggctacggagcagtatggttctgtatctaccaaccttcaaagcggcaacacacaagcagctacctcagatgtcaacacacaaggcgttcttcctggcatggtctggcaggacagagatgtgtacctgcaggggcccatctgggcaaagattcctcacacggacggacactttcacccttctcccctcatgggcggatttggattgaagcaccctcccccacagattctcatcaagaataccccggtacctgcgaatccttcgaccaccttcagtgcggcaaagtttgcttccttcatcacacagtattccacgggacaggtcagcgtggagatagagtgggagctgcagaaggagaacagcaaacgctggaaccccgagatccagtatacttccaactacaacaaatctgttaatgtggactttactgtggacactaatggtgtgtattcagagcctcgccccattggcaccagatacctgactcgtaatctgtaa

SEQ ID NO: 3521 - DNA, 2208 bp, Artificial Sequence
  Description of Artificial Sequence: Synthetic polynucleotide
atggctgccgatggttatcttccagattggctcgaggacactctctctgaaggaataagacagtggtggaagctcaaacctggcccaccaccgccaaagcccgcagagcggcataaggacgacagcaggggtcttgtgcttcctgggtacaagtacctcggacccttcaacggactcgacaagggggagccggtcaacgaggcagacgccgcggccctcgagcacgacaaggcctacgaccggcagctcgacagcggagacaacccgtacctcaagtacaaccacgccgacgcggagtttcaggagcgtcttaaagaagatacgtcttttgggggcaacctcggacgagcagtcttccaggcgaaaaagagggttcttgaacctctgggcctggttgaggaacctgttaagacggctccgggaaaaaagaggccggtagagcactctcctgtggagccagactcctcctcgggaaccggaaaggcgggccagcagcctgcaagaaaaagattgaatttcggtcagactggagacgcagactccgtacctgacccccagcctctcggacagccaccagcagccccctctggtctgggaactaatacgatggctacaggcagtggcgcaccaatggcagacaataacgagggcgccgacggagtgggtaattcctcgggaaattggcattgcgattccacatggatgggcgacagagtcatcaccaccagcacccgcacctgggctctgcccacctacaacaaccatctgtacaagcaaatttccagccaatcaggagcatcgaacgacaaccactactttggctacagcaccccctgggggtattttgacttcaacagattccactgccacttttcgccacgtgactggcaaagactcatcaacaacaactggggattccggcccaagagactcagcttcaagctctttaacattcaagtcaaggaggtcacgcagaatgacggtacgacgacgattgccaataaccttaccagcacggttcaggtctttactgactcggagtaccagctcccgtacgtcctcggctcggtgcatcaaggatgcctcccgccgttcccagcagacgtcttcatggtgccacagtatggatacctcaccctgaacaacgggagtcaggcggtaggacgctcttcattttactgcctggagtacttcccttctcagatgcttcgcacgggaaacaactttaccttcagctacacctttgaggacgtgccttttcacagcagctacgctcacagccaaagtctggaccgtctcatgaatcctctcatcgaccaatacctgtattacttgagcaaaacaaacgctccaagcggaaccaccacgatgtccaggcttcagttttctcaggccggagcgagtgacattcgggaccagtctagaaactggcttcctggaccctgttaccgccagcagcgagtatcaaagacagctgcggacaacaacaacagtgattactcgtggactggagctaccaagtaccacctcaatggaagagactctctggtgaacccgggcccagctatggccagccacaaggatgatgaagaaaaatattttcctcagagcggggttctcatcttcgggaaacaaggctcaaataaaactaatgtggacattgaaaaggttatgattacagacgaagaggaaatcaggaccaccaatcccgtggctacggagcagtatggttctgtatctaccaaccttcaaagcggcaacacacaagcagctacctcagatgtcaacacacaaggcgttcttcctggcatggtctggcaggacagagatgtgtacctgcaggggcccatctgggcaaagattcctcacacggacggacactttcacccttctcccctcatgggcggatttggattgaagcaccctcccccacagattctcatcaagaataccccggtacctgcgaatccttcgaccaccttcagtgcggcaaagtttgcttccttcatcacacagtattccacgggacaggtcagcgtggagatagagtgggagctgcagaaggagaacagcaaacgctggaaccccgagatccagtatacttccaactacaacaaatctgttaatgtggactttactgtggacactaatggtgtgtattcagagcctcgccccattggcaccagatacctgactcgtaatctgtaa

SEQ ID NO: 3522 - DNA, 2208 bp, Artificial Sequence
  Description of Artificial Sequence: Synthetic polynucleotide
atggctgccgatggttatcttccagattggctcgaggacactctctctgaaggaataagacagtggtggaagctcaaacctggcccaccaccgccaaagcccgcagagcggcataaggacgacagcaggggtcttgtgcttcctgggtacaagtacctcggacccttcaacggactcgacaagggggagccggtcaacgaggcagacgccgcggccctcgagcacgacaaggcctacgaccggcagctcgacagcggagacaacccgtacctcaagtacaaccacgccgacgcggagtttcaggagcgtcttaaagaagatacgtcttttgggggcaacctcggacgagcagtcttccaggcgaaaaagagggttcttgaacctctgggcctggttgaggaacctgttaagacggctccgggaaaaaagaggccggtagagcactctcctgtggagtcagactcctcctcgggaaccggaaaggcgggccagcagcctgcaagaaaaagattgaatttcggtcagactggagacgcagactccgtacctgacccccagcctctcggacagccaccagcagccccctctggtctgggaactaatacgatggctacaggcagtggcgcaccaatggcagacaataacgagggcgccgacggagtgggtaattcctcgggaaattggcattgcgattccacatggatgggcgacagagtcatcaccaccagcacccgcacctgggctctgcccacctacaacaaccatctgtacaagcaaatttccagccaatcaggagcatcgaacgacaaccactactttggctacagcaccccctgggggtattttgacttcaacagattccactgccacttttcgccacgtgactggcaaagactcatcaacaacaactggggattccggcccaagagactcagcttcaagctctttaacattcaagtcaaggaggtcacgcagaatgacggtacgacgacgattgccaataaccttaccagcacggttcaggtctttactgactcggagtaccagctcccgtacgtcctcggctcggcgcatcaaggatgcctcccgccgttcccagcagacgtcttcatggtgccacagtatggatacctcaccctgaacaacgggagtcaggcggtaggacgctcttcattttactgcctggagtacttcccttctcagatgcttcgcacgggaaacaactttaccttcagctacacctttgaggacgtgccttttcacagcagctacgctcacagccaaagtctggaccgtctcatgaatcctctcatcgaccaatacctgtattacttgagcaaaacaaacgctccaagcggaaccaccacgatgtccaggcttcagttttctcaggccggagcgagtgacattcgggaccagtctagaaactggcttcctggaccctgttaccgccagcagcgagtatcaaagacagctgcggacaacaacaacagtgattactcgtggactggagctaccaagtaccacctcaatggaagagactctctggtgaacccgggcccagctatggccagccacaaggatgatgaagaaaaatattttcctcagagcggggttctcatcttcgggaaacaaggctcaaataaaactaatgtggacattgaaaaggttatgattacagacgaagaggaaatcaggaccaccaatcccgtggctacggagcagtatggttctgtatctaccaaccttcaaagcggcaacacacaagcagctacctcagatgtcaacacacaaggcgttcttcctggcatggtctggcaggacagagatgtgtacctgcaggggcccatctgggcaaagattcctcacacggacggacactttcacccttctcccctcatgggcggatttggattgaagcaccctcccccacagattctcatcaagaataccccggtacctgcgaatccttcgaccaccttcagtgcggcaaagtttgcttccttcatcacacagtattccacgggacaggtcagcgtggagatagagtgggagctgcagaaggagaacagcaaacgctggaaccccgagatccagtatacttccaactacaacaaatctgttaatgtggactttactgtggacactaatggtgtgtattcagagcctcgccccattggcaccagatacctgactcgtaatctgtaa

SEQ ID NO: 3523 - DNA, 2208 bp, Artificial Sequence
  Description of Artificial Sequence: Synthetic polynucleotide
atggctgccgatggttatcttccagattggctcgaggacactctctctgaaggaataagacagtggtggaagctcaaacctggcccaccaccgccaaagcccgcagagcggcataaggacgacagcaggggtcttgtgcttcctgggtacaagtacctcggacccttcaacggactcgacaagggggagccggtcaacgaggcagacgccgcggccctcgagcacgacaaggcctacgaccggcagctcgacagcggagacaacccgtacctcaagtacaaccacgccgacgcggagtttcaggagcgtcttaaagaagatacgtcttttgggggcaacctcggacgagcagtcttccaggcgaaaaagagggttcttgaacctctgggcctggttgaggaacctgttaagacggctccgggaaaaaagaggccggtagagcactctcctgtggagccagactcctcctcgggaaccggaaaggcgggccagcagcctgcaagaaaaagattgaatttcggtcagactggagacgcagactccgtacctgacccccagcctctcggacagccaccagcagccccctctggtctgggaactaatacgatggctacaggcagtggcgcaccaatggcagacaataacgagggcgccgacggagtgggtaattcctcgggaaattggcattgcgattccacatggatgggcgacagagtcatcaccaccagcacccgcacctgggctctgcccacctacaacaaccatctgtacaagcaaatttccagccaatcaggagcatcgaacgacaaccactactttggctacagcaccccctgggggtattttgacttcaacagattccactgccacttttcgccacgtgactggcaaagactcatcaacaacaactggggattccggcccaagagactcagcttcaagctctttaacattcaagtcaaggaggtcacgcagaatgacggtacgacgacgattgccaataaccttaccagcacggttcaggtctttactgactcggagtaccagctcccgtacgtcctcggctcggcgcatcaaggatgcctcccgccgttcccagcagacgtcttcatggtgccacagtatggatacctcaccctgaacaacgggagtcaggcggtaggacgctcttcattttactgcctggagtacttcccttctcagatgcttcgcacgggaaacaactttaccttcagctacacctttgaggacgtgccttttcacagcagctacgctcacagccaaagtatggaccgtctcatgaatcctctcatcgaccaatacctgtattacttgagcaaaacaaacgctccaagcggaaccaccacgatgtccaggcttcagttttctcaggccggagcgagtgacattcgggaccagtctagaaactggcttcctggaccctgttaccgccagcagcgagtatcaaagacagctgcggacaacaacaacagtgattactcgtggactggagctaccaagtaccacctcaatggaagagactctctggtgaacccgggcccagctatggccagccacaaggatgatgaagaaaaatattttcctcagagcggggttctcatcttcgggaaacaaggctcaaataaaactaatgtggacattgaaaaggttatgattacagacgaagaggaaatcaggaccaccaatcccgtggctacggagcagtatggttctgtatctaccaaccttcaaagcggcaacacacaagcagctacctcagatgtcaacacacaaggcgttcttcctggcatggtctggcaggacagagatgtgtacctgcaggggcccatctgggcaaagattcctcacacggacggacactttcacccttctcccctcatgggcggatttggattgaagcaccctcccccacagattctcatcaagaataccccggtacctgcgaatccttcgaccaccttcagtgcggcaaagtttgcttccttcatcacacagtattccacgggacaggtcagcgtggagatagagtgggagctgcagaaggagaacagcaaacgctggaaccccgagatccagtatacttccaactacaacaaatctgttaatgtggactttactgtggacactaatggtgtgtattcagagcctcgccccattggcaccagatacctgactcgtaatctgtaa

SEQ ID NO: 3524 - DNA, 2208 bp, Artificial Sequence
  Description of Artificial Sequence: Synthetic polynucleotide
atggctgccgatggttatcttccagattggctcgaggacactctctctgaaggaataagacagtggtggaagctcaaacctggcccaccaccgccaaagcccgcagagcggcataaggacgacagcaggggtcttgtgcttcctgggtacaagtacctcggacccttcaacggactcgacaagggggagccggtcaacgaggcagacgccgcggccctcgagcacgacaaggcctacgaccggcagctcgacagcggagacaacccgtacctcaagtacaaccacgccgacgcggagtttcaggagcgtcttaaagaagatacgtcttttgggggcaacctcggacgagcagtcttccaggcgaaaaagagggttcttgaacctctgggcctggttgaggaacctgttaagacggctccgggaaaaaagaggccggtagagcactctcctgtggagccagactcctcctcgggaaccggaaaggcgggccagcagcctgcaagaaaaagattgaatttcggtcagactggagacgcagactccgtacctgacccccagcctctcggacagccaccagcagccccctctggtctgggaactaatacgatggctacaggcagtggcgcaccaatggcagacaataacgagggcgccgacggagtgggtaattcctcgggaaattggcattgcgattccacatggatgggcgacagagtcatcaccaccagcacccgcacctgggctctgcccacctacaacaaccatctgtacaagcaaatttccagccaatcaggagcatcgaacgacaaccactactttggctacagcaccccctgggggtattttgacttcaacagattccactgccacttttcgccacgtgactggcaaagactcatcaacaacaactggggattccggcccaagagactcagcttcaagctctttaacattcaagtcaaggaggtcacgcagaatgacggtacgacgacgattgccaataaccttaccagcacggttcaggtctttactgactcggagtaccagctcccgtacgtcctcggctcggcgcatcaaggatgcctcccgccgttcccagcagacgtcttcatggtgccacagtatggatacctcaccctgaacaacgggagtcaggcggtaggacgctcttcattttactgcctggagtacttcccttctcagatgcttcgcacgggaaacaactttaccttcagctacacctttgaggacgtgccttttcacagcagctacgctcacagccaaagtctggaccgtctcatgaatcctctcatcgaccaatacctgtattacttgagcaaaacaaacgctccaagcggaaccaccacgatgtccaggcttcagttttctcaggccggagcgagtgacattcgggaccagtctagaaactggcttcctggaccctgttaccgccagcagcgagtatcaaagacagctgcggacaacaacaacagtgattactcgtggactggagctaccaagtaccacctcaatggaagagactctctggtgaacccgggcccagctatggccagccacaaggatgatgaagaaaaatattttcctcagagcggggttctcatctttcggaaacaaggctcaaataaaactaatgtggacattgaaaaggttatgattacagacgaagaggaaatcaggaccaccaatcccgtggctacggagcagtatggttctgtatctaccaaccttcaaagcggcaacacacaagcagctacctcagatgtcaacacacaaggcgttcttcctggcatggtctggcaggacagagatgtgtacctgcaggggcccatctgggcaaagattcctcacacggacggacactttcacccttctcccctcatgggcggatttggattgaagcaccctcccccacagattctcatcaagaataccccggtacctgcgaatccttcgaccaccttcagtgcggcaaagtttgcttccttcatcacacagtattccacgggacaggtcagcgtggagatagagtgggagctgcagaaggagaacagcaaacgctggaaccccgagatccagtatacttccaactacaacaaatctgttaatgtggactttactgtggacactaatggtgtgtattcagagcctcgccccattggcaccagatacctgactcgtaatctgtaa

SEQ ID NO: 3525 - DNA, 2208 bp, Artificial Sequence
  Description of Artificial Sequence: Synthetic polynucleotide
atggctgccgatggttatcttccagattggctcgaggacactctctctgaaggaataagacagtggtggaagctcaaacctggcccaccaccgccaaagcccgcagagcggcataaggacgacagcaggggtcttgtgcttcctgggtacaagtacctcggacccttcaacggactcgacaagggggagccggtcaacgaggcagacaccgcggccctcgagcacgacaaggcctacgaccggcagctcgacagcggagacaacccgtacctcaagtacaaccacgccgacgcggagtttcaggagcgtcttaaagaagatacgtcttttgggggcaacctcggacgagcagtcttccaggcgaaaaagagggttcttgaacctctgggcctggttgaggaacctgttaagacggctccgggaaaaaagaggccggtagagcactctcctgtggagccagactcctcctcgggaaccggaaaggcgggccagcagcctgcaagaaaaagattgaatttcggtcagactggagacgcagactccgtacctgacccccagcctctcggacagccaccagcagccccctctggtctgggaactaatacgatggctacaggcagtggcgcaccaatggcagacaataacgagggcgccgacggagtgggtaattcctcgggaaattggcattgcgattccacatggatgggcgacagagtcatcaccaccagcacccgcacctgggctctgcccacctacaacaaccatctgtacaagcaaatttccagccaatcaggagcatcgaacgacaaccactactttggctacagcaccccctgggggtattttgacttcaacagattccactgccacttttcgccacgtgactggcaaagactcatcaacaacaactggggattccggcccaagagactcagcttcaagctctttaacattcaagtcaaggaggtcacgcagaatgacggtacgacgacgattgccaataaccttaccagcacggttcaggtctttactgactcggagtaccagctcccgtacgtcctcggctcggcgcatcaaggatgcctcccgccgttcccagcagacgtcttcatggtgccacagtatggatacctcaccctgaacaacgggagtcaggcggtaggacgctcttcattttactgcctggagtacttcccttctcagatgcttcgcacgggaaacaactttaccttcagctacacctttgaggacgtgccttttcacagcagctacgctcacagccaaagtctggaccgtctcatgaatcctctcatcgaccaatacctgtattacttgagcaaaacaaacgctccaagcggaaccaccacgatgtccaggcttcagttttctcaggccggagcgagtgacattcgggaccagtctagaaactggcttcctggaccctgttaccgccagcagcgagtatcaaagacagctgcggacaacaacaacagtgattactcgtggactggagctaccaagtaccacctcaatggaagagactctctggtgaacccgggcccagctatggccagccacaaggatgatgaagaaaaatattttcctcagagcggggttctcatcttcgggaaacaaggctcaaataaaactaatgtggacattgaaaaggttatgattacagacgaagaggaaatcaggaccaccaatcccgtggctacggagcagtatggttctgtatctaccaaccttcaaagcggcaacacacaagcagctacctcagatgtcaacacacaaggcgttcttcctggcatggtctggcaggacagagatgtgtacctgcaggggcccatctgggcaaagattcctcacacggacggacactttcacccttctcccctcatgggcggatttggattgaagcaccctcccccacagattctcatcaagaataccccggtacctgcgaatccttcgaccaccttcagtgcggcaaagtttgcttccttcatcacacagtattccacgggacaggtcagcgtggagatagagtgggagctgcagaaggagaacagcaaacgctggaaccccgagatccagtatacttccaactacaacaaatctgttaatgtggactttactgtggacactaatggtgtgtattcagagcctcgccccattggcaccagatacctgactcgtaatctgtaa

SEQ ID NO: 3526 - DNA, 2208 bp, Artificial Sequence
  Description of Artificial Sequence: Synthetic polynucleotide
atggctgccgatggttatcttccagattggctcgaggacactctctctgaaggaataagacagtggtggaagctcaaacctggcccaccaccgccaaagcccgcagagcggcataaggacgacagcaggggtcttgtgcttcctgggtacaagtacctcggacccttcaacggactcgacaagggggagccggtcaacgaggcagacgccgcggccctcgagcacgacaaggcctacgaccggcagctcgacagcggagacaacccgtacctcaagtacaaccacgccgacgcggagtttcaggagcgtcttaaagaagatacgtcttttgggggcaacctcggacgagcagtcttccaggcgaaaaagagggttcttgaacctctgggcctggttgaggaacctgttaagacggctccgggaaaaaagaggccggtagagcactctcctgtggagccagactcctcctcgggaaccggaaaggcgggccagcagcctgcaagaaaaagattgaatttcggtcagactggagacgcagactccgtacctgacccccagcctctcggacagccaccagcagccccctctggtctgggaactaatacgatggctacaggcagtggcacaccaatggcagacaataacgagggcgccgacggagtgggtaattcctcgggaaattggcattgcgattccacatggatgggcgacagagtcatcaccaccagcacccgcacctgggctctgcccacctacaacaaccatctgtacaagcaaatttccagccaatcaggagcatcgaacgacaaccactactttggctacagcaccccctgggggtattttgacttcaacagattccactgccacttttcgccacgtgactggcaaagactcatcaacaacaactggggattccggcccaagagactcagcttcaagctctttaacattcaagtcaaggaggtcacgcagaatgacggtacgacgacgattgccaataaccttaccagcacggttcaggtctttactgactcggagtaccagctcccgtacgtcctcggctcggcgcatcaaggatgcctcccgccgttcccagcagacgtcttcatggtgccacagtatggatacctcaccctgaacaacgggagtcaggcggtaggacgctcttcattttactgcctggagtacttcccttctcagatgcttcgcacgggaaacaactttaccttcagctacacctttgaggacgtgccttttcacagcagctacgctcacagccaaagtctggaccgtctcatgaatcctctcatcgaccaatacctgtattacttgagcaaaacaaacgctccaagcggaaccaccacgatgtccaggcttcagttttctcaggccggagcgagtgacattcgggaccagtctagaaactggcttcctggaccctgttaccgccagcagcgagtatcaaagacagctgcggacaacaacaacagtgattactcgtggactggagctaccaagtaccacctcaatggaagagactctctggtgaacccgggcccagctatggccagccacaaggatgatgaagaaaaatattttcctcagagcggggttctcatcttcgggaaacaaggctcaaataaaactaatgtggacattgaaaaggttatgattacagacgaagaggaaatcaggaccaccaatcccgtggctacggagcagtatggttctgtatctaccaaccttcaaagcggcaacacacaagcagctacctcagatgtcaacacacaaggcgttcttcctggcatggtctggcaggacagagatgtgtacctgcaggggcccatctgggcaaagattcctcacacggacggacactttcacccttctcccctcatgggcggatttggattgaagcaccctcccccacagattctcatcaagaataccccggtacctgcgaatccttcgaccaccttcagtgcggcaaagtttgcttccttcatcacacagtattccacgggacaggtcagcgtggagatagagtgggagctgcagaaggagaacagcaaacgctggaaccccgagatccagtatacttccaactacaacaaatctgttaatgtggactttactgtggacactaatggtgtgtattcagagcctcgccccattggcaccagatacctgactcgtaatctgtaa

SEQ ID NO: 3527 - DNA, 2208 bp, Artificial Sequence
  Description of Artificial Sequence: Synthetic polynucleotide
atggctgccgatggttatcttccagattggctcgaggacactctctctgaaggaataagacagtggtggaagctcaaacctggcccaccaccgccaaagcccgcagagcggcataaggacgacagcaggggtcttgtgcttcctgggtacaagtacctcggacccttcaacggactcgacaagggggagccggtcaacgaggcagacgccgcggccctcgagcacgacaaggcctacgaccggcagctcgacagcggagacaacccgtacctcaagtacaaccacgccgacgcggagtttcaggagcgtcttaaagaagatacgtcttttgggggcaacctcggacgagcagtcttccaggcgaaaaagagggttcttgaacctctgggcctggttgaggaacctgttaagacggctccgggaaaaaagaggccggtagagcactctcctgtggagccagactcctcctcgggaaccggaaaggcgggccagcagcctgcaagaaaaagattgaatttcggtcagactggagacgcagactccgtacctgacccccagcctctcggacagccaccagcagccccctctggtctgggaactaatacgatggctacaggcagtggcgcaccaatggcagacaataacgagggcgccgacggagtgggtaattcctcgggaaattggcattgcgattccacatggatgggcgacagagtcatcaccaccagcacccgcacctgggctctgtccacctacaacaaccatctgtacaagcaaatttccagccaatcaggagcatcgaacgacaaccactactttggctacagcaccccctgggggtattttgacttcaacagattccactgccacttttcgccacgtgactggcaaagactcatcaacaacaactggggattccggcccaagagactcagcttcaagctctttaacattcaagtcaaggaggtcacgcagaatgacggtacgacgacgattgccaataaccttaccagcacggttcaggtctttactgactcggagtaccagctcccgtacgtcctcggctcggcgcatcaaggatgcctcccgccgttcccagcagacgtcttcatggtgccacagtatggatacctcaccctgaacaacgggagtcaggcggtaggacgctcttcattttactgcctggagtacttcccttctcagatgcttcgcacgggaaacaactttaccttcagctacacctttgaggacgtgccttttcacagcagctacgctcacagccaaagtctggaccgtctcatgaatcctctcatcgaccaatacctgtattacttgagcaaaacaaacgctccaagcggaaccaccacgatgtccaggcttcagttttctcaggccggagcgagtgacattcgggaccagtctagaaactggcttcctggaccctgttaccgccagcagcgagtatcaaagacagctgcggacaacaacaacagtgattactcgtggactggagctaccaagtaccacctcaatggaagagactctctggtgaacccgggcccagctatggccagccacaaggatgatgaagaaaaatattttcctcagagcggggttctcatcttcgggaaacaaggctcaaataaaactaatgtggacattgaaaaggttatgattacagacgaagaggaaatcaggaccaccaatcccgtggctacggagcagtatggttctgtatctaccaaccttcaaagcggcaacacacaagcagctacctcagatgtcaacacacaaggcgttcttcctggcatggtctggcaggacagagatgtgtacctgcaggggcccatctgggcaaagattcctcacacggacggacactttcacccttctcccctcatgggcggatttggattgaagcaccctcccccacagattctcatcaagaataccccggtacctgcgaatccttcgaccaccttcagtgcggcaaagtttgcttccttcatcacacagtattccacgggacaggtcagcgtggagatagagtgggagctgcagaaggagaacagcaaacgctggaaccccgagatccagtatacttccaactacaacaaatctgttaatgtggactttactgtggacactaatggtgtgtattcagagcctcgccccattggcaccagatacctgactcgtaatctgtaa

SEQ ID NO: 3528 - DNA, 2208 bp, Artificial Sequence
  Description of Artificial Sequence: Synthetic polynucleotide
atggctgccgatggttatcttccagattggctcgaggacactctctctgaaggaataagacagtggtggaagctcaaacctggcccaccaccgccaaagcccgcagagcggcataaggacgacagcaggggtcttgtgcttcctgggtacaagtacctcggacccttcaacggactcgacaagggggagccggtcaacgaggcagacgccgcggccctcgagcacgacaaggcctacgaccggcagctcgacagcggagacaacccgtacctcaagtacaaccacgccgacgcggagtttcaggagcgtcttaaagaagatacgtcttttgggggcaacctcggacgagcagtcttccaggcgaaaaagagggttcttgaacctctgggcctggttgaggaacctgttaagacggctccgggaaaaaagaggccggtagagcactctcctgtggagccagactcctcctcgggaaccggaaaggcgggccagcagcctgcaagaaaaagattgaatttcggtcagactggagacgcagactccgtacctgacccccagcctctcggacagccaccagcagccccctctggtctgggaactaatacgatggctacaggcagtggcgcaccaatggcagacaataacgagggcgccgacggagtgggtaattcctcgggaaattggcattgcgattccacatggatgggcgacagagtcatcaccaccagcacccgcacctgggctctgcccacctacaacaaccatctgtacaagcaaatttccagccaatcaggagcatcgaacgacaaccactactttggctacagcaccccctgggggtattttgacttcaacagattccactgccacttttcgccacgtgactggcaaagactcatcaacaacaactggggattccggcccaagagactcagcttcaagctctttaacattcaagtcaaggaggtcacgcagaatgacggtacgacgacgattgccaataaccttaccagcacggttcaggtctttactgactcggagtaccagctcccgtacgtcctcggctcggcgcatcaaggatgcctcccgccgttcccagcagacgtcttcatggtgccacagtatggatacctcaccctgaacaacgggagtcaggcggtaggacgctcttcattttactgcctggagtacttcccttctcagatgcttcgcacgggaaacaactttaccttcagctacacctttgaggacgtgccttttcacagcagctacgctcacagccaaagtctggaccgtctcatgaatcctctcatcgaccaatacctgtattacttgagcaaaacaaacgctccaagcggaaccaccacgatgtccaggcttcagttttctcaggccggagcgagtgacattcgggaccagtctagaaactggcttcctggaccctgttaccgccagcagcgagtatcaaagacagctgtggacaacaacaacagtgattactcgtggactggagctaccaagtaccacctcaatggaagagactctctggtgaacccgggcccagctatggccagccacaaggatgatgaagaaaaatattttcctcagagcggggttctcatcttcgggaaacaaggctcaaataaaactaatgtggacattgaaaaggttatgattacagacgaagaggaaatcaggaccaccaatcccgtggctacggagcagtatggttctgtatctaccaaccttcaaagcggcaacacacaagcagctacctcagatgtcaacacacaaggcgttcttcctggcatggtctggcaggacagagatgtgtacctgcaggggcccatctgggcaaagattcctcacacggacggacactttcacccttctcccctcatgggcggatttggattgaagcaccctcccccacagattctcatcaagaataccccggtacctgcgaatccttcgaccaccttcagtgcggcaaagtttgcttccttcatcacacagtattccacgggacaggtcagcgtggagatagagtgggagctgcagaaggagaacagcaaacgctggaaccccgagatccagtatacttccaactacaacaaatctgttaatgtggactttactgtggacactaatggtgtgtattcagagcctcgccccattggcaccagatacctgactcgtaatctgtaa

SEQ ID NO: 3529 - DNA, 2208 bp, Artificial Sequence
  Description of Artificial Sequence: Synthetic polynucleotide
atggctgccgatggttatcttccagattggctcgaggacactctctctgaaggaataagacagtggtggaagctcaaacctggcccaccaccgccaaagcccgcagagcggcataaggacgacagcaggggtcttgtgcttcctgggtacaagtacctcggacccttcaacggactcgacaagggggagccggtcaacgaggcagacgccgcggccctcgagcacgacaaggcctacgaccggcagctcgacagcggagacaacccgtacctcaagtacaaccacgccgacgcggagtttcaggagcgtcttaaagaagatacgtcttttgggggcaacctcggacgagcagtcttccaggcgaaaaagagggttcttgaacctctgggcctggttgaggaacctgttaagacggctccgggaaaaaagaggccggtagagcactctcctgtggagccagactcctcctcgggaaccggaaaggcgggccagcagcctgcaagaaaaagattgaatttcggtcagactggagacgcagactccgtacctgacccccagcctctcggacagccaccagcagccccctctggtctgggaactaatacgatggctacaggcagtggcgcaccaatggcagacaataacgagggcgccgacggagtgggtaattcctcgggaaattggcattgcgattccacatggatgggcgacagagtcatcaccaccagcacccgcacctgggctctgcccacctacaacaaccatctgtacaagcaaatttccagccaatcaggagcatcgaacgacaaccactactttggctacagcaccccctgggggtattttgacttcaacagattccactgccacttttcgccacgtgactggcaaagactcatcaacaacaactggggattccggcccaagagactcagcttcaagctctttaacattcaagtcaaggaggtcacgcagaatgacggtacgacgacgattgccaataaccttaccagcacggttcaggtctttactgactcggagtaccagctcccgtacgtcctcggctcggcgcatcaaggatgcctcccgccgttcccagcagacgtcttcatggtgccacagtatggatacctcaccctgaacaacgggagtcaggcggtaggacgctcttcattttactgcctggagtacttcccttctcagatacttcgcacgggaaacaactttaccttcagctacacctttgaggacgtgccttttcacagcagctacgctcacagccaaagtctggaccgtctcatgaatcctctcatcgaccaatacctgtattacttgagcaaaacaaacgctccaagcggaaccaccacgatgtccaggcttcagttttctcaggccggagcgagtgacattcgggaccagtctagaaactggcttcctggaccctgttaccgccagcagcgagtatcaaagacagctgcggacaacaacaacagtgattactcgtggactggagctaccaagtaccacctcaatggaagagactctctggtgaacccgggcccagctatggccagccacaaggatgatgaagaaaaatattttcctcagagcggggttctcatcttcgggaaacaaggctcaaataaaactaatgtggacattgaaaaggttatgattacagacgaagaggaaatcaggaccaccaatcccgtggctacggagcagtatggttctgtatctaccaaccttcaaagcggcaacacacaagcagctacctcagatgtcaacacacaaggcgttcttcctggcatggtctggcaggacagagatgtgtacctgcaggggcccatctgggcaaagattcctcacacggacggacactttcacccttctcccctcatgggcggatttggattgaagcaccctcccccacagattctcatcaagaataccccggtacctgcgaatccttcgaccaccttcagtgcggcaaagtttgcttccttcatcacacagtattccacgggacaggtcagcgtggagatagagtgggagctgcagaaggagaacagcaaacgctggaaccccgagatccagtatacttccaactacaacaaatctgttaatgtggactttactgtggacactaatggtgtgtattcagagcctcgccccattggcaccagatacctgactcgtaatctgtaa

SEQ ID NO: 3530 - DNA, 2208 bp, Artificial Sequence
  Description of Artificial Sequence: Synthetic polynucleotide
atggctgccgatggttatcttccagattggctcgaggacactctctctgaaggaataagacagtggtggaagctcaaacctggcccaccaccgccaaagcccgcagagcggcataaggacgacagcaggggtcttgtgcttcctgggtacaagtacctcggacccttcaacggactcgacaagggggagccggtcaacgaggcagacgccgcggccctcgagcacgacaaggcctacgaccggcagctcgacagcggagacaacccgtacctcaagtacaaccacgccgacgcggagtttcaggagcgtcttaaagaagatacgtcttttgggggcaacctcggacgagcagtcttccaggcgaaaaagagggttcttgaacctctgggcctggttgaggaacctgttaagacggctccgggaaaaaagaggccggtagagcactctcctgtggagccagactcctcctcgggaaccggaaaggtgggccagcagcctgcaagaaaaagattgaatttcggtcagactggagacgcagactccgtacctgacccccagcctctcggacagccaccagcagccccctctggtctgggaactaatacgatggctacaggcagtggcgcaccaatggcagacaataacgagggcgccgacggagtgggtaattcctcgggaaattggcattgcgattccacatggatgggcgacagagtcatcaccaccagcacccgcacctgggctctgcccacctacaacaaccatctgtacaagcaaatttccagccaatcaggagcatcgaacgacaaccactactttggctacagcaccccctgggggtattttgacttcaacagattccactgccacttttcgccacgtgactggcaaagactcatcaacaacaactggggattccggcccaagagactcagcttcaagctctttaacattcaagtcaaggaggtcacgcagaatgacggtacgacgacgattgccaataaccttaccagcacggttcaggtctttactgactcggagtaccagctcccgtacgtcctcggctcggcgcatcaaggatgcctcccgccgttcccagcagacgtcttcatggtgccacagtatggatacctcaccctgaacaacgggagtcaggcggtaggacgctcttcattttactgcctggagtacttcccttctcagatgcttcgcacgggaaacaactttaccttcagctacacctttgaggacgtgccttttcacagcagctacgctcacagccaaagtctggaccgtctcatgaatcctctcatcgaccaatacctgtattacttgagcaaaacaaacgctccaagcggaaccaccacgatgtccaggcttcagttttctcaggccggagcgagtgacattcgggaccagtctagaaactggcttcctggaccctgttaccgccagcagcgagtatcaaagacagctgcggacaacaacaacagtgattactcgtggactggagctaccaagtaccacctcaatggaagagactctctggtgaacccgggcccagctatggccagccacaaggatgatgaagaaaaatattttcctcagagcggggttctcatcttcgggaaacaaggctcaaataaaactaatgtggacattgaaaaggttatgattacagacgaagaggaaatcaggaccaccaatcccgtggctacggagcagtatggttctgtatctaccaaccttcaaagcggcaacacacaagcagctacctcagatgtcaacacacaaggcgttcttcctggcatggtctggcaggacagagatgtgtacctgcaggggcccatctgggcaaagattcctcacacggacggacactttcacccttctcccctcatgggcggatttggattgaagcaccctcccccacagattctcatcaagaataccccggtacctgcgaatccttcgaccaccttcagtgcggcaaagtttgcttccttcatcacacagtattccacgggacaggtcagcgtggagatagagtgggagctgcagaaggagaacagcaaacgctggaaccccgagatccagtatacttccaactacaacaaatctgttaatgtggactttactgtggacactaatggtgtgtattcagagcctcgccccattggcaccagatacctgactcgtaatctgtaa

SEQ ID NO: 3531 - DNA, 2208 bp, Artificial Sequence
  Description of Artificial Sequence: Synthetic polynucleotide
atggctgccgatggttatcttccagattggctcgaggacactctctctgaaggaataagacagtggtggaagctcaaacctggcccaccaccgccaaagcccgcagagcggcataaggacgacagcaggggtcttgtgcttcctgggtacaagtacctcggacccttcaacggactcgacaagggggagccggtcaacgaggcagacgccgcggccctcgagcacgacaaggcctacgaccggcagctcgacagcggagacaacccgtacctcaagtacaaccacgccgacgcggagtttcaggagcgtcttaaagaagatacgtcttttgggggcaacctcggacgagcagtcttccaggcgaaaaagagggttcttgaacctctgggcctggttgaggaacctgttaagacggctccgggaaaaaagaggccggtagagcactctcctgtggagccagactcctcctcgggaaccggaaaggcgggccagcagcctgcaagaaaaagattgaatttcggtcagactggagacgcagactccgtacctgacccccagcctctcggacagccaccagcagccccctctggtctgggaactaatacgatggctgcaggcagtggcgcaccaatggcagacaataacgagggcgccgacggagtgggtaattcctcgggaaattggcattgcgattccacatggatgggcgacagagtcatcaccaccagcacccgcacctgggctctgcccacctacaacaaccatctgtacaagcaaatttccagccaatcaggagcatcgaacgacaaccactactttggctacagcaccccctgggggtattttgacttcaacagattccactgccacttttcgccacgtgactggcaaagactcatcaacaacaactggggattccggcccaagagactcagcttcaagctctttaacattcaagtcaaggaggtcacgcagaatgacggtacgacgacgattgccaataaccttaccagcacggttcaggtctttactgactcggagtaccagctcccgtacgtcctcggctcggcgcatcaaggatgcctcccgccgttcccagcagacgtcttcatggtgccacagtatggatacctcaccctgaacaacgggagtcaggcggtaggacgctcttcattttactgcctggagtacttcccttctcagatgcttcgcacgggaaacaactttaccttcagctacacctttgaggacgtgccttttcacagcagctacgctcacagccaaagtctggaccgtctcatgaatcctctcatcgaccaatacctgtattacttgagcaaaacaaacgctccaagcggaaccaccacgatgtccaggcttcagttttctcaggccggagcgagtgacattcgggaccagtctagaaactggcttcctggaccctgttaccgccagcagcgagtatcaaagacagctgcggacaacaacaacagtgattactcgtggactggagctaccaagtaccacctcaatggaagagactctctggtgaacccgggcccagctatggccagccacaaggatgatgaagaaaaatattttcctcagagcggggttctcatcttcgggaaacaaggctcaaataaaactaatgtggacattgaaaaggttatgattacagacgaagaggaaatcaggaccaccaatcccgtggctacggagcagtatggttctgtatctaccaaccttcaaagcggcaacacacaagcagctacctcagatgtcaacacacaaggcgttcttcctggcatggtctggcaggacagagatgtgtacctgcaggggcccatctgggcaaagattcctcacacggacggacactttcacccttctcccctcatgggcggatttggattgaagcaccctcccccacagattctcatcaagaataccccggtacctgcgaatccttcgaccaccttcagtgcggcaaagtttgcttccttcatcacacagtattccacgggacaggtcagcgtggagatagagtgggagctgcagaaggagaacagcaaacgctggaaccccgagatccagtatacttccaactacaacaaatctgttaatgtggactttactgtggacactaatggtgtgtattcagagcctcgccccattggcaccagatacctgactcgtaatctgtaa

SEQ ID NO: 3532 - DNA, 2208 bp, Artificial Sequence
  Description of Artificial Sequence: Synthetic polynucleotide
atggctgccgatggttatcttccagattggctcgaggacactctctctgaaggaataagacagtggtggaagctcaaacctggcccaccaccgccaaagcccgcagagcggcataaggacgacagcaggggtcttgtgcttcctgggtacaagtacctcggacccttcaacggactcgacaagggggagccggtcaacgaggcagacgccgcggccctcgagcacgacaaggcctacgaccggcagctcgacagcggagacaacccgtacctcaagtacaaccacgccgacgcggagtttcaggagcgtcttaaagaagatacgtcttttgggggcaacctcggacgagcagtcttccaggcgaaaaagagggttcttgaacctctgggcctggttgaggaacctgttaagacggctccgggaaaaaagaggccggtagagcactctcctgtggagccagactcctcctcgggaaccggaaaggcgggccagcagcctgcaagaaaaagattgaatttcggtcagactggagacgcagactccgtacctgacccccagcctctcggacagccaccagcagccccctctggtctgggaactaatacgatggctacaggcagtggcgcaccaatggcagacaataacgagggcgccgacggagtgggtaattcctcgggaaattggcattgcgattccacatggatgggcgacagagtcatcaccaccagcacccgcacctgggctctgcccacctacaacaaccatctgtacaagcaaatttccagccaatcaggagcatcgaacgacaaccactactttggctacagcaccccctgggggtattttgacttcaacagattccactgccacttttcgccacgtgactggcaaagactcatcaacaacaactggggattccggcccaagagactcagcttcaagctctttaacattcaagtcaaggaggtcacgcagaatgacggtacgacgacgattgccaataaccttaccagcacggttcaggtctttactgactcggagtaccagctcccgtacgtcctcggctcggcgcatcaaggatgcctcccgccgttcccagcagacgtcttcatggtgccacagtatggatacctcaccctgaacaacgggagtcaggcggtaggacgctcttcattttactgcctggagtacttcccttctcagatgcttcgcacgggaaacaactttaccttcagctacacctttgaggacgtgccttttcacagcagctacgctcacagccaaagtctggaccgtctcatgaatcctctcatcgaccaatacctgtattacttgagcaaaacaaacgctccaagcggaaccaccacgatgtccaggcttcagttttctcaggccggagcgagtgacattcgggaccagtctagaaactggcttcctggaccctgttaccgccagcagcgagtatcaaagacagctgcggacaacaacaacagtgattactcgtggactggagctaccaagtaccacctcaatggaagagactctctggtgaacccgggcccagctatggccagccacaaggatgatgaagaaaaatattttcctcagagcggggttctcatcttcgggaaacaaggctcaaataaaactaatgtggacattgaaaaggttatgattacagacgaagaggaaatcaggaccaccaatcccgtggctacggagcagtatggttctgtatctaccaaccttcaaagcgacaacacacaagcagctacctcagatgtcaacacacaaggcgttcttcctggcatggtctggcaggacagagatgtgtacctgcaggggcccatctgggcaaagattcctcacacggacggacactttcacccttctcccctcatgggcggatttggattgaagcaccctcccccacagattctcatcaagaataccccggtacctgcgaatccttcgaccaccttcagtgcggcaaagtttgcttccttcatcacacagtattccacgggacaggtcagcgtggagatagagtgggagctgcagaaggagaacagcaaacgctggaaccccgagatccagtatacttccaactacaacaaatctgttaatgtggactttactgtggacactaatggtgtgtattcagagcctcgccccattggcaccagatacctgactcgtaatctgtaa

SEQ ID NO: 3533 - DNA, 2208 bp, Artificial Sequence
  Description of Artificial Sequence: Synthetic polynucleotide
atggctgccgatggttatcttccagattggctcgaggacactctctctgaaggaataagacagtggtggaagctcaaacctggcccaccaccgccaaagcccgcagagcggcataaggacgacagcaggggtcttgtgcttcctgggtacaagtacctcggacccttcaacggactcgacaagggggagccggtcaacgaggcagacgccgcggccctcgagcacgacaaggcctacgaccggcagctcgacagcggagacaacccgtacctcaagtacaaccacgccgacgcggagtttcaggagcgtcttaaagaagatacgtcttttgggggcaacctcggacgagcagtcttccaggcgaaaaagagggttcttgaacctctgggcctggttgaggaacctgttaagacggctccgggaaaaaagaggccggtagagcactctcctgtggagccagactcctcctcgggaaccggaaaggcgggccagcagcctgcaagaaaaagattgaatttcggtcagactggagacgcagactccgtacctgacccccagcctctcggacagccaccagcagccccctctggtctgggaactaatacgatggctacaggcagtggcgcaccaatggcagacaataacgagggcgccgacggagtgggtaattcctcgggaaattggcattgcgattccacatggatgggcgacagagtcatcaccaccagcacccgcacctgggctctgcccacctacaacaaccatctgtacaagcaaatttccagccaatcaggagcatcgaacgacaaccactactttggctacagcaccccctgggggtattttgacttcaacagattccactgccacttttcgccacgtgactggcaaagactcatcaacaacaactggggattccggcccaagagactcagcttcaagctctttaacattcaagtcaaggaggtcacgcagaatgacggtaygacgacgattgccaataaccttaccagcacggttcaggtctttactgactcggagtaccagctcccgtacgtcctcggctcggcgcatcaaggatgcctcccgccgttcccagcagacgtcttcatggtgccacagtatggatacctcaccctgaacaacgggagtcaggcggtaggacgctcttcattttactgcctggagtacttcccttctcagatgcttcgcacgggaaacaactttaccttcagctacacctttgaggacgtgccttttcacagcagctacgctcacagccaaagtctggaccgtctcatgaatcctctcatcgaccaatacctgtattacttgagcaaaacaaacgctccaagcggaaccaccacgatgtccaggcttcagttttctcaggccggagcgagtgacattcgggaccagtctagaaactggcttcctggaccctgttaccgccagcagcgagtatcaaagacagctgcggacaacaacaacagtgattactcgtggactggagctaccaagtaccacctcaatggaagagactctctggtgaacccgggcccagctatggccagccacaaggatgatgaagaaaaatattttcctcagagcggggttctcatcttcgggaaacaaggctcaaataaaactaatgtggacattgaaaaggttatgattacagacgaagaggaaatcaggaccaccaatcccgtggctacggagcagtatggttctgtatctaccaaccttcaaagcggcaacacacaagcagctacctcagatgtcaacacacaaggcgttcttcctggcatggtctggcaggacagagatgtgtacctgcaggggcccatctgggcaaagattcctcacacggacggacactttcacccttctcccctcatgggcggatttggattgaagcaccctcccccacagattctcatcaagaataccccggtacctgcgaatccttcgaccaccttcagtgcggcaaagtttgcttccttcatcacacagtattccacgggacaggtcagcgtggagatagagtgggagctgcagaaggagaacagcaaacgctggaaccccgagatccagtatacttccaactacaacaaatctgttaatgtggactttactgtggacactaatggtgtgtattcagagcctcgccccattggcaccagatacctgactcgtaatctgtaa

SEQ ID NO: 3534 - DNA, 2208 bp, Artificial Sequence
  Description of Artificial Sequence: Synthetic polynucleotide
atggctgccgatggttatcttccagattggctcgaggacactctctctgaaggaataagacagtggtggaagctcaaacctggcccaccaccgccaaagcccgcagagcggcataaggacgacagcaggggtcttgtgcttcctgggtacaagtacctcggacccttcaacggactcgacaagggggagccggtcaacgaggcagacgccgcggccctcgagcacgacaaggcctacgaccggcagctcgacagcggagacaacccgtacctcaagtacaaccacgccgacgcggagtttcaggagcgtcttaaagaagatacgtcttttgggggcaacctcggacgagcagtcttccaggcgaaaaagagggttcttgaacctctgggcctggttgaggaacctgttaagacggctccgggaaaaaagaggccggtagagcactctcctgtggagccagactcctcctcgggaaccggaaaggcgggccagcagcctgcaagaaaaagattgaatttcggtcagactggagacgcagactccgtacctgacccccagcctctcggacagccaccagcagccccctctggtctgggaactaatacgatggctacaggcagtggcgcaccaatggcagacaataacgagggcgccgacggagtgggtaattcctcgggaaattggcattgcgattccacatggatgggcgacagagtcatcaccaccagcacccgcacctgggctctgcccacctacaacaaccatctgtacaagcaaatttccagccaatcaggagcatcgaacgacaaccactactttggctacagcaccccctgggggtattttgacttcaacagattccactgccacttttcgccacgtgactggcaaagactcatcaacaacaactggggattccggcccaagagactcagcttcaagctctttaacattcaagtcaaggaggtcacgcagaatgacggtacgacgacgattgccaataaccttaccagcacggttcaggtctttactgactcggagtaccagctcccgtacgtcctcggctcggcgcatcaaggatgcctcccgccgttcccagcagacgtcttcatggtgccacagtatggatacctcaccctgaacaacgggagtcaggcggtaggacgctcttcattttactgcctggagtacttcccttctcagatgcttcgcacgggaaacaactttaccttcagctacacctttgaggacgtgccttttcacagcagctacgctcacagccaaagtctggaccgtctcatgaatcctctcatcgaccaatacctgtattacttgagcaaaacaaacgctccaagcggaaccaccacgatgtccaggcttcagttttctcaggccggagcgagtgacattcgggaccagtctagaaactggcttcctggaccctgttaccgccagcagcgagtatcaaagacagctgcggacaacaacaacagtgattactcgtggactggagctaccaagtaccacctcaatggaagagactctctggtgaacccgggcccagctatggccagccacaaggatgatgaagaaaaatattttcctcagagcggggttctcatcttcgggaaacaaggctcaaataaaactaatgtggacattgaaaaggttatgattacagacgaagaggaaatcaggaccaccaatcccgtggctacggagcagtatggttctgtatctaccaaccttcaaagcggcaacacacaagcagctacctcagatgtcaacacacaaggcgttcttcctggcatggtctggcaggacagagatgtgtacctgcaggggcccatctgggcaaagattcctcacacggacggacactttcacccttctcccctcatgggcggatttggattgaagcaccctcccccacagattctcatcaagaataccccggtacctgcgaatccttcgaccaccttcagtgcggcaaagtttgcttccttcatcacacagtattccacgggacaggtcagcgtggagatagagtgggagctgcagaaggagaacagcaaacgctggaaccccgagatccagtatacttccaactacaacaaatctgttaatgtggactttactgtggacactaatggtgtgtattcagagcctcgccccattgacaccagatacctgactcgtaatctgtaa

SEQ ID NO: 3535 - DNA, 2208 bp, Artificial Sequence
  Description of Artificial Sequence: Synthetic polynucleotide
atggctgccgatggttatcttccagattggctcgaggacactctctctgaaggaataagacagtggtggaagctcaaacctggcccaccaccgccaaagcccgcagagcggcataaggacgacagcaggggtcttgtgcttcctgggtacaagtacctcggacccttcaacggactcgacaagggggagccggtcaacgaggcagacgccgcggccctcgagcacgacaaggcctacgaccggcagctcgacagcggagacaacccgtacctcaagtacaaccacgccgacgcggagtttcaggagcgtcttaaagaagatacgtcttttgggggcaacctcggacgagcagtcttccaggcgaaaaagagggttcttgaacctctgggcctggttgaggaacctgttaagacggctccgggaaaaaagaggccggtagagcactctcctgtggagccagactcctcctcgggaaccggaaaggcgggccagcagcctgcaagaaaaagattgaatttcggtcagactggagacacagactccgtacctgacccccagcctctcggacagccaccagcagccccctctggtctgggaactaatacgatggctacaggcagtggcgcaccaatggcagacaataacgagggcgccgacggagtgggtaattcctcgggaaattggcattgcgattccacatggatgggcgacagagtcatcaccaccagcacccgcacctgggctctgcccacctacaacaaccatctgtacaagcaaatttccagccaatcaggagcatcgaacgacaaccactactttggctacagcaccccctgggggtattttgacttcaacagattccactgccacttttcgccacgtgactggcaaagactcatcaacaacaactggggattccggcccaagagactcagcttcaagctctttaacattcaagtcaaggaggtcacgcagaatgacggtacgacgacgattgccaataaccttaccagcacggttcaggtctttactgactcggagtaccagctcccgtacgtcctcggctcggcgcatcaaggatgcctcccgccgttcccagcagacgtcttcatggtgccacagtatggatacctcaccctgaacaacgggagtcaggcggtaggacgctcttcattttactgcctggagtacttcccttctcagatgcttcgcacgggaaacaactttaccttcagctacacctttgaggacgtgccttttcacagcagctacgctcacagccaaagtctggaccgtctcatgaatcctctcatcgaccaatacctgtattacttgagcaaaacaaacgctccaagcggaaccaccacgatgtccaggcttcagttttctcaggccggagcgagtgacattcgggaccagtctagaaactggcttcctggaccctgttaccgccagcagcgagtatcaaagacagctgcggacaacaacaacagtgattactcgtggactggagctaccaagtaccacctcaatggaagagactctctggtgaacccgggcccagctatggccagccacaaggatgatgaagaaaaatattttcctcagagcggggttctcatcttcgggaaacaaggctcaaataaaactaatgtggacattgaaaaggttatgattacagacgaagaggaaatcaggaccaccaatcccgtggctacggagcagtatggttctgtatctaccaaccttcaaagcggcaacacacaagcagctacctcagatgtcaacacacaaggcgttcttcctggcatggtctggcaggacagagatgtgtacctgcaggggcccatctgggcaaagattcctcacacggacggacactttcacccttctcccctcatgggcggatttggattgaagcaccctcccccacagattctcatcaagaataccccggtacctgcgaatccttcgaccaccttcagtgcggcaaagtttgcttccttcatcacacagtattccacgggacaggtcagcgtggagatagagtgggagctgcagaaggagaacagcaaacgctggaaccccgagatccagtatacttccaactacaacaaatctgttaatgtggactttactgtggacactaatggtgtgtattcagagcctcgccccattggcaccagatacctgactcgtaatctgtaa

SEQ ID NO: 3536 - DNA, 2208 bp, Artificial Sequence
  Description of Artificial Sequence: Synthetic polynucleotide
atggctgccgatggttatcttccagattggctcgaggacactctctctgaaggaataagacagtggtggaagctcaaacctggcccaccaccgccaaagcccgcagagcggcataaggacgacagcaggggtcttgtgcttcctgggtacaagtacctcggacccttcaacggactcgacaagggggagccggtcaacgaggcagacgccgcggccctcgagcacgacaaggcctacgaccggcagctcgacagcggagacaacccgtacctcaagtacaaccacgccgacgcggagtttcaggagcgtcttaaagaagatacgtcttttgggggcaacctcggacgagcagtcttccaggcgaaaaagagggttcttgaacctctgggcctggttgaggaacctgttaagacgactccgggaaaaaagaggccggtagagcactctcctgtggagccagactcctcctcgggaaccggaaaggcgggccagcagcctgcaagaaaaagattgaatttcggtcagactggagacgcagactccgtacctgacccccagcctctcggacagccaccagcagccccctctggtctgggaactaatacgatggctacaggcagtggcgcaccaatggcagacaataacgagggcgccgacggagtgggtaattcctcgggaaattggcattgcgattccacatggatgggcgacagagtcatcaccaccagcacccgcacctgggctctgcccacctacaacaaccatctgtacaagcaaatttccagccaatcaggagcatcgaacgacaaccactactttggctacagcaccccctgggggtattttgacttcaacagattccactgccacttttcgccacgtgactggcaaagactcatcaacaacaactggggattccggcccaagagactcagcttcaagctctttaacattcaagtcaaggaggtcacgcagaatgacggtacgacgacgattgccaataaccttaccagcacggttcaggtctttactgactcggagtaccagctcccgtacgtcctcggctcggcgcatcaaggatgcctcccgccgttcccagcagacgtcttcatggtgccacagtatggatacctcaccctgaacaacgggagtcaggcggtaggacgctcttcattttactgcctggagtacttcccttctcagatgcttcgcacgggaaacaactttaccttcagctacacctttgaggacgtgccttttcacagcagctacgctcacagccaaagtctggaccgtctcatgaatcctctcatcgaccaatacctgtattacttgagcaaaacaaacgctccaagcggaaccaccacgatgtccaggcttcagttttctcaggccggagcgagtgacattcgggaccagtctagaaactggcttcctggaccctgttaccgccagcagcgagtatcaaagacagctgcggacaacaacaacagtgattactcgtggactggagctaccaagtaccacctcaatggaagagactctctggtgaacccgggcccagctatggccagccacaaggatgatgaagaaaaatattttcctcagagcggggttctcatcttcgggaaacaaggctcaaataaaactaatgtggacattgaaaaggttatgattacagacgaagaggaaatcaggaccaccaatcccgtggctacggagcagtatggttctgtatctaccaaccttcaaagcggcaacacacaagcagctacctcagatgtcaacacacaaggcgttcttcctggcatggtctggcaggacagagatgtgtacctgcaggggcccatctgggcaaagattcctcacacggacggacactttcacccttctcccctcatgggcggatttggattgaagcaccctcccccacagattctcatcaagaataccccggtacctgcgaatccttcgaccaccttcagtgcggcaaagtttgcttccttcatcacacagtattccacgggacaggtcagcgtggagatagagtgggagctgcagaaggagaacagcaaacgctggaaccccgagatccagtatacttccaactacaacaaatctgttaatgtggactttactgtggacactaatggtgtgtattcagagcctcgccccattggcaccagatacctgactcgtaatctgtaa

SEQ ID NO: 3537 - DNA, 2208 bp, Artificial Sequence
  Description of Artificial Sequence: Synthetic polynucleotide
atggctgccgatggttatcttccagattggctcgaggacactctctctgaaggaataagacagtggtggaagctcaaacctggcccaccaccgccaaagcccgcagagcggcataaggacgacagcaggggtcttgtgcttcctgggtacaagtacctcggacccttcaacggactcgacaagggggagccggtcaacgaggcagacgccgcggccctcgagcacgacaaggcctacgaccggcagctcgacagcggagacaacccgtacctcaagtacaaccacgccgacgcggagtttcaggagcgtcttaaagaagatacgtcttttgggggcaacctcggacgagcagtcttccaggcgaaaaagagggttcttgaacctctgggcctggttgaggaacctgttaagacggctccgggaaaaaagaggccggtagagcactctcctgtggagccagactcctcctcgggaaccggaaaggcgggccagcagcctgcaagaaaaagattgaatttcggtcagactggagacgcagactccgtacctgacccccagcctctcggacagtcaccagcagccccctctggtctgggaactaatacgatggctacaggcagtggcgcaccaatggcagacaataacgagggcgccgacggagtgggtaattcctcgggaaattggcattgcgattccacatggatgggcgacagagtcatcaccaccagcacccgcacctgggctctgcccacctacaacaaccatctgtacaagcaaatttccagccaatcaggagcatcgaacgacaaccactactttggctacagcaccccctgggggtattttgacttcaacagattccactgccacttttcgccacgtgactggcaaagactcatcaacaacaactggggattccggcccaagagactcagcttcaagctctttaacattcaagtcaaggaggtcacgcagaatgacggtacgacgacgattgccaataaccttaccagcacggttcaggtctttactgactcggagtaccagctcccgtacgtcctcggctcggcgcatcaaggatgcctcccgccgttcccagcagacgtcttcatggtgccacagtatggatacctcaccctgaacaacgggagtcaggcggtaggacgctcttcattttactgcctggagtacttcccttctcagatgcttcgcacgggaaacaactttaccttcagctacacctttgaggacgtgccttttcacagcagctacgctcacagccaaagtctggaccgtctcatgaatcctctcatcgaccaatacctgtattacttgagcaaaacaaacgctccaagcggaaccaccacgatgtccaggcttcagttttctcaggccggagcgagtgacattcgggaccagtctagaaactggcttcctggaccctgttaccgccagcagcgagtatcaaagacagctgcggacaacaacaacagtgattactcgtggactggagctaccaagtaccacctcaatggaagagactctctggtgaacccgggcccagctatggccagccacaaggatgatgaagaaaaatattttcctcagagcggggttctcatcttcgggaaacaaggctcaaataaaactaatgtggacattgaaaaggttatgattacagacgaagaggaaatcaggaccaccaatcccgtggctacggagcagtatggttctgtatctaccaaccttcaaagcggcaacacacaagcagctacctcagatgtcaacacacaaggcgttcttcctggcatggtctggcaggacagagatgtgtacctgcaggggcccatctgggcaaagattcctcacacggacggacactttcacccttctcccctcatgggcggatttggattgaagcaccctcccccacagattctcatcaagaataccccggtacctgcgaatccttcgaccaccttcagtgcggcaaagtttgcttccttcatcacacagtattccacgggacaggtcagcgtggagatagagtgggagctgcagaaggagaacagcaaacgctggaaccccgagatccagtatacttccaactacaacaaatctgttaatgtggactttactgtggacactaatggtgtgtattcagagcctcgccccattggcaccagatacctgactcgtaatctgtaa

SEQ ID NO: 3538 - DNA, 2208 bp, Artificial Sequence
  Description of Artificial Sequence: Synthetic polynucleotide
atggctgccgatggttatcttccagattggctcgaggacactctctctgaaggaataagacagtggtggaagctcaaacctggcccaccaccgccaaagcccgcagagcggcataaggacgacagcaggggtcttgtgcttcctgggtacaagtacctcggacccttcaacggactcgacaagggggagccggtcaacgaggcagacgccgcggccctcgagcacgacaaggcctacgaccggcagctcgacagcggagacaacccgtacctcaagtacaaccacgccgacgcggagtttcaggagcgtcttaaagaagatacgtcttttgggggcaacctcggacgagcagtcttccaggcgaaaaagagggttcttgaacctctgggcctggttgaggaacctgttaagacggctccgggaaaaaagaggccggtagagcactctcctgtggagccagactcctcctcgggaaccggaaaggcgggccagcagcctgcaagaaaaagattgaatttcggtcagactggagacgcagactccgtacctgacccccagcctctcggacagccaccagcagccccctctggtctgggaactaatacgatggctacaggcagtggcgcaccaatggcagacaataacgagggcgccgacggagtgggtaattcctcgggaaattggcattgcgattccacatggatgggcgacagagtcatcaccaccagcacccgcacctgggctctgcccacctacaacaaccatctgtacaagcaaatttccagccaatcaggagcatcgaacgacaaccactactttggctacagcaccccctgggggtattttgacttcaacagattccactgccacttttcgccacgtgactggcaaagactcatcaacaacaactggggattccggcccaagagactcagcttcaagctctttaacattcaagtcaaggaggtcacgcagaatgacggtacgacgacgattgccaataaccttaccagcacggttcaggtctttactgactcggagtaccagctcccgtacgtcctcggctcggcgcatcaaggatgcctcccgccgttcccagcagacgtcttcatggtgccacagtatggatacctcaccctgaacaacgggagtcaggcggtaggacgctcttcattttactgcctggagtacttcccttctcagatgcttcgcacgggaaacaactttaccttcagctacacctttgaggacgtgccttttcacagcagctacgctcacagccaaagtctggaccgtctcatgaatcctctcatcgaccaatacctgtattacttgagcaaaacaaacgctccaagcggaaccaccacgatgtccaggcttcagttttctcaggccggagcgagtgacattcgggaccagtctagaaactggcttcctggaccctgttaccgccagcagcgagtatcaaagacagctgcggacaacaacaacagtgattactcgtggactggagctaccaagtaccacctcaatggaagagactctctggtgaacccgggcccagctatggtcagccacaaggatgatgaagaaaaatattttcctcagagcggggttctcatcttcgggaaacaaggctcaaataaaactaatgtggacattgaaaaggttatgattacagacgaagaggaaatcaggaccaccaatcccgtggctacggagcagtatggttctgtatctaccaaccttcaaagcggcaacacacaagcagctacctcagatgtcaacacacaaggcgttcttcctggcatggtctggcaggacagagatgtgtacctgcaggggcccatctgggcaaagattcctcacacggacggacactttcacccttctcccctcatgggcggatttggattgaagcaccctcccccacagattctcatcaagaataccccggtacctgcgaatccttcgaccaccttcagtgcggcaaagtttgcttccttcatcacacagtattccacgggacaggtcagcgtggagatagagtgggagctgcagaaggagaacagcaaacgctggaaccccgagatccagtatacttccaactacaacaaatctgttaatgtggactttactgtggacactaatggtgtgtattcagagcctcgccccattggcaccagatacctgactcgtaatctgtaa

SEQ ID NO: 3539 - DNA, 2208 bp, Artificial Sequence
  Description of Artificial Sequence: Synthetic polynucleotide
atggctgccgatggttatcttccagattggctcgaggacactctctctgaaggaataagacagtggtggaagctcaaacctggcccaccaccgccaaagcccgcagagcggcataaggacgacagcaggggtcttgtgcttcctgggtacaagtacctcggacccttcaacggactcgacaagggggagccggtcaacgaggcagacgccgcggccctcgagcacgacaaggcctacgaccggcagctcgacagcggagacaacccgtacctcaagtacaaccacgccgacgcggagtttcaggagcgtcttaaagaagatacgtcttttgggggcaacctcggacgagcagtcttccaggcgaaaaagagggttcttgaacctctgggcctggttgaggaacctgttaagacggctccgggaaaaaagaggccggtagagcactctcctgtggagccagactcctcctcgggaaccggaaaggcgggccagcagcctgcaagaaaaagattgaatttcggtcagactggagacgcagactccgtacctgacccccagcctctcggacagccaccagcagccccctctggtctgggaactaatacgatggctacaggcagtggcgcaccaatggcagacaataacgagggcgccgacggagtgggtaattcctcgggaaattggcattgcgattccacatggatgggcgacagagtcatcaccaccagcacccgcacctgggctctgcccacctacaacaaccatctgtacaagcaaatttccagccaatcaggagcatcgaacgacaaccactactttggctacagcaccccctgggggtattttgacttcaacagattccactgccacttttcgccacgtgactggcaaagactcatcaacaacaactggggattccggcccaagagactcagcttcaagctctttaacattcaagtcaaggaggtcacgcagaatgacggtacgacgacgattgccaataaccttaccagcacggttcaggtctttactgactcggagtaccagctcccgtacgtcctcggctcggcgcatcaaggatgcctcccgccgttcccagcagacgtcttcatggtgccacagtatggatacctcaccctgaacaacgggagtcaggcggtaggacgctcttcattttactgcctggagtacttcccttctcagatgcttcgcacgggaaacaactttaccttcagctacacctttgaggacgtgccttttcacagcagctacgctcacagccaaagtctggaccgtctcatgaatcctctcatcgaccaatacctgtattacttgagcaaaacaaacgctccaagcggaaccaccacgatgtccaggcttcagttttctcaggccggagcgagtgacattcgggaccagtctagaaactggcttcctggaccctgttaccgccagcagcgagtatcaaagacagctgcggacaacaacaacagtgattactcgtggactggagctaccaagtaccacctcaatggaagagactctctggtgaacccgggcccagctatggccagccacaaggatgatgaagaaaaatattttcctcagagcggggttctcatcttcgggaaacaaggctcaaataaaactaatgtggacattgaaaaggttatgattacagacgaagaggaaatcaggaccaccaatcccgtggctacggagcagtatggttctgtatctaccaaccttcaaagcggcaacacacaagcagctacctcagatgtcaacacacaaggcgttcttcctggcatggtctggcaggacagagatgtgtacctgcaggggcccatctgggcaaagattcctcacacggacggacactttcacccttctcccctcatgggcggatttggattgaagcaccctcccccacagattctcatcaagaataccccggtacctgcgaatccttcgaccaccttcagtgcggcaaagtttgcttccttcatcacacagtattccatgggacaggtcagcgtggagatagagtgggagctgcagaaggagaacagcaaacgctggaaccccgagatccagtatacttccaactacaacaaatctgttaatgtggactttactgtggacactaatggtgtgtattcagagcctcgccccattggcaccagatacctgactcgtaatctgtaa

SEQ ID NO: 3540 - DNA, 2208 bp, Artificial Sequence
  Description of Artificial Sequence: Synthetic polynucleotide
atggctgccgatggttatcttccagattggctcgaggacactctctctgaaggaataagacagtggtggaagctcaaacctggcccaccaccgccaaagcccgcagagcggcataaggacgacagcaggggtcttgtgcttcctgggtacaagtacctcggacccttcaacggactcgacaagggggagccggtcaacgaggcagacgccgcggccctcgagcacgacaaggtctacgaccggcagctcgacagcggagacaacccgtacctcaagtacaaccacgccgacgcggagtttcaggagcgtcttaaagaagatacgtcttttgggggcaacctcggacgagcagtcttccaggcgaaaaagagggttcttgaacctctgggcctggttgaggaacctgttaagacggctccgggaaaaaagaggccggtagagcactctcctgtggagccagactcctcctcgggaaccggaaaggcgggccagcagcctgcaagaaaaagattgaatttcggtcagactggagacgcagactccgtacctgacccccagcctctcggacagccaccagcagccccctctggtctgggaactaatacgatggctacaggcagtggcgcaccaatggcagacaataacgagggcgccgacggagtgggtaattcctcgggaaattggcattgcgattccacatggatgggcgacagagtcatcaccaccagcacccgcacctgggctctgcccacctacaacaaccatctgtacaagcaaatttccagccaatcaggagcatcgaacgacaaccactactttggctacagcaccccctgggggtattttgacttcaacagattccactgccacttttcgccacgtgactggcaaagactcatcaacaacaactggggattccggcccaagagactcagcttcaagctctttaacattcaagtcaaggaggtcacgcagaatgacggtacgacgacgattgccaataaccttaccagcacggttcaggtctttactgactcggagtaccagctcccgtacgtcctcggctcggcgcatcaaggatgcctcccgccgttcccagcagacgtcttcatggtgccacagtatggatacctcaccctgaacaacgggagtcaggcggtaggacgctcttcattttactgcctggagtacttcccttctcagatgcttcgcacgggaaacaactttaccttcagctacacctttgaggacgtgccttttcacagcagctacgctcacagccaaagtctggaccgtctcatgaatcctctcatcgaccaatacctgtattacttgagcaaaacaaacgctccaagcggaaccaccacgatgtccaggcttcagttttctcaggccggagcgagtgacattcgggaccagtctagaaactggcttcctggaccctgttaccgccagcagcgagtatcaaagacagctgcggacaacaacaacagtgattactcgtggactggagctaccaagtaccacctcaatggaagagactctctggtgaacccgggcccagctatggccagccacaaggatgatgaagaaaaatattttcctcagagcggggttctcatcttcgggaaacaaggctcaaataaaactaatgtggacattgaaaaggttatgattacagacgaagaggaaatcaggaccaccaatcccgtggctacggagcagtatggttctgtatctaccaaccttcaaagcggcaacacacaagcagctacctcagatgtcaacacacaaggcgttcttcctggcatggtctggcaggacagagatgtgtacctgcaggggcccatctgggcaaagattcctcacacggacggacactttcacccttctcccctcatgggcggatttggattgaagcaccctcccccacagattctcatcaagaataccccggtacctgcgaatccttcgaccaccttcagtgcggcaaagtttgcttccttcatcacacagtattccacgggacaggtcagcgtggagatagagtgggagctgcagaaggagaacagcaaacgctggaaccccgagatccagtatacttccaactacaacaaatctgttaatgtggactttactgtggacactaatggtgtgtattcagagcctcgccccattggcaccagatacctgactcgtaatctgtaa

SEQ ID NO: 3541 - DNA, 2208 bp, Artificial Sequence
  Description of Artificial Sequence: Synthetic polynucleotide
atggctgccgatggttatcttccagattggctcgaggacactctctctgaaggaataagacagtggtggaagctcaaacctggcccaccaccgccaaagcccgcagagcggcataaggacgacagcaggggtcttgtgcttcctgggtacaagtacctcggacccttcaacggactcgacaagggggagccggtcaacgaggcagacgccgcggccctcgagcacgacaaggcctacgaccggcagctcgacagcggagacaacccgtacctcaagtacaaccacgccgacgcggagtttcaggagcgtcttaaagaagatacgtcttttgggggcaacctcggacgagcagtcttccaggcgaaaaagagggttcttgaacctctgggcctggttgaggaacctgttaagacggctccgggaaaaaagaggccggtagagcactctcctgtggagccagactcctcctcgggaaccggaaaggcgggccagcagcctgcaagaaaaagattgaatttcggtcagactggagacgcagactccgtacctgacccccagcctctcggacagccaccagcagccccctctggtctgggaactaatacgatggctacaggcagtggcgcaccaatggcagacaataacgagggcgccgacggagtgggtaattcctcgggaaattggcattgcgattccacatggatgggcgacagagtcatcaccaccagcacccgcacctgggctctgcccacctacaacaaccatctgtacaagcaaatttccagccaatcaggagcatcgaacgacaaccactactttggctacagcaccccctgggggtattttgacttcaacagattccactgccacttttcgccacgtgactggcaaagactcatcaacaacaactggggattccggcccaagagactcagcttcaagctctttaacattcaagtcaaggaggtcacgcagaatgacggtacgacgacgattgccaataaccttaccagcacggttcaggtctttactgactcggagtaccagctcccgtacgtcctcggctcggcgcatcaaggatgcctcccgccgttcccagcagacgtcttcatggtgccacagtatggatacctcaccctgaacaacgggagtcaggcggtaggacgctcttcattttactgcctggagtacttcccttctcagatgcttcgcacgggaaacaactttaccttcagctacacctttgaggacgtgccttttcacagcagctacgctcacagccaaagtctggaccgtctcatgaatcctctcatcgaccaatacctgtattacttgagcaaaacaaacgctccaagcggaaccaccacgatgtccaggcttcagttttctcaggccggagcgagtgacattcgggaccagtctagaaactggcttcctggaccctgttaccgccagcagcgagtatcaaagacagctgcggacaacaacaacagtgattactcgtggactggagctaccaagtaccacctcaatggaagagactctctggtgaacccgggcccagctatggccagccacaaggatgatgaagaaaaatattttcctcagagcggggttctcatcttcgggaaacaaggctcaaataaaactaatgtggacattgaaaaggttatgattacagacgaagaggaaatcaggaccaccaatcccgtggctacggagcagtatggttctgtatctaccaaccttcaaagcggcaacacacaagcagctacctcagatgtcaacacacaaggcgttcttcctggcatggtctggcaggacagagatgtgtacctgcaggggcccatctgggcaaagattcctcacacggacggacactttcacccttctcccctcatgggcggatttggattgaagcaccctcccccacagattctcatcaagaataccccggtacctgcgaatccttcgaccaccttcagtgcggcaaagtttgcttccttcatcacacagtattccacgggacaggtcagcgtggagatagagtgggagctgcagaaggagaacaacaaacgctggaaccccgagatccagtatacttccaactacaacaaatctgttaatgtggactttactgtggacactaatggtgtgtattcagagcctcgccccattggcaccagatacctgactcgtaatctgtaa

SEQ ID NO: 3542 - DNA, 2208 bp, Artificial Sequence
  Description of Artificial Sequence: Synthetic polynucleotide
atggctgccgatggttatcttccagattggctcgaggacactctctctgaaggaataagacagtggtggaagctcaaacctggcccaccaccgccaaagcccgcagagcggcataaggacgacagcaggggtcttgtgcttcctgggtacaagtacctcggacccttcaacggactcgacaagggggagccggtcaacgaggcagacgccgcggccctcgagcacgacaaggcctacgaccggcagctcgacagcggagacaacccgtacctcaagtacaaccacgccgacgcggagtttcaggagcgtcttaaagaagatacgtcttttgggggcaacctcggacgagcagtcttccaggcgaaaaagagggttcttgaacctctgggcctggttgaggaacctgttaagacggctccgggaaaaaagaggccggtagagcactctcctgtggagccagactcctcctcgggaaccggaaaggcgggccagcagcctacaagaaaaagattgaatttcggtcagactggagacgcagactccgtacctgacccccagcctctcggacagccaccagcagccccctctggtctgggaactaatacgatggctacaggcagtggcgcaccaatggcagacaataacgagggcgccgacggagtgggtaattcctcgggaaattggcattgcgattccacatggatgggcgacagagtcatcaccaccagcacccgcacctgggctctgcccacctacaacaaccatctgtacaagcaaatttccagccaatcaggagcatcgaacgacaaccactactttggctacagcaccccctgggggtattttgacttcaacagattccactgccacttttcgccacgtgactggcaaagactcatcaacaacaactggggattccggcccaagagactcagcttcaagctctttaacattcaagtcaaggaggtcacgcagaatgacggtacgacgacgattgccaataaccttaccagcacggttcaggtctttactgactcggagtaccagctcccgtacgtcctcggctcggcgcatcaaggatgcctcccgccgttcccagcagacgtcttcatggtgccacagtatggatacctcaccctgaacaacgggagtcaggcggtaggacgctcttcattttactgcctggagtacttcccttctcagatgcttcgcacgggaaacaactttaccttcagctacacctttgaggacgtgccttttcacagcagctacgctcacagccaaagtctggaccgtctcatgaatcctctcatcgaccaatacctgtattacttgagcaaaacaaacgctccaagcggaaccaccacgatgtccaggcttcagttttctcaggccggagcgagtgacattcgggaccagtctagaaactggcttcctggaccctgttaccgccagcagcgagtatcaaagacagctgcggacaacaacaacagtgattactcgtggactggagctaccaagtaccacctcaatggaagagactctctggtgaacccgggcccagctatggccagccacaaggatgatgaagaaaaatattttcctcagagcggggttctcatcttcgggaaacaaggctcaaataaaactaatgtggacattgaaaaggttatgattacagacgaagaggaaatcaggaccaccaatcccgtggctacggagcagtatggttctgtatctaccaaccttcaaagcggcaacacacaagcagctacctcagatgtcaacacacaaggcgttcttcctggcatggtctggcaggacagagatgtgtacctgcaggggcccatctgggcaaagattcctcacacggacggacactttcacccttctcccctcatgggcggatttggattgaagcaccctcccccacagattctcatcaagaataccccggtacctgcgaatccttcgaccaccttcagtgcggcaaagtttgcttccttcatcacacagtattccacgggacaggtcagcgtggagatagagtgggagctgcagaaggagaacagcaaacgctggaaccccgagatccagtatacttccaactacaacaaatctgttaatgtggactttactgtggacactaatggtgtgtattcagagcctcgccccattggcaccagatacctgactcgtaatctgtaa

SEQ ID NO: 3543 - DNA, 2208 bp, Artificial Sequence
  Description of Artificial Sequence: Synthetic polynucleotide
atggctgccgatggttatcttccagattggctcgaggacactctctctgaaggaataagacagtggtggaagctcaaacctggcccaccaccgccaaagcccgcagagcggcataaggacgacagcaggggtcttgtgcttcctgggtacaagtacctcggacccttcaacggactcgacaagggggagccggtcaacgaggcagacgccgcggccctcgagcacgacaaggcctacgaccggcagctcgacagcggagacaacccgtacctcaagtacaaccacgccgacgcggagtttcaggagcgtcttaaagaagatacgtcttttgggggcaacctcggacgagcagtcttccaggcgaaaaagagggttcttgaacctctgggcctggttgaggaacctgttaagacggctccgggaaaaaagaggccggtagagcactctcctgtggagccagactcctcctcgggaaccggaaaggcgggccagcagcctgcaagaaaaagattgaatttcggtcagactggagacgcagactccgtacctgacccccagcctctcggacagccaccagcagccccctctggtctgggaactaatacgatggctacaggcagtggcgcaccaatggcagacaataacgagggcgccgacggagtgggtaattcctcgggaaattggcattgcgattccacatggatgggcgacagagtcatcaccaccagcacccgcacctgggctctgcccacctacaacaaccatctgtacaagcaaatttccagccaatcaggagcatcgaacgacaaccactactttggctacagcaccccctgggggtattttgacttcaacagattccactgccacttttcgccacgtgactggcaaagactcatcaacaacaactggggattccggcccaagagactcagcttcaagctctttaacattcaagtcaaggaggtcacgcagaatgacggtacgacgacgattgccaataaccttaccagcacggttcaggtctttactgactcggagtaccagctcccgtacgtcctcggctcggcgcatcaaggatgcctcccgccgttcccagcagacgtcttcatggtgccacagtatggatacctcaccctgaacaacgggagtcaggcggtaggacgctcttcattttactgcctggagtacttcccttctcagatgcttcgcacgggaaacaactttaccttcagctacacctttgaggacgtgccttttcacagcagctacgctcacagccaaagtctggaccgtctcatgaatcctctcatcgaccaatacctgtattacttgagcaaaacaaacgctccaagcggaaccaccacgatgtccaggcttcagttttctcaggccggagcgagtgacattcgggaccagtctagaaactggcttcctggaccctgttaccgccagcagcgagtatcaaagacagctgcggacaacaacaacagtgattactcgtggactggagctaccaagtaccacctcaatggaagagactctctggtgaacccgggcccagctatggccagccacaaggatgatgaagaaaaatattttcctcagagcggggttctcatcttcgggaaacaaggctcaaataaaactaatgtggacattgaaagggttatgattacagacgaagaggaaatcaggaccaccaatcccgtggctacggagcagtatggttctgtatctaccaaccttcaaagcggcaacacacaagcagctacctcagatgtcaacacacaaggcgttcttcctggcatggtctggcaggacagagatgtgtacctgcaggggcccatctgggcaaagattcctcacacggacggacactttcacccttctcccctcatgggcggatttggattgaagcaccctcccccacagattctcatcaagaataccccggtacctgcgaatccttcgaccaccttcagtgcggcaaagtttgcttccttcatcacacagtattccacgggacaggtcagcgtggagatagagtgggagctgcagaaggagaacagcaaacgctggaaccccgagatccagtatacttccaactacaacaaatctgttaatgtggactttactgtggacactaatggtgtgtattcagagcctcgccccattggcaccagatacctgactcgtaatctgtaa

SEQ ID NO: 3544 - DNA, 2208 bp, Artificial Sequence
  Description of Artificial Sequence: Synthetic polynucleotide
atggctgccgatggttatcttccagattggctcgaggacactctctctgaaggaataagacagtggtggaagctcaaacctggcccaccaccgccaaagcccgcagagcggcataaggacgacagcaggggtcttgtgcttcctgggtacaagtacctcggacccttcaacggactcgacaagggggagccggtcaacgaggcagacgccgcggccctcgagcacgacaaggcctacgaccggcagctcgacagcggagacaacccgtacctcaagtacaaccacgccgacgcggagtttcaggagcgtcttaaagaagatacgtcttttgggggcaacctcggacgagcagtcttccaggcgaaaaagagggttcttgaacctctgggcctggttgaggaacctgttaagacggctccgggaaaaaagaggccggtagagcactctcctgtggagccagactcctcctcgggaaccggaaaggcgggccagcagcctgtaagaaaaagattgaatttcggtcagactggagacgcagactccgtacctgacccccagcctctcggacagccaccagcagccccctctggtctgggaactaatacgatggctacaggcagtggcgcaccaatggcagacaataacgagggcgccgacggagtgggtaattcctcgggaaattggcattgcgattccacatggatgggcgacagagtcatcaccaccagcacccgcacctgggctctgcccacctacaacaaccatctgtacaagcaaatttccagccaatcaggagcatcgaacgacaaccactactttggctacagcaccccctgggggtattttgacttcaacagattccactgccacttttcgccacgtgactggcaaagactcatcaacaacaactggggattccggcccaagagactcagcttcaagctctttaacattcaagtcaaggaggtcacgcagaatgacggtacgacgacgattgccaataaccttaccagcacggttcaggtctttactgactcggagtaccagctcccgtacgtcctcggctcggcgcatcaaggatgcctcccgccgttcccagcagacgtcttcatggtgccacagtatggatacctcaccctgaacaacgggagtcaggcggtaggacgctcttcattttactgcctggagtacttcccttctcagatgcttcgcacgggaaacaactttaccttcagctacacctttgaggacgtgccttttcacagcagctacgctcacagccaaagtctggaccgtctcatgaatcctctcatcgaccaatacctgtattacttgagcaaaacaaacgctccaagcggaaccaccacgatgtccaggcttcagttttctcaggccggagcgagtgacattcgggaccagtctagaaactggcttcctggaccctgttaccgccagcagcgagtatcaaagacagctgcggacaacaacaacagtgattactcgtggactggagctaccaagtaccacctcaatggaagagactctctggtgaacccgggcccagctatggccagccacaaggatgatgaagaaaaatattttcctcagagcggggttctcatcttcgggaaacaaggctcaaataaaactaatgtggacattgaaaaggttatgattacagacgaagaggaaatcaggaccaccaatcccgtggctacggagcagtatggttctgtatctaccaaccttcaaagcggcaacacacaagcagctacctcagatgtcaacacacaaggcgttcttcctggcatggtctggcaggacagagatgtgtacctgcaggggcccatctgggcaaagattcctcacacggacggacactttcacccttctcccctcatgggcggatttggattgaagcaccctcccccacagattctcatcaagaataccccggtacctgcgaatccttcgaccaccttcagtgcggcaaagtttgcttccttcatcacacagtattccacgggacaggtcagcgtggagatagagtgggagctgcagaaggagaacagcaaacgctggaaccccgagatccagtatacttccaactacaacaaatctgttaatgtggactttactgtggacactaatggtgtgtattcagagcctcgccccattggcaccagatacctgactcgtaatctgtaa

SEQ ID NO: 3545 - DNA, 2208 bp, Artificial Sequence
  Description of Artificial Sequence: Synthetic polynucleotide
atggctgccgatggttatcttccagattggctcgaggacactctctctgaaggaataagacagtggtggaagctcaaacctggcccaccaccgccaaagcccgcagagcggcataaggacgacagcaggggtcttgtgcttcctgggtacaagtacctcggacccttcaacggactcgacaagggggagccggtcaacgaggcagacgccgcggccctcgagcacgacaaggcctacgaccggcagctcgacagcggagacaacccgtacctcaagtacaaccacgccgacgcggagtttcaggagcgtcttaaagaagatacgtcttttgggggcaacctcggacgagcagtcttccaggcgaaaaagagggttcttgaacctctgggcctggttgaggaacctgttaagacggctccgggaaaaaagaggccggtagagcactctcctgtggagccagactcctcctcgggaaccggaaaggcgggccagcagcctgcaagaaaaagattgaatttcggtcagactggagacgcagactccgtacctgacccccagcctctcggacagccaccagcagccccctctggtctgggaactaatacgatggctacaggcagtggcgcaccaatggcagacaataacgagggcgccgacggagtgggtaattcctcgggaaattggcattgcgattccacatggatgggcgacagagtcatcaccaccagcacccgcacctgggctctgcccacctacaacaaccatctgtacaagcaaatttccagccaatcaggagcatcgaacgacaaccactactttggctacagcaccccctgggggtattttgacttcaacagattccactgccacttttcgccacgtgactggcaaagactcatcaacaacaactggggattccggcccaagagactcagcttcaagctctttaacattcaagtcaaggaggtcacgcagaatgacggtacgacgacgattgccaataaccttaccagcacggttcaggtctttactgactcggagtaccagctcccgtacgtcctcggctcggcgcatcaaggatgcctcccgccgttcccagcagacgtcttcatggtgccacagtatggataccccaccctgaacaacgggagtcaggcggtaggacgctcttcattttactgcctggagtacttcccttctcagatgcttcgcacgggaaacaactttaccttcagctacacctttgaggacgtgccttttcacagcagctacgctcacagccaaagtctggaccgtctcatgaatcctctcatcgaccaatacctgtattacttgagcaaaacaaacgctccaagcggaaccaccacgatgtccaggcttcagttttctcaggccggagcgagtgacattcgggaccagtctagaaactggcttcctggaccctgttaccgccagcagcgagtatcaaagacagctgcggacaacaacaacagtgattactcgtggactggagctaccaagtaccacctcaatggaagagactctctggtgaacccgggcccagctatggccagccacaaggatgatgaagaaaaatattttcctcagagcggggttctcatcttcgggaaacaaggctcaaataaaactaatgtggacattgaaaaggttatgattacagacgaagaggaaatcaggaccaccaatcccgtggctacggagcagtatggttctgtatctaccaaccttcaaagcggcaacacacaagcagctacctcagatgtcaacacacaaggcgttcttcctggcatggtctggcaggacagagatgtgtacctgcaggggcccatctgggcaaagattcctcacacggacggacactttcacccttctcccctcatgggcggatttggattgaagcaccctcccccacagattctcatcaagaataccccggtacctgcgaatccttcgaccaccttcagtgcggcaaagtttgcttccttcatcacacagtattccacgggacaggtcagcgtggagatagagtgggagctgcagaaggagaacagcaaacgctggaaccccgagatccagtatacttccaactacaacaaatctgttaatgtggactttactgtggacactaatggtgtgtattcagagcctcgccccattggcaccagatacctgactcgtaatctgtaa

SEQ ID NO: 3546 - DNA, 2208 bp, Artificial Sequence
  Description of Artificial Sequence: Synthetic polynucleotide
atggctgccgatggttatcttccagattggctcgaggacactctctctgaaggaataagacagtggtggaagctcaaacctggcccaccaccgccaaagcccgcagagcggcataaggacgacagcaggggtcttgtgcttcctgggtacaagtacctcggacccttcaacggactcgacaagggggagccggtcaacgaggcagacgccgcggccctcgagcacgacaaggcctacgaccggcagctcgacagcggagacaacccgtacctcaagtacaaccacgccgacgcggagtttcaggagcgtcttaaagaagatacgtcttttgggggcaacctcggacgagcagtcttccaggcgaaaaagagggttcttgaacctctgggcctggttgaggaacctgttaagacggctccgggaaaaaagaggccggtagagcactctcctgtggagccagactcctcctcgggaaccggaaaggcgggccagcagcctgcaagaaaaagattgaatttcggtcagactggagacgcagactccgtacctgacccccagtctctcggacagccaccagcagccccctctggtctgggaactaatacgatggctacaggcagtggcgcaccaatggcagacaataacgagggcgccgacggagtgggtaattcctcgggaaattggcattgcgattccacatggatgggcgacagagtcatcaccaccagcacccgcacctgggctctgcccacctacaacaaccatctgtacaagcaaatttccagccaatcaggagcatcgaacgacaaccactactttggctacagcaccccctgggggtattttgacttcaacagattccactgccacttttcgccacgtgactggcaaagactcatcaacaacaactggggattccggcccaagagactcagcttcaagctctttaacattcaagtcaaggaggtcacgcagaatgacggtacgacgacgattgccaataaccttaccagcacggttcaggtctttactgactcggagtaccagctcccgtacgtcctcggctcggcgcatcaaggatgcctcccgccgttcccagcagacgtcttcatggtgccacagtatggatacctcaccctgaacaacgggagtcaggcggtaggacgctcttcattttactgcctggagtacttcccttctcagatgcttcgcacgggaaacaactttaccttcagctacacctttgaggacgtgccttttcacagcagctacgctcacagccaaagtctggaccgtctcatgaatcctctcatcgaccaatacctgtattacttgagcaaaacaaacgctccaagcggaaccaccacgatgtccaggcttcagttttctcaggccggagcgagtgacattcgggaccagtctagaaactggcttcctggaccctgttaccgccagcagcgagtatcaaagacagctgcggacaacaacaacagtgattactcgtggactggagctaccaagtaccacctcaatggaagagactctctggtgaacccgggcccagctatggccagccacaaggatgatgaagaaaaatattttcctcagagcggggttctcatcttcgggaaacaaggctcaaataaaactaatgtggacattgaaaaggttatgattacagacgaagaggaaatcaggaccaccaatcccgtggctacggagcagtatggttctgtatctaccaaccttcaaagcggcaacacacaagcagctacctcagatgtcaacacacaaggcgttcttcctggcatggtctggcaggacagagatgtgtacctgcaggggcccatctgggcaaagattcctcacacggacggacactttcacccttctcccctcatgggcggatttggattgaagcaccctcccccacagattctcatcaagaataccccggtacctgcgaatccttcgaccaccttcagtgcggcaaagtttgcttccttcatcacacagtattccacgggacaggtcagcgtggagatagagtgggagctgcagaaggagaacagcaaacgctggaaccccgagatccagtatacttccaactacaacaaatctgttaatgtggactttactgtggacactaatggtgtgtattcagagcctcgccccattggcaccagatacctgactcgtaatctgtaa

SEQ ID NO: 3547 - DNA, 2208 bp, Artificial Sequence
  Description of Artificial Sequence: Synthetic polynucleotide
atggctgccgatggttatcttccagattggctcgaggacactctctctgaaggaataagacagtggtggaagctcaaacctggcccaccaccgccaaagcccgcagagcggcataaggacgacagcaggggtcttgtgcttcctgggtacaagtacctcggacccttcaacggactcgacaagggggagccggtcaacgaggcagacgccgcggccctcgagcacgacaaggcctacgaccggcagctcgacagcggagacaacccgtacctcaagtacaaccacgccgacgcggagtttcaggagcgtcttaaagaagatacgtcttttgggggcaacctcggacgagcagtcttccaggcgaaaaagagggttcttgaacctctgggcctggttgaggaacctgttaagacggctccgggaaaaaagaggccggtagagcactctcctgtggagccagactcctcctcgggaaccggaaaggcgggccagcagcctgcaagaaaaagattgaatttcggtcagactggagacgcagactccgtacctgacccccagcctctcggacagccaccagcagccccctctggtctgggaactaatacgatggctacaggcagtggcgcaccaatggcagacaataacgagggcgccgacggagtgggtaattcctcgggaaattggcattgcgattccacatggatgggcgacagagtcatcaccaccagcacccgcacctgggctctgcccacctacaacaaccatctgtacaagcaaatttccagccaatcaggagcatcgaacgacaaccactactttggctacagcaccccctgggggtattttgacttcaacagattccactgccacttttcgccacgtgactggcaaagactcatcaacaacaactggggattccggcccaagagactcagcttcaagctctttaacattcaagtcaaggaggtcacgcagaatggcggtacgacgacgattgccaataaccttaccagcacggttcaggtctttactgactcggagtaccagctcccgtacgtcctcggctcggcgcatcaaggatgcctcccgccgttcccagcagacgtcttcatggtgccacagtatggatacctcaccctgaacaacgggagtcaggcggtaggacgctcttcattttactgcctggagtacttcccttctcagatgcttcgcacgggaaacaactttaccttcagctacacctttgaggacgtgccttttcacagcagctacgctcacagccaaagtctggaccgtctcatgaatcctctcatcgaccaatacctgtattacttgagcaaaacaaacgctccaagcggaaccaccacgatgtccaggcttcagttttctcaggccggagcgagtgacattcgggaccagtctagaaactggcttcctggaccctgttaccgccagcagcgagtatcaaagacagctgcggacaacaacaacagtgattactcgtggactggagctaccaagtaccacctcaatggaagagactctctggtgaacccgggcccagctatggccagccacaaggatgatgaagaaaaatattttcctcagagcggggttctcatcttcgggaaacaaggctcaaataaaactaatgtggacattgaaaaggttatgattacagacgaagaggaaatcaggaccaccaatcccgtggctacggagcagtatggttctgtatctaccaaccttcaaagcggcaacacacaagcagctacctcagatgtcaacacacaaggcgttcttcctggcatggtctggcaggacagagatgtgtacctgcaggggcccatctgggcaaagattcctcacacggacggacactttcacccttctcccctcatgggcggatttggattgaagcaccctcccccacagattctcatcaagaataccccggtacctgcgaatccttcgaccaccttcagtgcggcaaagtttgcttccttcatcacacagtattccacgggacaggtcagcgtggagatagagtgggagctgcagaaggagaacagcaaacgctggaaccccgagatccagtatacttccaactacaacaaatctgttaatgtggactttactgtggacactaatggtgtgtattcagagcctcgccccattggcaccagatacctgactcgtaatctgtaa

SEQ ID NO: 3548 - DNA, 2208 bp, Artificial Sequence
  Description of Artificial Sequence: Synthetic polynucleotide
atggctgccgatggttatcttccagattggctcgaggacactctctctgaaggaataagacagtggtggaagctcaaacctggcccaccaccgccaaagcccgcagagcggcataaggacgacagcaggggtcttgtgcttcctgggtacaagtacctcggacccttcaacggactcgacaagggggagccggtcaacgaggcagacgccgcggccctcgagcacgacaaggcctacgaccggcagctcgacagcggagacaacccgtacctcaagtacaaccacgccgacgcggagtttcaggagcgtcttaaagaagatacgtcttttgggggcaacctcggacgagcagtcttccaggcgaaaaagagggttcttgaacctctgggcctggttgaggaacctgttaagacggctccgggaaaaaagaggccggtagagcactctcctgtggagccagactcctcctcgggaaccggaaaggcgggccagcagcctgcaagaaaaagattgaatttcggtcagactggagacgcagactccgtacctgacccccagcctctcggacagccaccagcagccccctctggtctgggaactaatacgatggctacaggcagtggcgcaccaatggcagacaataacgagggcgccgacggagtgggtaattcctcgggaaattggcattgcgattccacatggatgggcgacagagtcatcaccaccagcacccgcacctgggctctgcccacctacaacaaccatctgtacaagcaaatttccagccaatcaggagcatcgaacgacaaccactactttggctacagcaccccctgggggtattttgacttcaacagattccactgccacttttcgccacgtgactggcaaagactcatcaacaacaactggggattccggcccaagagactcagcttcaagctctttaacattcaagtcaaggaggtcacgcagaatgacggtacgacgacgattgccaataaccttaccagcacggttcaggtctttactgactcggagtaccagctcccgtacgtcctcggctcggcgcatcaaggatgcctcccgccgttcccagcagacgtcttcatggtgccacagtatggatacctcaccctgaacaacgggagtcaggcggtaggacgctcttcattttactgcctggagtacttcccttctcagatgcttcgcacgggaaacaactttaccttcagctacacctttgaggacgtgccttttcacagcagctacgctcacagccaaagtctggaccgtctcatgaatcctctcatcgaccaatacctgtattacttgagcaaaacaaacgctccaagcggaaccaccacgatgtccgggcttcagttttctcaggccggagcgagtgacattcgggaccagtctagaaactggcttcctggaccctgttaccgccagcagcgagtatcaaagacagctgcggacaacaacaacagtgattactcgtggactggagctaccaagtaccacctcaatggaagagactctctggtgaacccgggcccagctatggccagccacaaggatgatgaagaaaaatattttcctcagagcggggttctcatcttcgggaaacaaggctcaaataaaactaatgtggacattgaaaaggttatgattacagacgaagaggaaatcaggaccaccaatcccgtggctacggagcagtatggttctgtatctaccaaccttcaaagcggcaacacacaagcagctacctcagatgtcaacacacaaggcgttcttcctggcatggtctggcaggacagagatgtgtacctgcaggggcccatctgggcaaagattcctcacacggacggacactttcacccttctcccctcatgggcggatttggattgaagcaccctcccccacagattctcatcaagaataccccggtacctgtgaatccttcgaccaccttcagtgcggcaaagtttgcttccttcatcacacagtattccacgggacaggtcagcgtggagatagagtgggagctgcagaaggagaacagcaaacgctggaaccccgagatccagtatacttccaactacaacaaatctgttaatgtggactttactgtggacactaatggtgtgtattcagagcctcgccccattggcaccagatacctgactcgtaatctgtaa

SEQ ID NO: 3549 - DNA, 2208 bp, Artificial Sequence
  Description of Artificial Sequence: Synthetic polynucleotide
atggctgccgatggttatcttccagattggctcgaggacactctctctgaaggaataagacagtggtggaagctcaaacctggcccaccaccgccaaagcccgcagagcggcataaggacgacagcaggggtcttgtgcttcctgggtacaagtacctcggacccttcaacggactcgacaagggggagccggtcaacgaggcagacgccgcggccctcgagcacgacaaggcctacgaccggcagctcgacagcggagacaacccgtacctcaagtacaaccacgccgacgcggagtttcaggagcgtcttaaagaagatacgtcttttgggggcaacctcggacgagcagtcttccaggcgaaaaagagggttcttgaacctctgggcctggttgaggaacctgttaagacggctccgggaaaaaagaggccggtagagcactctcctgtggagccagactcctcctcgggaaccggaaaggcgggccagcagcctgcaagaaaaagattgaatttcggtcagactggagacgcagactccgtacctgacccccagcctctcggacagccaccagcagccccctctggtctgggaactaatacgatggctacaggcagtggcgcaccaatggcagacaataacgagggcgccgacggagtgggtaattcctcgggaaattggcattgcgattccacatggatgggcgacagagtcatcaccaccagcacccgcacctgggctctgcccacctacaacaaccatctgtacaagcaaatttccagccaatcaggagcatcgaacgacaaccactactttggctacagcaccccctgggggtattttgacttcaacagattccactgccacttttcgccacgtgactggcaaagactcatcaacaacaactggggattccggcccaagagactcagcttcaagctctttaacattcaagtcaaggaggtcacgcagaatgacggtacgacgacgattgccaataaccttaccagcacggttcaggtctttactgactcggagtaccagctcccgtacgtcctcggctcggcgcatcaaggatgcctcccgccgttcccagcagacgtcttcatggtgccacagtatggatacctcaccctgaacaacgggagtcaggcggtaggacgctcttcattttactgcctggagtacttcccttctcagatgcttcgcacgggaaacaactttaccttcagctacacctttgaggacgtgccttttcacagcagctacgctcacagccaaagtctggaccgtctcatgaatcctctcatcgaccaatacctgtattacttgagcaaaacaaacgctccaagcggaaccaccacgatgtccaggcttcagttttctcaggccggagcgagtgacattcgggaccagtctagaaactggcttcctggaccctgttaccgccagcagcgagtatcaaagacagctgcggacaacaacaacagtgattactcgtggactggagctaccaagtaccacctcaatggaagagactctctggtgaacccgggcccaactatggccagccacaaggatgatgaagaaaaatattttcctcagagcggggttctcatcttcgggaaacaaggctcaaataaaactaatgtggacattgaaaaggttatgattacagacgaagaggaaatcaggaccaccaatcccgtggctacggagcagtatggttctgtatctaccaaccttcaaagcggcaacacacaagcagctacctcagatgtcaacacacaaggcgttcttcctggcatggtctggcaggacagagatgtgtacctgcaggggcccatctgggcaaagattcctcacacggacggacactttcacccttctcccctcatgggcggatttggattgaagcaccctcccccacagattctcatcaagaataccccggtacctgcgaatccttcgaccaccttcagtgcggcaaagtttgcttccttcatcacacagtattccacgggacaggtcagcgtggagatagagtgggagctgcagaaggagaacagcaaacgctggaaccccgagatccagtatacttccaactacaacaaatctgttaatgtggactttactgtggacactaatggtgtgtattcagagcctcgccccattggcaccagatacctgactcgtaatctgtaa

SEQ ID NO: 3550 - DNA, 2208 bp, Artificial Sequence
  Description of Artificial Sequence: Synthetic polynucleotide
atggctgccgatggttatcttccagattggctcgaggacactctctctgaaggaataagacagtggtggaagctcaaacctggcccaccaccgccaaagcccgcagagcggcataaggacgacagcaggggtcttgtgcttcctgggtacaagtacctcggacccctcaacggactcgacaagggggagccggtcaacgaggcagacgccgcggccctcgagcacgacaaggcctacgaccggcagctcgacagcggagacaacccgtacctcaagtacaaccacgccgacgcggagtttcaggagcgtcttaaagaagatacgtcttttgggggcaacctcggacgagcagtcttccaggcgaaaaagagggttcttgaacctctgggcctggttgaggaacctgttaagacggctccgggaaaaaagaggccggtagagcactctcctgtggagccagactcctcctcgggaaccggaaaggcgggccagcagcctgcaagaaaaagattgaatttcggtcagactggagacgcagactccgtacctgacccccagcctctcggacagccaccagcagccccctctggtctgggaactaatacgatggctacaggcagtggcgcaccaatggcagacaataacgagggcgccgacggagtgggtaattcctcgggaaattggcattgcgattccacatggatgggcgacagagtcatcaccaccagcacccgcacctgggctctgcccacctacaacaaccatctgtacaagcaaatttccagccaatcaggagcatcgaacgacaaccactactttggctacagcaccccctgggggtattttgacttcaacagattccactgccacttttcgccacgtgactggcaaagactcatcaacaacaactggggattccggcccaagagactcagcttcaagctctttaacattcaagtcaaggaggtcacgcagaatgacggtacgacgacgattgccaataaccttaccagcacggttcaggtctttactgactcggagtaccagctcccgtacgtcctcggctcggcgcatcaaggatgcctcccgccgttcccagcagacgtcttcatggtgccacagtatggatacctcaccctgaacaacgggagtcaggcggtaggacgctcttcattttactgcctggagtacttcccttctcagatgcttcgcacgggaaacaactttaccttcagctacacctttgaggacgtgccttttcacagcagctacgctcacagccaaagtctggaccgtctcatgaatcctctcatcgaccaatacctgtattacttgagcaaaacaaacgctccaagcggaaccaccacgatgtccaggcttcagttttctcaggccggagcgagtgacattcgggaccagtctagaaactggcttcctggaccctgttaccgccagcagcgagtatcaaagacagctgcggacaacaacaacagtgattactcgtggactggagctaccaagtaccacctcaatggaagagactctctggtgaacccgggcccagctatggccagccacaaggatgatgaagaaaaatattttcctcagagcggggttctcatcttcgggaaacaaggctcaaataaaactaatgtggacattgaaaaggttatgattacagacgaagaggaaatcaggaccaccaatcccgtggctacggagcagtatggttctgtatctaccaaccttcaaagcggcaacacacaagcagctacctcagatgtcaacacacaaggcgttcttcctggcatggtctggcaggacagagatgtgtacctgcaggggcccatctgggcaaagattcctcacacggacggacactttcacccttctcccctcatgggcggatttggattgaagcaccctcccccacagattctcatcaagaataccccggtacctgcgaatccttcgaccaccttcagtgcggcaaagtttgcttccttcatcacacagtattccacgggacaggtcagcgtggagatagagtgggagctgcagaaggagaacagcaaacgctggaaccccgagatccagtatacttccaactacaacaaatctgttaatgtggactttactgtggacactaatggtgtgtattcagagcctcgccccattggcaccagatacctgactcgtaatctgtaa

SEQ ID NO: 3551 - DNA, 2208 bp, Artificial Sequence
  Description of Artificial Sequence: Synthetic polynucleotide
atggctgccgatggttatcttccagattggctcgaggacactctctctgaaggaataagacagtggtggaagctcaaacctggcccaccaccgccaaagcccgcagagcggcataaggacgacagcaggggtcttgtgcttcctgggtacaagtacctcggacccttcaacggactcgacaagggggagccggtcaacgaggcagacgccgcggccctcgagcacgacaaggcctacgaccggcagctcgacagcggagacaacccgtacctcaagtacaaccacgccgacgcggagtttcaggagcgtcttaaagaagatacgtcttttgggggcaacctcggacgagcagtcttccaggcgaaaaagagggttcttgaacctctgggcctggttgaggaacctgttaagacggctccgggaaaaaagaggccggtagagcactctcctgtggagccagactcctcctcgggaaccggaaaggcgggccagcagcctgcaagaaaaagattgaatttcggtcagactggagacgcagactccgtacctgacccccagcctctcggacagccaccagcagccccctctggtctgggaactaatacgatggctacaggcagtggcgcaccaatggcagacaataacgagggcgccgacggagtgggtaattcctcgggaaattggcattgcgattccacatggatgggcgacagagtcatcaccaccagcacccgcacctgggctctgcccacctacaacaaccatctgtacaagcaaatttccagccaatcaggagcatcgaacgacaaccactactttggctacagcaccccctgggggtattttgacttcaacagattccactgccacttttcgccacgtgactggcaaagactcatcaacaacaactggggattccggcccaagagactcagcttcaagctctttaacattcaagtcaaggaggtcacgcagaatgacggtacgacgacgattgccaataaccttaccagcacggttcaggtctttactgactcggagtaccagctcccgtacgtcctcggctcggcgcatcaaggatgcctcccgccgttcccagcagacgtcttcatggtgccacagtatggatacctcaccctgaacaacgggagtcaggcggtaggacgctcttcattttactgcctggagtacttcccttctcagatgcttcgcacgggaaacaactttaccttcagctacacctttgaggacgtgccttttcacagcagctacgctcacagccaaagtctggaccgtctcatgaatcctctcatcgaccaatacctgtattacttgagcaaaacaaacgctccaagcggaaccaccacgatgtccaggcttcagttttctcaggccggagcgagtgacattcgggaccagtctagaaactggcttcctggaccctgttaccgccagcagcgagtatcaaagacagctgcggacaacaacaacagtgattactcgtggactggagctaccaagtaccacctcaatggaagagactctctggtgaacccgggcccagctatgaccagccacaaggatgatgaagaaaaatattttcctcagagcggggttctcatcttcgggaaacaaggctcaaataaaactaatgtggacattgaaaaggttatgattacagacgaagaggaaatcaggaccaccaatcccgtggctacggagcagtatggttctgtatctaccaaccttcaaagcggcaacacacaagcagctacctcagatgtcaacacacaaggcgttcttcctggcatggtctggcaggacagagatgtgtacctgcaggggcccatctgggcaaagattcctcacacggacggacactttcacccttctcccctcatgggcggatttggattgaagcaccctcccccacagattctcatcaagaataccccggtacctgcgaatccttcgaccaccttcagtgcggcaaagtttgcttccttcatcacacagtattccacgggacaggtcagcgtggagatagagtgggagctgcagaaggagaacagcaaacgctggaaccccgagatccagtatacttccaactacaacaaatctgttaatgtggactttactgtggacactaatggtgtgtattcagagcctcgccccattggcaccagatacctgactcgtaatctgtaa

SEQ ID NO: 3552 - DNA, 2208 bp, Artificial Sequence
  Description of Artificial Sequence: Synthetic polynucleotide
atggctgccgatggttatcttccagattggctcgaggacactctctctgaaggaataagacagtggtggaagctcaaacctggcccaccaccgccaaagcccgcagagcggcataaggacgacagcaggggtcttgtgcttcctgggtacaagtacctcggacccttcaacggactcgacaagggggagccggtcaacgaggcagacgccgcggccctcgagcacgacaaggcctacgaccggcagctcgacagcggagacaacccgtacctcaagtacaaccacgccgacgcggagtttcaggagcgtcttaaagaagatacgtcttttgggggcaacctcggacgagcagtcttccaggcgaaaaagagggttcttgaacctctgggcctggttgaggaacctgttaagacggctccgggaaaaaagaggccggtagagcactctcctgtggagccagactcctcctcgggaaccggaaaggcgggccagcagcctgcaagaaaaagattgaatttcggtcagactggagacgcagactccgtacctgacccccagcctctcggacagccaccagcagccccctctggtctgggaactaatacgatggctacaggcagtggcgcaccaatggcagacaataacgagggcgccgacggagtgggtaattcctcgggaaattggcattgcgattccacatggatgggcgacagagtcatcaccaccagcacccgcacctgggctctgcccacctacaacaaccatctgtacaagcaaatttccagccaatcaggagcatcgaacgacaaccactactttggctacagcaccccctgggggtattttgacttcaacagattccactgccacttttcgccacgtgactggcaaagactcatcaacaacaactggggattccggcccaagagactcagcttcaagctctttaacattcaagtcaaggaggtcacgcagaatgacggtacgacgacgattgccaataaccttaccagcacggttcaggtctttactgactcggagtaccagctcccgtacgtcctcggctcggcgcatcaaggatgcctcccgccgttcccagcagacgtcttcatggtgccacagtatggatacctcaccctgaacaacgggagtcaggcggtaggacgctcttcattttactgcctggagtacttcccttctcagatgcttcgcacgggaaacaactttaccttcagctacacctttgaggacgtgccttttcacagcagctacgctcacagccaaagtctggaccgtctcatgaatcctctcatcgaccaatacctgtattacttgagcaaaacaaacgctccaagcggaaccaccacgatgtccaggcttcagttttctcaggccggagcgagtgacattcgggaccagtctagaaactggcttcctggaccctgttaccgccagcagcgagtatcaaagacagctgcggacaacaacaacagtgattactcgtggactggagctaccaagtaccacctcaatggaagagactctctggtgaacccgggcccagctatggccagccacaaggatgatgaagaaaaatattttcctcagagcggggttctcatcttcgggaaacaaggctcaaataaaactaatgtggacattgaaaaggttatgattacagacgaagaggaaatcaggaccaccaatcccgtggctacggagcagtatggttctgtatctaccaaccttcaaagcggcaacacacaagcagctacctcagatgtcaacacacaaggcgttcttcctggcatggtctggcaggacagagatgtgtacctgcaggggcccatctggacaaagattcctcacacggacggacactttcacccttctcccctcatgggcggatttggattgaagcaccctcccccacagattctcatcaagaataccccggtacctgcgaatccttcgaccaccttcagtgcggcaaagtttgcttccttcatcacacagtattccacgggacaggtcagcgtggagatagagtgggagctgcagaaggagaacagcaaacgctggaaccccgagatccagtatacttccaactacaacaaatctgttaatgtggactttactgtggacactaatggtgtgtattcagagcctcgccccattggcaccagatacctgactcgtaatctgtaa

SEQ ID NO: 3553 - DNA, 2208 bp, Artificial Sequence
  Description of Artificial Sequence: Synthetic polynucleotide
atggctgccgatggttatcttccagattggctcgaggacactctctctgaaggaataagacagtggtggaagctcaaacctggcccaccaccgccaaagcccgcagagcggcataaggacgacagcaggggtcttgtgcttcctgggtacaagtacctcggacccttcaacggactcgacaagggggagccggtcaacgaggcagacgccgcggccctcgagcacgacaaggcctacgaccggcagctcgacagcggagacaacccgtacctcaagtacaaccacgccgacgcggagtttcaggagcgtcttaaagaagatacgtcttttgggggcaacctcggacgagcagtcttccaggcgaaaaagagggttcttgaacctctgggcctggttgaggaacctgttaagacggctccgggaaaaaagaggccggtagagcactctcctgtggagccagactcctcctcgggaaccggaaaggcgggccagcagcctgcaagaaaaagattgaatttcggtcagactggagacgcagactccgtacctgacccccagcctctcggacagccaccagtagccccctctggtctgggaactaatacgatggctacaggcagtggcgcaccaatggcagacaataacgagggcgccgacggagtgggtaattcctcgggaaattggcattgcgattccacatggatgggcgacagagtcatcaccaccagcacccgcacctgggctctgcccacctacaacaaccatctgtacaagcaaatttccagccaatcaggagcatcgaacgacaaccactactttggctacagcaccccctgggggtattttgacttcaacagattccactgccacttttcgccacgtgactggcaaagactcatcaacaacaactggggattccggcccaagagactcagcttcaagctctttaacattcaagtcaaggaggtcacgcagaatgacggtacgacgacgattgccaataaccttaccagcacggttcaggtctttactgactcggagtaccagctcccgtacgtcctcggctcggcgcatcaaggatgcctcccgccgttcccagcagacgtcttcatggtgccacagtatggatacctcaccctgaacaacgggagtcaggcggtaggacgctcttcattttactgcctggagtacttcccttctcagatgcttcgcacgggaaacaactttaccttcagctacacctttgaggacgtgccttttcacagcagctacgctcacagccaaagtctggaccgtctcatgaatcctctcatcgaccaatacctgtattacttgagcaaaacaaacgctccaagcggaaccaccacgatgtccaggcttcagttttctcaggccggagcgagtgacattcgggaccagtctagaaactggcttcctggaccctgttaccgccagcagcgagtatcaaagacagctgcggacaacaacaacagtgattactcgtggactggagctaccaagtaccacctcaatggaagagactctctggtgaacccgggcccagctatggccagccacaaggatgatgaagaaaaatattttcctcagagcggggttctcatcttcgggaaacaaggctcaaataaaactaatgtggacattgaaaaggttatgattacagacgaagaggaaatcaggaccaccaatcccgtggctacggagcagtatggttctgtatctaccaaccttcaaagcggcaacacacaagcagctacctcagatgtcaacacacaaggcgttcttcctggcatggtctggcaggacagagatgtgtacctgcaggggcccatctgggcaaagattcctcacacggacggacactttcacccttctcccctcatgggcggatttggattgaagcaccctcccccacagattctcatcaagaataccccggtacctgcgaatccttcgaccaccttcagtgcggcaaagtttgcttccttcatcacacagtattccacgggacaggtcagcgtggagatagagtgggagctgcagaaggagaacagcaaacgctggaaccccgagatccagtatacttccaactacaacaaatctgttaatgtggactttactgtggacactaatggtgtgtattcagagcctcgccccattggcaccagatacctgactcgtaatctgtaa

SEQ ID NO: 3554 - DNA, 2208 bp, Artificial Sequence
  Description of Artificial Sequence: Synthetic polynucleotide
atggctgccgatggttatcttccagattggctcgaggacactctctctgaaggaataagacagtggtggaagctcaaacctggcccaccaccgccaaagcccgcagagcggcataaggacgacagcaggggtcttgtgcttcctgggtacaagtacctcggacccttcaacggactcgacaagggggagccggtcaacgaggcagacgccgcggccctcgagcacgacaaggcctacgaccggcagctcgacagcggagacaacccgtacctcaagtacaaccacgccgacgcggagtttcaggagcgtcttaaagaagatacgtcttttgggggcaacctcggacgagcagtcttccaggcgaaaaagagggttcttgaacctctgggcctggttgaggaacctgttaagacggctccgggaaaaaagaggccggtagagcactctcctgtggagccagactcctcctcgggaaccggaaaggcgggccagcagcctgcaagaaaaagattgaatttcggtcagactggagacgcagactccgtacctgacccccagcctctcggacagccaccagcagccccctctggtctgggaactaatacgatggctacaggcagtggcgcaccaatggcagacaataacgagggcgccgacggagtgggtaattcctcgggaaattggcattgcgattccacatggatgggcgacagagtcatcaccaccagcacccgcacctgggctctgcccacctacaacaaccatctgtacaagcaaatttccagccaatcaggagcatcgaacgacaaccactactttggctacagcaccccctgggggtattttgacttcaacagattccactgccacttttcgccacgtgactggcaaagactcatcaacaacaactggggattccggcccaagagactcagcttcaagctctttaacattcaagtcaaggaggtcacgcagaatgacggtacgacgacgattgccaataaccttaccagcacggttcaggtctttactgactcggagtaccagctcccgtacgtcctcggctcggcgcatcaaggatgcctcccgccgttcccagcagacgtcttcatggtgccacagtatggatacctcaccctgaacaacgggagtcaggcggtaggacgctcttcattttactgcctggagtacttcccttctcagatgcttcgcacgggaaacaactttaccttcagctacacctttgaggacgtgccttttcacagcagctacgctcacagccaaagtctggaccgtctcatgaatcctctcatcgaccaatacctgtattacttgagcaaaacaaacgctccaagcggaaccaccacgatgtccaggcttcagttttctcaggccggagcgagtgacattcgggaccagtctagaaactggcttcctggaccctgttaccgccagcagcgagtatcaaagacagctgcggacaacaacaacagtgattactcgtggactggagctaccaagtaccacctcaatggaagagactctctggtgaacccgggcccagctatggccagccacaaggatgatgaagaaaaatattttcctcagagcggggttctcatcttcgggaaacaaggctcaaataaaactaatgtggacattgaaaaggttatgattacagacgaagaggaaatcaggaccaccaatcccgtggctacggagcagtatggttctgtatctaccaaccttcaaagcggcaacacacaagcagctacctcagatgtcaacacacaaggcgttcttcctggcatggtctggcaggacagagatgtgtacctgcaggggcccatctgggcaaagattcctcacacggacggacactttcacccttctcccctcatgggcggatttggattgaagcaccctcccccacagattctcatcaagaataccccggtacctgcgaatccttcgaccaccttcagtgcggcaaagtttgcttccttcatcacacagtattccacgggacaggtcagcgtggagatagagtgggagccgcagaaggagaacagcaaacgctggaaccccgagatccagtatacttccaactacaacaaatctgttaatgtggactttactgtggacactaatggtgtgtattcagagcctcgccccattggcaccagatacctgactcgtaatctgtaa

SEQ ID NO: 3555 - DNA, 2208 bp, Artificial Sequence
  Description of Artificial Sequence: Synthetic polynucleotide
atggctgccgatggttatcttccagattggctcgaggacactctctctgaaggaataagacagtggtggaagctcaaacctggcccaccaccgccaaagcccgcagagcggcataaggacgacagcaggggtcttgtgcttcctgggtacaagtacctcggacccttcaacggactcgacaagggggagccggtcaacgaggcagacgccgcggccctcgagcacgacaaggcctacgaccggcagctcgacagcggagacaacccgtacctcaagtacaaccacgccgacgcggagtttcaggagcgtcttaaagaagatacgtcttttgggggcaacctcggacgagcagtcttccaggcgaaaaagagggttcttgaacctctgggcctggttgaggaacctgttaagacggctccgggaaaaaagaggccggtagagcactctcctgtggagccagactcctcctcgggaaccggaaaggcgggccagcagcctgcaagaaaaagattgaatttcggtcagactggagacgcagactccgtacctgacccccagcctctcggacagccaccagcagccccctctggtctgggaactaatacgatggctacaggcagtggcgcaccaatggcagacaataacgagggcgccgacggagtgggtaattcctcgggaaattggcattgcgattccacatggatgggcgacagagtcatcaccaccagcacccgcacctgggctctgcccacctacaacaaccatctgtacaagcaaatttccagccaatcaggagcatcgaacgacaaccactactttggctacagcaccccctgggggtattttgacttcaacagattccactgccacttttcgccacgtgactggcaaagactcatcaacaacaactggggattccggcccaagagactcagcttcaagctctttaacattcaagtcaaggaggtcacgcagaatgacggtacgacgacgattgccaataaccttaccagcacggttcaggtctttactgactcggagtaccagctcccgtacgtcctcggctcggcgcatcaaggatgcctcccgccgttcccagcagacgtcttcatggtgccacagtatggatacctcaccctgaacaacgggagtcaggcggtaggacgctcttcattttactgcctggagtacttcccttctcagatgcttcgcacgggaaacaactttaccttcagctacacctttgaggacgtgccttttcacagcagctacgctcacagccaaagtctggaccgtctcatgaatcctctcatcgaccaatacctgtattacttgagcaaaacaaacgctccaagcggaaccaccacgatgtccaggcttcagttttctcaggccggagcgagtgacattcgggaccagtctagaaactggcttcctggaccctgttaccgccagcagcgagtatcaaagacagttgcggacaacaacaacagtgattactcgtggactggagctaccaagtaccacctcaatggaagagactctctggtgaacccgggcccagctatggccagccacaaggatgatgaagaaaaatattttcctcagagcggggttctcatcttcgggaaacaaggctcaaataaaactaatgtggacattgaaaaggttatgattacagacgaagaggaaatcaggaccaccaatcccgtggctacggagcagtatggttctgtatctaccaaccttcaaagcggcaacacacaagcagctacctcagatgtcaacacacaaggcgttcttcctggcatggtctggcaggacagagatgtgtacctgcaggggcccatctgggcaaagattcctcacacggacggacactttcacccttctcccctcatgggcggatttggattgaagcaccctcccccacagattctcatcaagaataccccggtacctgcgaatccttcgaccaccttcagtgcggcaaagtttgcttccttcatcacacagtattccacgggacaggtcagcgtggagatagagtgggagctgcagaaggagaacagcaaacgctggaaccccgagatccagtatacttccaactacaacaaatctgttaatgtggactttactgtggacactaatggtgtgtattcagagcctcgccccattggcaccagatacctgactcgtaatctgtaa

SEQ ID NO: 3556 - DNA, 2208 bp, Artificial Sequence
  Description of Artificial Sequence: Synthetic polynucleotide
atggctgccgatggttatcttccagattggctcgaggacactctctctgaaggaataagacagtggtggaagctcaaacctggcccaccaccgccaaagcccgcagagcggcataaggacgacagcaggggtcttgtgcttcctgggtacaagtacctcggacccttcaacggactcgacaagggggagccggtcaacgaggcagacgccgcggccctcgagcacgacaaggcctacgaccggcagctcgacagcggagacaacccgtacctcaagtacaaccacgccgacgcggagtttcaggagcgtcttaaagaagatacgtcttttgggggcaacctcggacgagcagtcttccaggcgaaaaagagggttcttgaacctctgggcctggttgaggaacctgttaagacggctccgggaaaaaagaggccggtagagcactctcctgtggagccagactcctcctcgggaaccggaaaggcgggccagcagcctgcaagaaaaagattgaatttcggtcagactggagacgcagactccgtacctgacccccagcctctcggacagccaccagcagccccctctggtctgggaactaatacgatggctacaggcagtggcgcaccaatggcagacaataacgagggcgccgacggagtgggtaattcctcgggaaattggcattgcgattccacatggatgggcgacagagtcatcaccaccagcacccgcacctgggctctgcccacctacaacaaccatctgtacaagcaaatttccagccaatcaggagcatcgaacgacaaccactactttggctacagcaccccctgggggtattttgacttcaacagattccactgccacttttcgccacgtgactggcaaagactcatcaacaacaactggggattccggcccaagagactcagcttcaagctctttaacattcaagtcaaggaggtcacgcagaatgacggtacgacgacgattgccaataaccttaccagcacggttcaggtctttactgactcggagtaccagctcccgtacgtcctcggctcggcgcatcaaggatgcctcccgccgttcccagcagacgtcttcatggtgccacagtatggatacctcaccctgaacaacgggagtcaggcggtaggacgctcttcattttactgcctggagtacttcccttctcagatgcttcgcacgggaaacaactttaccttcagctacacctttgaggacgtgccttttcacagcagctacgctcacagccaaagtctggaccgtctcatgaatcctctcatcgaccaatacccgtattacttgagcaaaacaaacgctccaagcggaaccaccacgatgtccaggcttcagttttctcaggccggagcgagtgacattcgggaccagtctagaaactggcttcctggaccctgttaccgccagcagcgagtatcaaagacagctgcggacaacaacaacagtgattactcgtggactggagctaccaagtaccacctcaatggaagagactctctggtgaacccgggcccagctatggccagccacaaggatgatgaagaaaaatattttcctcagagcggggttctcatcttcgggaaacaaggctcaaataaaactaatgtggacattgaaaaggttatgattacagacgaagaggaaatcaggaccaccaatcccgtggctacggagcagtatggttctgtatctaccaaccttcaaagcggcaacacacaagcagctacctcagatgtcaacacacaaggcgttcttcctggcatggtctggcaggacagagatgtgtacctgcaggggcccatctgggcaaagattcctcacacggacggacactttcacccttctcccctcatgggcggatttggattgaagcaccctcccccacagattctcatcaagaataccccggtacctgcgaatccttcgaccaccttcagtgcggcaaagtttgcttccttcatcacacagtattccacgggacaggtcagcgtggagatagagtgggagctgcagaaggagaacagcaaacgctggaaccccgagatccagtatacttccaactacaacaaatctgttaatgtggactttactgtggacactaatggtgtgtattcagagcctcgccccattggcaccagatacctgactcgtaatctgtaa

SEQ ID NO: 3557 - DNA, 2208 bp, Artificial Sequence
  Description of Artificial Sequence: Synthetic polynucleotide
atggctgccgatggttatcttccagattggctcgaggacactctctctgaaggaataagacagtggtggaagctcaaacctggcccaccaccgccaaagcccgcagagcggcataaggacgacagcaggggtcttgtgcttcctgggtacaagtacctcggacccttcaacggactcgacaagggggagccggtcaacgaggcagacgccgcggccctcgagcacgacaaggcctacgaccggcagctcgacagcggagacaacccgtacctcaagtacaaccacaccgacgcggagtttcaggagcgtcttaaagaagatacgtcttttgggggcaacctcggacgagcagtcttccaggcgaaaaagagggttcttgaacctctgggcctggttgaggaacctgttaagacggctccgggaaaaaagaggccggtagagcactctcctgtggagccagactcctcctcgggaaccggaaaggcgggccagcagcctgcaagaaaaagattgaatttcggtcagactggagacgcagactccgtacctgacccccagcctctcggacagccaccagcagccccctctggtctgggaactaatacgatggctacaggcagtggcgcaccaatggcagacaataacgagggcgccgacggagtgggtaattcctcgggaaattggcattgcgattccacatggatgggcgacagagtcatcaccaccagcacccgcacctgggctctgcccacctacaacaaccatctgtacaagcaaatttccagccaatcaggagcatcgaacgacaaccactactttggctacagcaccccctgggggtattttgacttcaacagattccactgccacttttcgccacgtgactggcaaagactcatcaacaacaactggggattccggcccaagagactcagcttcaagctctttaacattcaagtcaaggaggtcacgcagaatgacggtacgacgacgattgccaataaccttaccagcacggttcaggtctttactgactcggagtaccagctcccgtacgtcctcggctcggcgcatcaaggatgcctcccgccgttcccagcagacgtcttcatggtgccacagtatggatacctcaccctgaacaacgggagtcaggcggtaggacgctcttcattttactgcctggagtacttcccttctcagatgcttcgcacgggaaacaactttaccttcagctacacctttgaggacgtgccttttcacagcagctacgctcacagccaaagtctggaccgtctcatgaatcctctcatcgaccaatacctgtattacttgagcaaaacaaacgctccaagcggaaccaccacgatgtccaggcttcagttttctcaggccggagcgagtgacattcgggaccagtctagaaactggcttcctggaccctgttaccgccagcagcgagtatcaaagacagctgcggacaacaacaacagtgattactcgtggactggagctaccaagtaccacctcaatggaagagactctctggtgaacccgggcccagctatggccagccacaaggatgatgaagaaaaatattttcctcagagcggggttctcatcttcgggaaacaaggctcaaataaaactaatgtggacattgaaaaggttatgattacagacgaagaggaaatcaggaccaccaatcccgtggctacggagcagtatggttctgtatctaccaaccttcaaagcggcaacacacaagcagctacctcagatgtcaacacacaaggcgttcttcctggcatggtctggcaggacagagatgtgtacctgcaggggcccatctgggcaaagattcctcacacggacggacactttcacccttctcccctcatgggcggatttggattgaagcaccctcccccacagattctcatcaagaataccccggtacctgcgaatccttcgaccaccttcagtgcggcaaagtttgcttccttcatcacacagtattccacgggacaggtcagcgtggagatagagtgggagctgcagaaggagaacagcaaacgctggaaccccgagatccagtatacttccaactacaacaaatctgttaatgtggactttactgtggacactaatggtgtgtattcagagcctcgccccattggcaccagatacctgactcgtaatctgtaa

SEQ ID NO: 3558 - DNA, 2208 bp, Artificial Sequence
  Description of Artificial Sequence: Synthetic polynucleotide
atggctgccgatggttatcttccagattggctcgaggacactctctctgaaggaataagacagtggtggaagctcaaacctggcccaccaccgccaaagcccgcagagcggcataaggacgacagcaggggtcttgtgcttcctgggtacaagtacctcggacccttcaacggactcgacaagggggggccggtcaacgaggcagacgccgcggccctcgagcacgacaaggcctacgaccggcagctcgacagcggagacaacccgtacctcaagtacaaccacgccgacgcggagtttcaggagcgtcttaaagaagatacgtcttttgggggcaacctcggacgagcagtcttccaggcgaaaaagagggttcttgaacctctgggcctggttgaggaacctgttaagacggctccgggaaaaaagaggccggtagagcactctcctgtggagccagactcctcctcgggaaccggaaaggcgggccagcagcctgcaagaaaaagattgaatttcggtcagactggagacgcagactccgtacctgacccccagcctctcggacagccaccagcagccccctctggtctgggaactaatacgatggctacaggcagtggcgcaccaatggcagacaataacgagggcgccgacggagtgggtaattcctcgggaaattggcattgcgattccacatggatgggcgacagagtcatcaccaccagcacccgcacctgggctctgcccacctacaacaaccatctgtacaagcaaatttccagccaatcaggagcatcgaacgacaaccactactttggctacagcaccccctgggggtattttgacttcaacagattccactgccacttttcgccacgtgactggcaaagactcatcaacaacaactggggattccggcccaagagactcagcttcaagctctttaacattcaagtcaaggaggtcacgcagaatgacggtacgacgacgattgccaataaccttaccagcacggttcaggtctttactgactcggagtaccagctcccgtacgtcctcggctcggcgcatcaaggatgcctcccgccgttcccagcagacgtcttcatggtgccacagtatggatacctcaccctgaacaacgggagtcaggcggtaggacgctcttcattttactgcctggagtacttcccttctcagatgcttcgcacgggaaacaactttaccttcagctacacctttgaggacgtgccttttcacagcagctacgctcacagccaaagtctggaccgtctcatgaatcctctcatcgaccaatacctgtattacttgagcaaaacaaacgctccaagcggaaccaccacgatgtccaggcttcagttttctcaggccggagcgagtgacattcgggaccagtctagaaactggcttcctggaccctgttaccgccagcagcgagtatcaaagacagctgcggacaacaacaacagtgattactcgtggactggagctaccaagtaccacctcaatggaagagactctctggtgaacccgggcccagctatggccagccacaaggatgatgaagaaaaatattttcctcagagcggggttctcatcttcgggaaacaaggctcaaataaaactaatgtggacattgaaaaggttatgattacagacgaagaggaaatcaggaccaccaatcccgtggctacggagcagtatggttctgtatctaccaaccttcaaagcggcaacacacaagcagctacctcagatgtcaacacacaaggcgttcttcctggcatggtctggcaggacagagatgtgtacctgcaggggcccatctgggcaaagattcctcacacggacggacactttcacccttctcccctcatgggcggatttggattgaagcaccctcccccacagattctcatcaagaataccccggtacctgcgaatccttcgaccaccttcagtgcggcaaagtttgcttccttcatcacacagtattccacgggacaggtcagcgtggagatagagtgggagctgcagaaggagaacagcaaacgctggaaccccgagatccagtatacttccaactacaacaaatctgttaatgtggactttactgtggacactaatggtgtgtattcagagcctcgccccattggcaccagatacctgactcgtaatctgtaa

SEQ ID NO: 3559 - DNA, 2208 bp, Artificial Sequence
  Description of Artificial Sequence: Synthetic polynucleotide
atggctgccgatggttatcttccagattggctcgaggacactctctctgaaggaataagacagtggtggaagctcaaacctggcccaccaccgccaaagcccgcagagcggcataaggacgacagcaggggtcttgtgcttcctgggtacaagtacctcggacccttcaacggactcgacaagggggagccggtcaacgaggcagacgccgcggccctcgagcacgacaaggcctacgaccggcagctcgacagcggagacaacccgtacctcaagtacaaccacgccgacgcggagtttcaggagcgtcttaaagaagatacgtcttttgggggcaacctcggacgagcagtcttccaggcgaaaaagagggttcttgaacctctgggcctggttgaggaacctgttaagacggctccgggaaaaaagaggccggtagagcactctcctgtggagccagactcctcctcgggaaccggaaaggcgggccagcagcctgcaagaaaaagattgaatttcggtcagactggagacgcagactccgtacctgacccccagcctctcggacagccaccagcagccccctctggtctgggaactaatacgatggctacaggcagtggcgcaccaatggcagacaataacgagggcgccgacggagtgggtaattcctcgggaaattggcattgcgattccacatggatgggcgacagagtcatcaccaccagcacccgcacctggactctgcccacctacaacaaccatctgtacaagcaaatttccagccaatcaggagcatcgaacgacaaccactactttggctacagcaccccctgggggtattttgacttcaacagattccactgccacttttcgccacgtgactggcaaagactcatcaacaacaactggggattccggcccaagagactcagcttcaagctctttaacattcaagtcaaggaggtcacgcagaatgacggtacgacgacgattgccaataaccttaccagcacggttcaggtctttactgactcggagtaccagctcccgtacgtcctcggctcggcgcatcaaggatgcctcccgccgttcccagcagacgtcttcatggtgccacagtatggatacctcaccctgaacaacgggagtcaggcggtaggacgctcttcattttactgcctggagtacttcccttctcagatgcttcgcacgggaaacaactttaccttcagctacacctttgaggacgtgccttttcacagcagctacgctcacagccaaagtctggaccgtctcatgaatcctctcatcgaccaatacctgtattacttgagcaaaacaaacgctccaagcggaaccaccacgatgtccaggcttcagttttctcaggccggagcgagtgacattcgggaccagtctagaaactggcttcctggaccctgttaccgccagcagcgagtatcaaagacagctgcggacaacaacaacagtgattactcgtggactggagctaccaagtaccacctcaatggaagagactctctggtgaacccgggcccagctatggccagccacaaggatgatgaagaaaaatattttcctcagagcggggttctcatcttcgggaaacaaggctcaaataaaactaatgtggacattgaaaaggttatgattacagacgaagaggaaatcaggaccaccaatcccgtggctacggagcagtatggttctgtatctaccaaccttcaaagcggcaacacacaagcagctacctcagatgtcaacacacaaggcgttcttcctggcatggtctggcaggacagagatgtgtacctgcaggggcccatctgggcaaagattcctcacacggacggacactttcacccttctcccctcatgggcggatttggattgaagcaccctcccccacagattctcatcaagaataccccggtacctgcgaatccttcgaccaccttcagtgcggcaaagtttgcttccttcatcacacagtattccacgggacaggtcagcgtggagatagagtgggagctgcagaaggagaacagcaaacgctggaaccccgagatccagtatacttccaactacaacaaatctgttaatgtggactttactgtggacactaatggtgtgtattcagagcctcgccccattggcaccagatacctgactcgtaatctgtaa

SEQ ID NO: 3560 - DNA, 2208 bp, Artificial Sequence
  Description of Artificial Sequence: Synthetic polynucleotide
atggctgccgatggttatcttccagattggctcgaggacactctctctgaaggaataagacagtggtggaagctcaaacctggcccaccaccgccaaagcccgcagagcggcataaggacgacagcaggggtcttgtgcttcctgggtacaagtacctcggacccttcaacggactcgacaagggggagccggtcaacgaggcagacgccgcggtcctcgagcacgacaaggcctacgaccggcagctcgacagcggagacaacccgtacctcaagtacaaccacgccgacgcggagtttcaggagcgtcttaaagaagatacgtcttttgggggcaacctcggacgagcagtcttccaggcgaaaaagagggttcttgaacctctgggcctggttgaggaacctgttaagacggctccgggaaaaaagaggccggtagagcactctcctgtggagccagactcctcctcgggaaccggaaaggcgggccagcagcctgcaagaaaaagattgaatttcggtcagactggagacgcagactccgtacctgacccccagcctctcggacagccaccagcagccccctctggtctgggaactaatacgatggctacaggcagtggcgcaccaatggcagacaataacgagggcgccgacggagtgggtaattcctcgggaaattggcattgcgattccacatggatgggcgacagagtcatcaccaccagcacccgcacctgggctctgcccacctacaacaaccatctgtacaagcaaatttccagccaatcaggagcatcgaacgacaaccactactttggctacagcaccccctgggggtattttgacttcaacagattccactgccacttttcgccacgtgactggcaaagactcatcaacaacaactggggattccggcccaagagactcagcttcaagctctttaacattcaagtcaaggaggtcacgcagaatgacggtacgacgacgattgccaataaccttaccagcacggttcaggtctttactgactcggagtaccagctcccgtacgtcctcggctcggcgcatcaaggatgcctcccgccgttcccagcagacgtcttcatggtgccacagtatggatacctcaccctgaacaacgggagtcaggcggtaggacgctcttcattttactgcctggagtacttcccttctcagatgcttcgcacgggaaacaactttaccttcagctacacctttgaggacgtgccttttcacagcagctacgctcacagccaaagtctggaccgtctcatgaatcctctcatcgaccaatacctgtattacttgagcaaaacaaacgctccaagcggaaccaccacgatgtccaggcttcagttttctcaggccggagcgagtgacattcgggaccagtctagaaactggcttcctggaccctgttaccgccagcagcgagtatcaaagacagctgcggacaacaacaacagtgattactcgtggactggagctaccaagtaccacctcaatggaagagactctctggtgaacccgggcccagctatggccagccacaaggatgatgaagaaaaatattttcctcagagcggggttctcatcttcgggaaacaaggctcaaataaaactaatgtggacattgaaaaggttatgattacagacgaagaggaaatcaggaccaccaatcccgtggctacggagcagtatggttctgtatctaccaaccttcaaagcggcaacacacaagcagctacctcagatgtcaacacacaaggcgttcttcctggcatggtctggcaggacagagatgtgtacctgcaggggcccatctgggcaaagattcctcacacggacggacactttcacccttctcccctcatgggcggatttggattgaagcaccctcccccacagattctcatcaagaataccccggtacctgcgaatccttcgaccaccttcagtgcggcaaagtttgcttccttcatcacacagtattccacgggacaggtcagcgtggagatagagtgggagctgcagaaggagaacagcaaacgctggaaccccgagatccagtatacttccaactacaacaaatctgttaatgtggactttactgtggacactaatggtgtgtattcagagcctcgccccattggcaccagatacctgactcgtaatctgtaa

SEQ ID NO: 3561 - DNA, 2208 bp, Artificial Sequence
  Description of Artificial Sequence: Synthetic polynucleotide
atggctgccgatggttatcttccagattggctcgaggacactctctctgaaggaataagacagtggtggaagctcaaacctggcccaccaccgccaaagcccgcagagcggcataaggacgacagcaggggtcttgtgcttcctgggtacaagtacctcggacccttcaacggactcgacaagggggagccggtcaacgaggcagacgccgcggccctcgagcacgacaaggcctacgaccggcagctcgacagcggagacaacccgtacctcaagtacaaccacgccgacgcggagtttcaggagcgtcttaaagaagatacgtcttttgggggcaacctcggacgagcagtcttccaggcgaaaaagagggttcttgaacctctgggcctggttgaggaacctgttaagacggctccgggaaaaaagaggccggtagagcactctcctgtggagccagactcctcctcgggaaccggaaaggcgggccagcagcctgcaagaaaaagattgaatttcggtcagactggagacgcagactccgtacctgacccccagcctctcggacagccaccagcagccccctctggtctgggaactaatacgatggctacaggcagtggcgcaccaatggcagacaataacgagggcgccgacggagtgggtaattcctcgggaaattggcattgcgattccacatggatgggcgacagagtcatcaccaccagcacccacacctgggctctgcccacctacaacaaccatctgtacaagcaaatttccagccaatcaggagcatcgaacgacaaccactactttggctacagcaccccctgggggtattttgacttcaacagattccactgccacttttcgccacgtgactggcaaagactcatcaacaacaactggggattccggcccaagagactcagcttcaagctctttaacattcaagtcaaggaggtcacgcagaatgacggtacgacgacgattgccaataaccttaccagcacggttcaggtctttactgactcggagtaccagctcccgtacgtcctcggctcggcgcatcaaggatgcctcccgccgttcccagcagacgtcttcatggtgccacagtatggatacctcaccctgaacaacgggagtcaggcggtaggacgctcttcattttactgcctggagtacttcccttctcagatgcttcgcacgggaaacaactttaccttcagctacacctttgaggacgtgccttttcacagcagctacgctcacagccaaagtctggaccgtctcatgaatcctctcatcgaccaatacctgtattacttgagcaaaacaaacgctccaagcggaaccaccacgatgtccaggcttcagttttctcaggccggagcgagtgacattcgggaccagtctagaaactggcttcctggaccctgttaccgccagcagcgagtatcaaagacagctgcggacaacaacaacagtgattactcgtggactggagctaccaagtaccacctcaatggaagagactctctggtgaacccgggcccagctatggccagccacaaggatgatgaagaaaaatattttcctcagagcggggttctcatcttcgggaaacaaggctcaaataaaactaatgtggacattgaaaaggttatgattacagacgaagaggaaatcaggaccaccaatcccgtggctacggagcagtatggttctgtatctaccaaccttcaaagcggcaacacacaagcagctacctcagatgtcaacacacaaggcgttcttcctggcatggtctggcaggacagagatgtgtacctgcaggggcccatctgggcaaagattcctcacacggacggacactttcacccttctcccctcatgggcggatttggattgaagcaccctcccccacagattctcatcaagaataccccggtacctgcgaatccttcgaccaccttcagtgcggcaaagtttgcttccttcatcacacagtattccacgggacaggtcagcgtggagatagagtgggagctgcagaaggagaacagcaaacgctggaaccccgagatccagtatacttccaactacaacaaatctgttaatgtggactttactgtggacactaatggtgtgtattcagagcctcgccccattggcaccagatacctgactcgtaatctgtaa

SEQ ID NO: 3562 - DNA, 2208 bp, Artificial Sequence
  Description of Artificial Sequence: Synthetic polynucleotide
atggctgccgatggttatcttccagattggctcgaggacactctctctgaaggaataagacagtggtggaagctcaaacctggcccaccaccgccaaagcccgcagagcggcataaggacgacagcaggggtcttgtgcttcctgggtacaagtacctcggacccttcaacggactcgacaagggggagccggtcaacgaggcagacgccgcggccctcgagcacgacaaggcctacgaccggcagctcgacagcggagacaacccgtacctcaagtacaaccacgccgacgcggagtttcaggagcgtcttaaagaagatacgtcttttgggggcaacctcggacgagcagtcttccaggcgaaaaagagggttcttgaacctctgggcctggttgaggaacctgttaagacggctccgggaaaaaagaggccggtagagcactctcctgtggagccagactcctcctcgggaaccggaaaggcgggccagcagcctgcaagaaaaagattgaatttcggtcagactggagacgcagactccgtacctgacccccagcctctcggacagccaccagcagccccctctggtctgggaactaatacgatggctacaggcagtggcgcaccaatggcagacaataacgagggcgccgacggagtgggtaattcctcgggaaattggcattgcgattccacatggatgggcgacagagtcatcaccaccagcacccgcacctgggctctgcccacctacaacaaccatctgtacaagcaaatttccagccaatcaggagcatcgaacgacaaccactactttggctacagcaccccctgggggtattttgacttcaacagattccactgccacttttcgccacgtgactggcaaagactcatcaacaacaactggggattccggcccaagagactcagcttcaagctctttaacattcaagtcaaggaggtcacgcagaatgacggtacgacgacgattgccaataaccttaccagcacggttcaggtctttactgactcggagtaccagctcccgtacgtcctcggctcggcgcatcaaggatgcctcccgccgttcccagcagacgtcttcatggtgccacagtatggatacctcaccctgaacaacgggagtcaggcggtaggacgctcttcattttactgcctggagtacttcccttctcagatgcttcgcacgggaaacaactttaccttcagctacacctttgaggacgtgccttttcacagcagctacgctcacagccaaagtctggaccgtctcatgaatcctctcatcgaccaatacctgtattacttgagcaaaacaaacgctccaagcggaaccaccacgatgtccaggcttcagttttctcaggccggagcgagtggcattcgggaccagtctagaaactggcttcctggaccctgttaccgccagcagcgagtatcaaagacagctgcggacaacaacaacagtgattactcgtggactggagctaccaagtaccacctcaatggaagagactctctggtgaacccgggcccagctatggccagccacaaggatgatgaagaaaaatattttcctcagagcggggttctcatcttcgggaaacaaggctcaaataaaactaatgtggacattgaaaaggttatgattacagacgaagaggaaatcaggaccaccaatcccgtggctacggagcagtatggttctgtatctaccaaccttcaaagcggcaacacacaagcagctacctcagatgtcaacacacaaggcgttcttcctggcatggtctggcaggacagagatgtgtacctgcaggggcccatctgggcaaagattcctcacacggacggacactttcacccttctcccctcatgggcggatttggattgaagcaccctcccccacagattctcatcaagaataccccggtacctgcgaatccttcgaccaccttcagtgcggcaaagtttgcttccttcatcacacagtattccacgggacaggtcagcgtggagatagagtgggagctgcagaaggagaacagcaaacgctggaaccccgagatccagtatacttccaactacaacaaatctgttaatgtggactttactgtggacactaatggtgtgtattcagagcctcgccccattggcaccagatacctgactcgtaatctgtaa

SEQ ID NO: 3563 - DNA, 2208 bp, Artificial Sequence
  Description of Artificial Sequence: Synthetic polynucleotide
atggctgccgatggttatcttccagattggctcgaggacactctctctgaaggaataagacagtggtggaagctcaaacctggcccaccaccgccaaagcccgcagagcggcataaggacgacagcaggggtcttgtgcttcctgggtacaagtacctcggacccttcaacggactcgacaagggggagccggtcaacgaggcagacgccgcggccctcgagcacgacaaggcctacgaccggcagctcgacagcggagacaacccgtacctcaagtacaaccacgccgacgcggagtttcaggagcgtcttaaagaagatacgtcttttgggggcaacctcggacgagtagtcttccaggcgaaaaagagggttcttgaacctctgggcctggttgaggaacctgttaagacggctccgggaaaaaagaggccggtagagcactctcctgtggagccagactcctcctcgggaaccggaaaggcgggccagcagcctgcaagaaaaagattgaatttcggtcagactggagacgcagactccgtacctgacccccagcctctcggacagccaccagcagccccctctggtctgggaactaatacgatggctacaggcagtggcgcaccaatggcagacaataacgagggcgccgacggagtgggtaattcctcgggaaattggcattgcgattccacatggatgggcgacagagtcatcaccaccagcacccgcacctgggctctgcccacctacaacaaccatctgtacaagcaaatttccagccaatcaggagcatcgaacgacaaccactactttggctacagcaccccctgggggtattttgacttcaacagattccactgccacttttcgccacgtgactggcaaagactcatcaacaacaactggggattccggcccaagagactcagcttcaagctctttaacattcaagtcaaggaggtcacgcagaatgacggtacgacgacgattgccaataaccttaccagcacggttcaggtctttactgactcggagtaccagctcccgtacgtcctcggctcggcgcatcaaggatgcctcccgccgttcccagcagacgtcttcatggtgccacagtatggatacctcaccctgaacaacgggagtcaggcggtaggacgctcttcattttactgcctggagtacttcccttctcagatgcttcgcacgggaaacaactttaccttcagctacacctttgaggacgtgccttttcacagcagctacgctcacagccaaagtctggaccgtctcatgaatcctctcatcgaccaatacctgtattacttgagcaaaacaaacgctccaagcggaaccaccacgatgtccaggcttcagttttctcaggccggagcgagtgacattcgggaccagtctagaaactggcttcctggaccctgttaccgccagcagcgagtatcaaagacagctgcggacaacaacaacagtgattactcgtggactggagctaccaagtaccacctcaatggaagagactctctggtgaacccgggcccagctatggccagccacaaggatgatgaagaaaaatattttcctcagagcggggttctcatcttcgggaaacaaggctcaaataaaactaatgtggacattgaaaaggttatgattacagacgaagaggaaatcaggaccaccaatcccgtggctacggagcagtatggttctgtatctaccaaccttcaaagcggcaacacacaagcagctacctcagatgtcaacacacaaggcgttcttcctggcatggtctggcaggacagagatgtgtacctgcaggggcccatctgggcaaagattcctcacacggacggacactttcacccttctcccctcatgggcggatttggattgaagcaccctcccccacagattctcatcaagaataccccggtacctgcgaatccttcgaccaccttcagtgcggcaaagtttgcttccttcatcacacagtattccacgggacaggtcagcgtggagatagagtgggagctgcagaaggagaacagcaaacgctggaaccccgagatccagtatacttccaactacaacaaatctgttaatgtggactttactgtggacactaatggtgtgtattcagagcctcgccccattggcaccagatacctgactcgtaatctgtaa

SEQ ID NO: 3564 - DNA, 2208 bp, Artificial Sequence
  Description of Artificial Sequence: Synthetic polynucleotide
atggctgccgatggttatcttccagattggctcgaggacactctctctgaaggaataagacagtggtggaagctcaaacctggcccaccaccgccaaagcccgcagagcggcataaggacgacagcaggggtcttgtgcttcctgggtacaagtacctcggacccttcaacggactcgacaagggggagccggtcaacgaggcagacgccgcggccctcgagcacgacaaggcctacgaccggcagctcgacagcggagacaacccgtacctcaagtacaaccacgccgacgcggagtttcaggagcgtcttaaagaagatacgtcttttgggggcaacctcggacgagcagtcttccaggcgaaaaagagggttcttgaacctctgggcctggttgaggaacctgttaagacggctccgggaaaaaagaggccggtagagcactctcctgtggagccagactcctcctcgggaaccggaaaggcgggccagcagcctgcaagaaaaagattgaatttcggtcagactggagacgcagactccgtacctgacccccagcctctcggacagccaccagcagccccctctggtctgggaactaatacgatggctacaggcagtggcgcaccaatggcagacaataacgagggcgccgacggagtgggtaattcctcgggaaattggcattgcgattccacatggatgggcgacagagtcatcaccaccagcacccgcacctgggctctgcccacctacaacaaccatctgtacaagcaaatttccagccaatcaggagcatcgaacgacaaccactactttggctacagcaccccctgggggtattttgacttcaacagattccactgccacttttcgccacgtgactggcaaagactcatcaacaacaactggggattccggcccaagagactcagcttcaagctctttaacattcaagtcaaggaggtcacgcagaatgacggtacgacgacgattgccaataaccttaccagcacggttcaggtctttactgactcggagtaccagctcccgtacatcctcggctcggcgcatcaaggatgcctcccgccgttcccagcagacgtcttcatggtgccacagtatggatacctcaccctgaacaacgggagtcaggcggtaggacgctcttcattttactgcctggagtacttcccttctcagatgcttcgcacgggaaacaactttaccttcagctacacctttgaggacgtgccttttcacagcagctacgctcacagccaaagtctggaccgtctcatgaatcctctcatcgaccaatacctgtattacttgagcaaaacaaacgctccaagcggaaccaccacgatgtccaggcttcagttttctcaggccggagcgagtgacattcgggaccagtctagaaactggcttcctggaccctgttaccgccagcagcgagtatcaaagacagctgcggacaacaacaacagtgattactcgtggactggagctaccaagtaccacctcaatggaagagactctctggtgaacccgggcccagctatggccagccacaaggatgatgaagaaaaatattttcctcagagcggggttctcatcttcgggaaacaaggctcaaataaaactaatgtggacattgaaaaggttatgattacagacgaagaggaaatcaggaccaccaatcccgtggctacggagcagtatggttctgtatctaccaaccttcaaagcggcaacacacaagcagctacctcagatgtcaacacacaaggcgttcttcctggcatggtctggcaggacagagatgtgtacctgcaggggcccatctgggcaaagattcctcacacggacggacactttcacccttctcccctcatgggcggatttggattgaagcaccctcccccacagattctcatcaagaataccccggtacctgcgaatccttcgaccaccttcagtgcggcaaagtttgcttccttcatcacacagtattccacgggacaggtcagcgtggagatagagtgggagctgcagaaggagaacagcaaacgctggaaccccgagatccagtatacttccaactacaacaaatctgttaatgtggactttactgtggacactaatggtgtgtattcagagcctcgccccattggcaccagatacctgactcgtaatctgtaa

SEQ ID NO: 3565 - DNA, 2208 bp, Artificial Sequence
  Description of Artificial Sequence: Synthetic polynucleotide
atggctgccgatggttatcttccagattggctcgaggacactctctctgaaggaataagacagtggtggaagctcaaacctggcccaccaccgccaaagcccgcagagcggcataaggacgacagcaggggtcttgtgcttcctgggtacaagtacctcggacccttcaacggactcgacaagggggagccggtcaacgaggcagacgccgcggccctcgagcacgacaaggcctacgaccggcagctcgacagcggagacaacccgtacctcaagtacaaccacgccgacgcggagtttcaggagcgtcttaaagaagatacgtcttttgggggcaacctcggacgagcagtcttccaggcgaaaaagagggttcttgaacctctgggcctggttgaggaacctgttaagacggctccgggaaaaaagaggccggtagagcactctcctgtggagccagactcctcctcgggaaccggaaaggcgggccagcagcctgcaagaaaaagattgaatttcggtcagactggagacgcagactccgtacctgacccccagcctctcggacagccaccagcagccccctctggtctgggaactaatacgatggctacaggcagtggcgcaccaatggcagacaataacgagggcgtcgacggagtgggtaattcctcgggaaattggcattgcgattccacatggatgggcgacagagtcatcaccaccagcacccgcacctgggctctgcccacctacaacaaccatctgtacaagcaaatttccagccaatcaggagcatcgaacgacaaccactactttggctacagcaccccctgggggtattttgacttcaacagattccactgccacttttcgccacgtgactggcaaagactcatcaacaacaactggggattccggcccaagagactcagcttcaagctctttaacattcaagtcaaggaggtcacgcagaatgacggtacgacgacgattgccaataaccttaccagcacggttcaggtctttactgactcggagtaccagctcccgtacgtcctcggctcggcgcatcaaggatgcctcccgccgttcccagcagacgtcttcatggtgccacagtatggatacctcaccctgaacaacgggagtcaggcggtaggacgctcttcattttactgcctggagtacttcccttctcagatgcttcgcacgggaaacaactttaccttcagctacacctttgaggacgtgccttttcacagcagctacgctcacagccaaagtctggaccgtctcatgaatcctctcatcgaccaatacctgtattacttgagcaaaacaaacgctccaagcggaaccaccacgatgtccaggcttcagttttctcaggccggagcgagtgacattcgggaccagtctagaaactggcttcctggaccctgttaccgccagcagcgagtatcaaagacagctgcggacaacaacaacagtgattactcgtggactggagctaccaagtaccacctcaatggaagagactctctggtgaacccgggcccagctatggccagccacaaggatgatgaagaaaaatattttcctcagagcggggttctcatcttcgggaaacaaggctcaaataaaactaatgtggacattgaaaaggttatgattacagacgaagaggaaatcaggaccaccaatcccgtggctacggagcagtatggttctgtatctaccaaccttcaaagcggcaacacacaagcagctacctcagatgtcaacacacaaggcgttcttcctggcatggtctggcaggacagagatgtgtacctgcaggggcccatctgggcaaagattcctcacacggacggacactttcacccttctcccctcatgggcggatttggattgaagcaccctcccccacagattctcatcaagaataccccggtacctgcgaatccttcgaccaccttcagtgcggcaaagtttgcttccttcatcacacagtattccacgggacaggtcagcgtggagatagagtgggagctgcagaaggagaacagcaaacgctggaaccccgagatccagtatacttccaactacaacaaatctgttaatgtggactttactgtggacactaatggtgtgtattcagagcctcgccccattggcaccagatacctgactcgtaatctgtaa

SEQ ID NO: 3566 - DNA, 2208 bp, Artificial Sequence
  Description of Artificial Sequence: Synthetic polynucleotide
atggctgccgatggttatcttccagattggctcgaggacactctctctgaaggaataagacagtggtggaagctcaaacctggcccaccaccgccaaagcccgcagagcggcataaggacgacagcaggggtcttgtgcttcctgggtacaagtacctcggacccttcaacggactcgacaagggggagccggtcaacgaggcagacgccgcggccctcgagcacgacaaggcctacgaccggcagctcgacagcggagacaacccgtacctcaagtacaaccacgccgacgcggagtttcaggagcgtcttaaagaagatacgtcttttgggggcaacctcggacgagcagtcttccaggcgaaaaagagggttcttgaacctctgggcctggttgaggaacctgttaagacggctccgggaaaaaagaggccggtagagcactctcctgtggagccagactcctcctcgggaaccggaaaggcgggccagcagcctgcaagaaaaagattgaatttcggtcagactggagacgcagactccgtacctgacccccagcctctcggacagccaccagcagccccctctggtctgggaactaatacgatggctacaggcagtggcgcaccaatggcagacaataacgagggcgccgacggagtgggtaattcctcgggaaattggcattgcgattccacatggatgggcgacagagtcatcaccaccagcacccgcacctgggctctgcccacctacaacaaccatctgtacaagcaaatttccagccaatcaggagcatcgaacgacaaccactactttggctacagcaccccctgggggtattttgacttcaacagattccactgccacttttcgccacgtgactggcaaagactcatcaacaacaactggggattccggcccaagagactcagcttcaagctctttaacattcaagtcaaggaggtcacgcagaatgacggtacgacgacgattgccaataaccttaccagcacggttcaggtctttactgactcggagtaccagctcccgtacgtcctcggctcggcgcatcaaggatgcctcccgccgttcccagcagacgtcttcatggtgccacagtatggatacctcaccctgaacaacgggagtcaggcggtaggacgctcttcattttactgcctggagtacttcccttctcagatgcttcgcacgggaaacaactttaccttcagctacacctttgaggacgtgccttttcacagcagctacgctcacagccaaagtctggaccgtctcatgaatcctctcatcgaccaatacctgtattacttgagcaaaacaaacgctccaagcggaaccaccacgatgtccaggcttcagttttctcaggccggagcgagtgacattcgggaccagtctagaaactggcttcctggaccctgttaccgccagcagcgagtatcaaagacagctgcggacaacaacaacagtgattactcgtggactggagctaccaagtaccacctcaatggaagaggctctctggtgaacccgggcccagctatggccagccacaaggatgatgaagaaaaatattttcctcagagcggggttctcatcttcgggaaacaaggctcaaataaaactaatgtggacattgaaaaggttatgattacagacgaagaggaaatcaggaccaccaatcccgtggctacggagcagtatggttctgtatctaccaaccttcaaagcggcaacacacaagcagctacctcagatgtcaacacacaaggcgttcttcctggcatggtctggcaggacagagatgtgtacctgcaggggcccatctgggcaaagattcctcacacggacggacactttcacccttctcccctcatgggcggatttggattgaagcaccctcccccacagattctcatcaagaataccccggtacctgcgaatccttcgaccaccttcagtgcggcaaagtttgcttccttcatcacacagtattccacgggacaggtcagcgtggagatagagtgggagctgcagaaggagaacagcaaacgctggaaccccgagatccagtatacttccaactacaacaaatctgttaatgtggactttactgtggacactaatggtgtgtattcagagcctcgccccattggcaccagatacctgactcgtaatctgtaa

SEQ ID NO: 3567 - DNA, 2208 bp, Artificial Sequence
  Description of Artificial Sequence: Synthetic polynucleotide
atggctgccgatggttatcttccagattggctcgaggacactctctctgaaggaataagacagtggtggaagctcaaacctggcccaccaccgccaaagcccgcagagcggcataaggacgacagcaggggtcttgtgcttcctgggtacaagtacctcggacccttcaacggactcgacaagggggagccggtcaacgaggcagacgccgcggccctcgagcacgacaaggcctacgaccggcagctcgacagcggagacaacccgtacctcaagtacaaccacgccgacgcggagtttcaggagcgtcttaaagaagatacgtcttttgggggcaacctcggacgagcagtcttccaggcgaaaaagagggttcttgaacctctgggcctggttgaggaacctgttaagacggctccgggaaaaaagaggccggtagagcactctcctgtggagccagactcctcctcgggaaccggaaaggcgggccagcagcctgcaagaaaaagattgaatttcggtcagactggagacgcagactccgtacctgacccccagcctctcggacagccaccagcagccccctctggtctgggaactaatacgatggctacaggcagtggcgcaccaatggcagacaataacgagggcgccgacggagtgggtaattcctcgggaaattggcattgcgattccacatggatgggcgacagagtcatcaccaccagcacccgcacctgggctctgcccacctacaacaaccatctgtacaagcaaatttccagccaatcaggagcatcgaacgacaaccactactttggctacagcaccccctgggggtattttgacttcaacagattccactgccacttttcgccacgtgactggcaaagactcatcaacaacaactggggattccggcccaagagactcagcttcaagctctttaacattcaagtcaaggaggtcacgcagaatgacggtacgacgacgattgccaataaccttaccagcacggttcaggtctttactgactcggagtaccagctcccgtacgtcctcggctcggcgcatcaaggatgcctcccgccgttcccagcagacgtcttcatggtgccacagtatggatacctcaccctgaacaacgggagtcaggcggtaggacgctcttcattttactgcctggagtacttcccttctcagatgcttcgcacgggaaacaactttaccttcagctacacctttgaggacgtgccttttcacagcagctacgctcacagccaaagtctggaccgtctcatgaatcctctcatcgaccaatacctgtattacttgagcaaaacaaacgctccaagcggaaccaccacgatgtccaggcttcagttttctcaggccggagcgagtgacattcgggaccagtctagaaactggcttcctggaccctgttaccgccagcagcgagtatcaaagacagctgcggacaacaacaacagtgattactcgtggactggagctaccaagtaccacctcaatggaagagactctctggtgaacccgggcccagctatggccagccacaaggatgatgaagaaaaatattttcctcagagcggggttctcatcttcgggaaacaaggctcaaataaaactaatgtggacattgaaaaggttatgattacagacgaagaggaaatcaggaccaccaatcccgtggctacggagcagtatggttctgtatctaccaaccttcaaagcggcaacacacaagcagctaccccagatgtcaacacacaaggcgttcttcctggcatggtctggcaggacagagatgtgtacctgcaggggcccatctgggcaaagattcctcacacggacggacactttcacccttctcccctcatgggcggatttggattgaagcaccctcccccacagattctcatcaagaataccccggtacctgcgaatccttcgaccaccttcagtgcggcaaagtttgcttccttcatcacacagtattccacgggacaggtcagcgtggagatagagtgggagctgcagaaggagaacagcaaacgctggaaccccgagatccagtatacttccaactacaacaaatctgttaatgtggactttactgtggacactaatggtgtgtattcagagcctcgccccattggcaccagatacctgactcgtaatctgtaa

SEQ ID NO: 3568 - DNA, 2208 bp, Artificial Sequence
  Description of Artificial Sequence: Synthetic polynucleotide
atggctgccgatggttatcttccagattggctcgaggacactctctctgaaggaataagacagtggtggaagctcaaacctggcccaccaccgccaaagcccgcagagcggcataaggacgacagcaggggtcttgtgcttcctgggtacaagtacctcggacccttcaacggactcgacaagggggagccggtcaacgaggcagacgccgcggccctcgagcacgacaaggcctacgaccggcagctcgacagcggagacaacccgtacctcaagtacaaccacgccgacgcggagtttcaggagcgtcttaaagaagatacgtcttttgggggcaacctcggacgagcagtcttccaggcgaaaaagagggttcttgaacctctgggcctggttgaggaacctgttaagacggctccgggaaaaaagaggccggtagagcactctcctgtggagccagactcctcctcgggaaccggaaaggcgggccagcagcctgcaagaaaaagattgaatttcggtcagactggagacgcagactccgtacctgacccccagcctctcggacagccaccagcagccccctctggtctgggaactaatacgatggctacaggcagtggcgcaccaatggcagacaataacgagggcgccgacggagtgggtaattcctcgggaaattggcattgcgattccacatggatgggcgacagagtcatcaccaccagcacccgcacctgggctctgcccacctacaacaaccatctgtacaagcaaatttccagccaatcaggagcatcgaacgacaaccactactttggctacagcaccccctgggggtattttgacttcaacagattccactgccacttttcgccacgtgactggcaaagactcatcaacaacaactggggattccggcccaagagactcagcttcaagctctttaacattcaagtcaaggaggtcacgcagaatgacggtacgacgacgattgccaataaccttaccagcacggttcaggtctttactgactcggagtaccagctcccgtacgtcctcggctcggcgcatcaaggatgcctcccgccgttcccagcagacgtcttcatggtgccacagtatggatacctcaccctgaacaacgggagtcaggcggtaggacgctcttcattttactgcctggagtacttcccttctcagatgcttcgcacgggaaacaactttaccttcagctacacctttgaggacgtgccttttcacagcagctacgctcacagccaaagtctggaccgtctcatgaatcctctcatcgaccaatacctgtattacttgagcaaaacaaacgctccaagcggaaccaccacgatgtccaggcttcagttttctcaggccggagcgagtgacattcgggaccagtctagaaactggcttcctggaccctgttaccgccagcagcgagtatcaaagacagctgcggacaacaacaacagtgattactcgtggactggagctaccaagtaccacctcaatggaagagactctctggtgaacccgggcccagctatggccagccacaaggatgatgaagaaaaatattttcctcagagcggggttctcatcttcgggaaacaaggctcaaataaaactaatgtggacattgaaaaggttatgattacagacgaagaggaaatcaggaccaccaatcccgtggctacggagcagtatggttctgtatctaccaaccttcaaagcggcaacacacaagcagctacctcagatgtcaacacacaaggcgttcttcctggcatggtctggcaggacagagatgtgtacctgcaggggcccatctgggcaaagattcctcacacggacggacactttcacccttctcccctcatgggcggatttggattgaagcaccctcccccacagattctcatcaagaataccccggtacctgcgaatccttcgaccaccttcagtgtggcaaagtttgcttccttcatcacacagtattccacgggacaggtcagcgtggagatagagtgggagctgcagaaggagaacagcaaacgctggaaccccgagatccagtatacttccaactacaacaaatctgttaatgtggactttactgtggacactaatggtgtgtattcagagcctcgccccattggcaccagatacctgactcgtaatctgtaa

SEQ ID NO: 3569 - DNA, 2208 bp, Artificial Sequence
  Description of Artificial Sequence: Synthetic polynucleotide
atggctgccgatggttatcttccagattggctcgaggacactctctctgaaggaataagacagtggtggaagctcaaacctggcccaccaccgccaaagcccgcagagcggcataaggacgacagcaggggtcttgtgcttcctgggtacaagtacctcggacccttcaacggactcgacaagggggagccggtcaacgaggcagacgccgcggccctcgagcacgacaaggcctacgaccggcagctcgacagcggagacaacccgtacctcaagtacaaccacgccgacgcggagtttcaggagcgtcttaaagaagatacgtcttttgggggcaacctcggacgagcagtcttccaggcgaaaaagagggttcttgaacctctgggcctggttgaggaacctgttaagacggctccgggaaaaaagaggccggtagagcactctcctgtggagccagactcctcctcgggaaccggaaaggcgggccagcagcctgcaagaaaaagattgaatttcggtcagactggagacgcagactccgtacctgacccccagcctctcggacagccaccagcagccccctctggtctgggaactaatacgatggctacaggcagtggcgcaccaatggcagacaataacgagggcgccgacggagtgggtaattcctcgggaaattggcattgcgattccacatggatgggcgacagagtcatcaccaccagcacccgcacctgggctctgcccacctacaacaaccatctgtacaagcaaatttccagccaatcaggagcatcgaacgacaaccactactttggctacagcaccccctgggggtattttgacttcaacagattccactgccacttttcgccacgtgactggcaaagactcatcaacaacaactggggattccggcccaagagactcagcttcaagctctttaacattcaagtcaaggaggtcacgcagaatgacggtacgacgacgattgccaataaccttaccagcacggttcaggtctttactgactcggagtaccagctcccgtacgtcctcggctcggcgcatcaaggatgcctcccgccgttcccagcagacgtcttcatggtgccacagtatggatacctcaccctgaacaacgggagtcaggcggtaggacgctcttcattttactgcctggagtacttcccttctcagatgcttcgcacgggaaacaactttaccttcagctacacctttgaggacgtgccttttcgcagcagctacgctcacagccaaagtctggaccgtctcatgaatcctctcatcgaccaatacctgtattacttgagcaaaacaaacgctccaagcggaaccaccacgatgtccaggcttcagttttctcaggccggagcgagtgacattcgggaccagtctagaaactggcttcctggaccctgttaccgccagcagcgagtatcaaagacagctgcggacaacaacaacagtgattactcgtggactggagctaccaagtaccacctcaatggaagagactctctggtgaacccgggcccagctatggccagccacaaggatgatgaagaaaaatattttcctcagagcggggttctcatcttcgggaaacaaggctcaaataaaactaatgtggacattgaaaaggttatgattacagacgaagaggaaatcaggaccaccaatcccgtggctacggagcagtatggttctgtatctaccaaccttcaaagcggcaacacacaagcagctacctcagatgtcaacacacaaggcgttcttcctggcatggtctggcaggacagagatgtgtacctgcaggggcccatctgggcaaagattcctcacacggacggacactttcacccttctcccctcatgggcggatttggattgaagcaccctcccccacagattctcatcaagaataccccggtacctgcgaatccttcgaccaccttcagtgcggcaaagtttgcttccttcatcacacagtattccacgggacaggtcagcgtggagatagagtgggagctgcagaaggagaacagcaaacgctggaaccccgagatccagtatacttccaactacaacaaatctgttaatgtggactttactgtggacactaatggtgtgtattcagagcctcgccccattggcaccagatacctgactcgtaatctgtaa

SEQ ID NO: 3570 - DNA, 2208 bp, Artificial Sequence
  Description of Artificial Sequence: Synthetic polynucleotide
atggctgccgatggttatcttccagattggctcgaggacactctctctgaaggaataagacagtggtggaagctcaaacctggcccaccaccgccaaagcccgcagagcggcataaggacgacagcaggggtcttgtgcttcctgggtacaagtacctcggacccttcaacggactcgacaagggggagccggtcaacgaggcagacgccgcggccctcgagcacgacaaggcctacgaccggcagctcgacagcggagacaacccgtacctcaagtacaaccacgccgacgcggagtttcaggagcgtcttaaagaagatacgtcttttgggggcaacctcggacgagcagtcttccaggcgaaaaagagggttcttgaacctctgggcctggttgaggaacctgttaagacggctccgggaaaaaagaggccggtagagcactctcctgtggagccagactcctcctcgggaaccggaaaggcggaccagcagcctgcaagaaaaagattgaatttcggtcagactggagacgcagactccgtacctgacccccagcctctcggacagccaccagcagccccctctggtctgggaactaatacgatggctacaggcagtggcgcaccaatggcagacaataacgagggcgccgacggagtgggtaattcctcgggaaattggcattgcgattccacatggatgggcgacagagtcatcaccaccagcacccgcacctgggctctgcccacctacaacaaccatctgtacaagcaaatttccagccaatcaggagcatcgaacgacaaccactactttggctacagcaccccctgggggtattttgacttcaacagattccactgccacttttcgccacgtgactggcaaagactcatcaacaacaactggggattccggcccaagagactcagcttcaagctctttaacattcaagtcaaggaggtcacgcagaatgacggtacgacgacgattgccaataaccttaccagcacggttcaggtctttactgactcggagtaccagctcccgtacgtcctcggctcggcgcatcaaggatgcctcccgccgttcccagcagacgtcttcatggtgccacagtatggatacctcaccctgaacaacgggagtcaggcggtaggacgctcttcattttactgcctggagtacttcccttctcagatgcttcgcacgggaaacaactttaccttcagctacacctttgaggacgtgccttttcacagcagctacgctcacagccaaagtctggaccgtctcatgaatcctctcatcgaccaatacctgtattacttgagcaaaacaaacgctccaagcggaaccaccacgatgtccaggcttcagttttctcaggccggagcgagtgacattcgggaccagtctagaaactggcttcctggaccctgttaccgccagcagcgagtatcaaagacagctgcggacaacaacaacagtgattactcgtggactggagctaccaagtaccacctcaatggaagagactctctggtgaacccgggcccagctatggccagccacaaggatgatgaagaaaaatattttcctcagagcggggttctcatcttcgggaaacaaggctcaaataaaactaatgtggacattgaaaaggttatgattacagacgaagaggaaatcaggaccaccaatcccgtggctacggagcagtatggttctgtatctaccaaccttcaaagcggcaacacacaagcagctacctcagatgtcaacacacaaggcgttcttcctggcatggtctggcaggacagagatgtgtacctgcaggggcccatctgggcaaagattcctcacacggacggacactttcacccttctcccctcatgggcggatttggattgaagcaccctcccccacagattctcatcaagaataccccggtacctgcgaatccttcgaccaccttcagtgcggcaaagtttgcttccttcatcacacagtattccacgggacaggtcagcgtggagatagagtgggagctgcagaaggagaacagcaaacgctggaaccccgagatccagtatacttccaactacaacaaatctgttaatgtggactttactgtggacactaatggtgtgtattcagagcctcgccccattggcaccagatacctgactcgtaatctgtaa

SEQ ID NO: 3571 - DNA, 2208 bp, Artificial Sequence
  Description of Artificial Sequence: Synthetic polynucleotide
atggctgccgatggttatcttccagattggctcgaggacactctctctgaaggaataagacagtggtggaagctcaaacctggcccaccaccgccaaagcccgcagagcggcataaggacgacagcaggggtcttgtgcttcctgggtacaagtacctcggacccttcaacggactcgacaagggggagccggtcaacgaggcagacgccgcggccctcgagcacgacaaggcctacgaccggcagctcgacagcggagacaacccgtacctcaagtacaaccacgccgacgcggagtttcaggagcgtcttaaagaagatacgtcttttgggggcaacctcggacgagcagtcttccaggcgaaaaagagggttcttgaacctctgggcctggttgaggaacctgttaagacggctccgggaaaaaagaggccggtagagcactctcctgtggagccagactcctcctcgggaaccggaaaggcgggccagcagcctgcaagaaaaagattgaatttcggtcagactggagacgcagactccgtacctgacccccagcctctcggacagccaccagcagccccctctggtctgggaactaatacgatggctacaggcagtggcgcaccaatggcagacaataacgagggcgccgacggagtgggtaattcctcgggaaattggcattgcgattccacatggatgggcgacagagtcatcaccaccagcacccgcacctgggctctgcccacctacaacaaccatctgtacaagcaaatttccagccaatcaggagcatcgaacgacaaccactactttggctacagcaccccctgggggtattttgacttcaacagattccactgccacttttcgccacgtgactggcaaagactcatcaacaacaactggggattccggcccaagagactcagcttcaagctctttaacattcaagtcaaggaggtcacgcagaatgacggtacgacgacgattgccaataaccttaccaacacggttcaggtctttactgactcggagtaccagctcccgtacgtcctcggctcggcgcatcaaggatgcctcccgccgttcccagcagacgtcttcatggtgccacagtatggatacctcaccctgaacaacgggagtcaggcggtaggacgctcttcattttactgcctggagtacttcccttctcagatgcttcgcacgggaaacaactttaccttcagctacacctttgaggacgtgccttttcacagcagctacgctcacagccaaagtctggaccgtctcatgaatcctctcatcgaccaatacctgtattacttgagcaaaacaaacgctccaagcggaaccaccacgatgtccaggcttcagttttctcaggccggagcgagtgacattcgggaccagtctagaaactggcttcctggaccctgttaccgccagcagcgagtatcaaagacagctgcggacaacaacaacagtgattactcgtggactggagctaccaagtaccacctcaatggaagagactctctggtgaacccgggcccagctatggccagccacaaggatgatgaagaaaaatattttcctcagagcggggttctcatcttcgggaaacaaggctcaaataaaactaatgtggacattgaaaaggttatgattacagacgaagaggaaatcaggaccaccaatcccgtggctacggagcagtatggttctgtatctaccaaccttcaaagcggcaacacacaagcagctacctcagatgtcaacacacaaggcgttcttcctggcatggtctggcaggacagagatgtgtacctgcaggggcccatctgggcaaagattcctcacacggacggacactttcacccttctcccctcatgggcggatttggattgaagcaccctcccccacagattctcatcaagaataccccggtacctgcgaatccttcgaccaccttcagtgcggcaaagtttgcttccttcatcacacagtattccacgggacaggtcagcgtggagatagagtgggagctgcagaaggagaacagcaaacgctggaaccccgagatccagtatacttccaactacaacaaatctgttaatgtggactttactgtggacactaatggtgtgtattcagagcctcgccccattggcaccagatacctgactcgtaatctgtaa

SEQ ID NO: 3572 - DNA, 2208 bp, Artificial Sequence
  Description of Artificial Sequence: Synthetic polynucleotide
atggctgccgatggttatcttccagattggctcgaggacactctctctgaaggaataagacagtggtggaagctcaaacctggcccaccaccgccaaagcccgcagagcggcataaggacgacagcaggggtcttgtgcttcctgggtacaagtacctcggacccttcaacggactcgacaagggggagccggtcaacgaggcagacgccgcggccctcgagcacgacaaggcctacgaccggcagctcgacagcggagacaacccgtacctcaagtacaaccacgccgacgcggagtttcaggagcgtcttaaagaagatacgtcttttgggggcaacctcggacgagcagtcttccaggcgaaaaagagggttcttgaacctctgggcctggttgaggaacctgttaagacggctccgggaaaaaagaggccggtagagcactctcctgtggagccagactcctcctcgggaaccggaaaggcgggccagcagcctgcaagaaaaagattgaatttcggtcagactggagacgcagactccgtacctgacccccagcctctcggacagccaccagcagccccctctggtctgggaactaatacgatggctacaggcagtggcgcaccaatggcagacaataacgagggcgccgacggagtgggtaattcctcgggaaattggcattgcgattccacatggatgggcgacagagtcatcaccaccagcacccgcacctgggctctgcccacctacaacaaccatctgtacaagcaaatttccagccaatcaggagcatcgaacgacaaccactactttggctacaacaccccctgggggtattttgacttcaacagattccactgccacttttcgccacgtgactggcaaagactcatcaacaacaactggggattccggcccaagagactcagcttcaagctctttaacattcaagtcaaggaggtcacgcagaatgacggtacgacgacgattgccaataaccttaccagcacggttcaggtctttactgactcggagtaccagctcccgtacgtcctcggctcggcgcatcaaggatgcctcccgccgttcccagcagacgtcttcatggtgccacagtatggatacctcaccctgaacaacgggagtcaggcggtaggacgctcttcattttactgcctggagtacttcccttctcagatgcttcgcacgggaaacaactttaccttcagctacacctttgaggacgtgccttttcacagcagctacgctcacagccaaagtctggaccgtctcatgaatcctctcatcgaccaatacctgtattacttgagcaaaacaaacgctccaagcggaaccaccacgatgtccaggcttcagttttctcaggccggagcgagtgacattcgggaccagtctagaaactggcttcctggaccctgttaccgccagcagcgagtatcaaagacagctgcggacaacaacaacagtgattactcgtggactggagctaccaagtaccacctcaatggaagagactctctggtgaacccgggcccagctatggccagccacaaggatgatgaagaaaaatattttcctcagagcggggttctcatcttcgggaaacaaggctcaaataaaactaatgtggacattgaaaaggttatgattacagacgaagaggaaatcaggaccaccaatcccgtggctacggagcagtatggttctgtatctaccaaccttcaaagcggcaacacacaagcagctacctcagatgtcaacacacaaggcgttcttcctggcatggtctggcaggacagagatgtgtacctgcaggggcccatctgggcaaagattcctcacacggacggacactttcacccttctcccctcatgggcggatttggattgaagcaccctcccccacagattctcatcaagaataccccggtacctgcgaatccttcgaccaccttcagtgcggcaaagtttgcttccttcatcacacagtattccacgggacaggtcagcgtggagatagagtgggagctgcagaaggagaacagcaaacgctggaaccccgagatccagtatacttccaactacaacaaatctgttaatgtggactttactgtggacactaatggtgtgtattcagagcctcgccccattggcaccagatacctgactcgtaatctgtaa

SEQ ID NO: 3573 - DNA, 2208 bp, Artificial Sequence
  Description of Artificial Sequence: Synthetic polynucleotide
atggctgccgatggttatcttccagattggctcgaggacactctctctgaaggaataagacagtggtggaagctcaaacctggcccaccaccgccaaagcccgcagagcggcataaggacgacagcaggggtcttgtgcttcctgggtacaagtacctcggacccttcaacggactcgacaagggggagccggtcaacgaggcagacgccgcggccctcgagcacgacaaggcctacgaccggcagctcgacagcggagacaacccgtacctcaagtacaaccacgccgacgcggagtttcaggagcgtcttaaagaagatacgtcttttgggggcaacctcggacgagcagtcttccaggcgaaaaagagggttcttgaacctctgggcctggttgaggaacctgttaagacggctccgggaaaaaagaggccggtagagcactctcctgtggagccagactcctcctcgggaaccggaaaggcgggccagcagcctgcaagaaaaagattgaatttcggtcagactggaggcgcagactccgtacctgacccccagcctctcggacagccaccagcagccccctctggtctgggaactaatacgatggctacaggcagtggcgcaccaatggcagacaataacgagggcgccgacggagtgggtaattcctcgggaaattggcattgcgattccacatggatgggcgacagagtcatcaccaccagcacccgcacctgggctctgcccacctacaacaaccatctgtacaagcaaatttccagccaatcaggagcatcgaacgacaaccactactttggctacagcaccccctgggggtattttgacttcaacagattccactgccacttttcgccacgtgactggcaaagactcatcaacaacaactggggattccggcccaagagactcagcttcaagctctttaacattcaagtcaaggaggtcacgcagaatgacggtacgacgacgattgccaataaccttaccagcacggttcaggtctttactgactcggagtaccagctcccgtacgtcctcggctcggcgcatcaaggatgcctcccgccgttcccagcagacgtcttcatggtgccacagtatggatacctcaccctgaacaacgggagtcaggcggtaggacgctcttcattttactgcctggagtacttcccttctcagatgcttcgcacgggaaacaactttaccttcagctacacctttgaggacgtgccttttcacagcagctacgctcacagccaaagtctggaccgtctcatgaatcctctcatcgaccaatacctgtattacttgagcaaaacaaacgctccaagcggaaccaccacgatgtccaggcttcagttttctcaggccggagcgagtgacattcgggaccagtctagaaactggcttcctggaccctgttaccgccagcagcgagtatcaaagacagctgcggacaacaacaacagtgattactcgtggactggagctaccaagtaccacctcaatggaagagactctctggtgaacccgggcccagctatggccagccacaaggatgatgaagaaaaatattttcctcagagcggggttctcatcttcgggaaacaaggctcaaataaaactaatgtggacattgaaaaggttatgattacagacgaagaggaaatcaggaccaccaatcccgtggctacggagcagtatggttctgtatctaccaaccttcaaagcggcaacacacaagcagctacctcagatgtcaacacacaaggcgttcttcctggcatggtctggcaggacagagatgtgtacctgcaggggcccatctgggcaaagattcctcacacggacggacactttcacccttctcccctcatgggcggatttggattgaagcaccctcccccacagattctcatcaagaataccccggtacctgcgaatccttcgaccaccttcagtgcggcaaagtttgcttccttcatcacacagtattccacgggacaggtcagcgtggagatagagtgggagctgcagaaggagaacagcaaacgctggaaccccgagatccagtatacttccaactacaacaaatctgttaatgtggactttactgtggacactaatggtgtgtattcagagcctcgccccattggcaccagatacctgactcgtaatctgtaa

SEQ ID NO: 3574 - DNA, 2208 bp, Artificial Sequence
  Description of Artificial Sequence: Synthetic polynucleotide
atggctgccgatggttatcttccagattggctcgaggacactctctctgaaggaataagacagtggtggaagctcaaacccggcccaccaccaccaaggcccgcagagcggcatcaggacgacagcaggggtcttgtgcttcctgggtacaagtacctcggacccttcaacggactcgacaaaggagagccggtcaacgaggcagacgctgcggccctcgagcacgacaaggcctacgaccggcagctcgacagcggagacaacccgtacctcaagtacaaccacgccgacgcggagtttcaggagcgtcttaaagaagatacgtcttttgggggcaacctcggacgagcagtcttccaggcgaaaaagagggttcttgaacctctgggcctggttgaggaacctgttaagacggctccgggaaaaaagaggccggtagagcactctcctgcggagccagactcctcctcgggaaccggaaaagcgggccagcagcctgcaagaaagagattgaatttcggtcagactggagacgcagactccgtacctgacccccagcctctcggacagccaccagcagcccccacaagtttgggatctactacaatggctacaggcagtggcgcaccaatggcagacaataacgagggtgccgatggagtgggtaattcctcaggaaattggcattgcgattcccaatggctgggcgacagagtcatcaccaccagcacccgaacctgggccctgcccacctacaacaaccacctctacaagcaaatctccagccaatcaggagcatcgaacgacaaccactactttggctacagcaccccttgggggtattttgacttcaacagattccactgtcacttctccccacgtgactggcaaagactcatcaacaacaactggggattccgacccaagagactcaacttcaagctctttaacattcaagtcaaagaggtcacgcagaatgacggtacgacgacgattgccaataaccttaccagcacggttcaggtgtttactgactcggagtaccagctcccgtacgtcctcggctcggcgcatcaaggatgcctcccgccgtttccagcggacgtcttcatggtcccacagtatggatacctcaccctgaacaacgggagtcaggcggtaggacgctcttccctttactgcctggagtactttccttctcagatgctgcgtaccggaaacaactttaccttcagctacacctttgaggacgtgcccttccacagcagctacgctcacagccagagtttggaccggctgatgaatcctctgatcgaccagtatctgtattatctgaacaggacacaatcaaatagtggaactcttcagcagtctaggctactgtttagccaagctggacccaccagcatgtcccttcaagctaaaaactggctgcctggaccttgctacagacagcagcgtctgtcaaagcaggcaaacgacaacaacaacagcaactttccctggactgcggctacaaagtatcatctaaatggtcgggactcgttggttaatccaggaccagctatggccagccacaaagacgatgaagaaaagtttttccccatgcatggaaccctgatatttggtaaacaaggaacaaatgctaacgacgcggatttggaacatgtcatgattacagatgaagaagaaatcaggaccaccaatcccgtggctacagagcagtacggaaacgtgtcaaataatttgcaaaactcaaatactggtccaactacagaaaatgtcaatcaccagggagcgttacctggtatggtgtggcaggatcgagacgtgtacctgcagggacccatttgggccaagattcctcacaccgacggacactttcacccttctccactgatgggaggttttggactcaaacacccgcctcctcaaatcatgatcaaaaacactcctgttccagccaatcctcctacaaacttcagcgcggcaaagtttgcttccttcatcacacagtattccacgggacaggtcagcgtggagatcgagtgggagctgcagaaggagaacagcaaacgctggaaccccgagatccagtacacttccaactacaacaaatctgttaatgtggactttactgtggacgctaatggtgtgtattcagagcctcgccccattggcaccagatacctgactcgtaatctgtaa

SEQ ID NO: 3575 - DNA, 2208 bp, Artificial Sequence
  Description of Artificial Sequence: Synthetic polynucleotide
atggctgccgatggttatcttccagattggctcgaggacactctctctgaaggaataagacagtggtggaagctcaaacctggcccaccaccaccaaggcccgcagagcggcatcaggacgacagcaggggtcttgtgcttcctgggtacaagtacctcggacccttcaacggactcgacaaaggagagccggtcaacgaggcagacgctgcggccctcgagcacgacaaggcctacgaccggcagctcgacagcggagacaacccgtacctcaagtacaaccacgccgacgcggagtttcaggagcgtcttaaagaagatacgtcttttgggggcaacctcggacgagcagtcttccaggcgaaaaagagggttcttgaacctctgggcctggttgaggaacctgttaagacggctccgggaaaaaagaggccggtagagcactctcctgcggagccagactcctcctcgggaaccggaaaagcgggccagcagcctgcaagaaagagattgaatttcggtcagactggagacgcagactccgtacctgacccccagcctctcggacagccaccagcagcccccacaagtttgggatctactacaatggctacaggcagtggcgcaccaatggcagacaataacgagggtgccgatggagtgggtaattcctcaggaaattggcattgcgatccccaatggctgggcgacagagtcatcaccaccagcacccgaacctgggccctgcccacctacaacaaccacctctacaagcaaatctccagccaatcaggagcatcgaacgacaaccactactttggctacagcaccccttgggggtattttgacttcaacagattccactgtcacttctccccacgtgactggcaaagactcatcaacaacaactggggattccgacccaagagactcaacttcaagctctttaacattcaagtcaaagaggtcacgcagaatgacggtacgacgacgattgccaataaccttaccagcacggttcaggtgtttactgactcggagtaccagctcccgtacgtcctcggctcggcgcatcaaggatgcctcccgccgtttccagcggacgtcttcatggtcccacagtatggatacctcaccctgaacaacgggagtcaggcggtaggacgctcttccttttactgcctggagtactttccttctcagatgctgcgtaccggaaacaactttaccttcagctacacctttgaggacgtgcccttccacagcagctacgctcacagccagagtttggaccggctgatgaatcctctgatcgaccagtatctgtattatctgaacaggacacaatcaaatagtggaactcttcagcagtctaggctactgtttagccaagctggacccaccagcatgtcccttcaagctaaaaactggctgcctggaccttgctacagacagcagcgtctgtcaaagcaggcaaacgacaacaacaacagcaactttccctggactgcggctacaaagtatcatctaaatggtcgggactcgttggttaatccaggaccagctatggccagccacaaagacgatgaagaaaagtttttccccatgcatggaaccctgatatttggtaaacaaggaacaaatgctaacgacgcggatttggaacatgtcatgattacagatgaagaagaaatcaggaccaccaatcccgtggctacagagcagtacggaaacgtgtcaaataatttgcaaaactcaaatactggtccaactacagaaaatgtcaatcaccagggagcgttacctggtatggtgtggcaggatcgagacgtgtacctgcagggacccatttgggccaagattcctcacaccgacggacactttcacccttctccactgatgggaggttttggactcaaacacccgcctcctcaaatcatgatcaaaaacactcctgttccagccaatcctcctacaaacttcagcgcggcaaagtttgcttccttcatcacacagtattccacgggacaggtcagcgtggagatcgagtgggagctgcagaaggagaacagcaaacgctggaaccccgagatccagtacacttccaactacaacaaatctgttaatgtggactttactgtggacgctaatggtgtgtattcagagcctcgccccattggcaccagatacctgactcgtaatctgtaa

SEQ ID NO: 3576 - DNA, 2208 bp, Artificial Sequence
  Description of Artificial Sequence: Synthetic polynucleotide
atggctgccgatggttatcttccagattggctcgaggacactctctctgaaggaataagacagtggtggaagctcaaacctggcccaccaccaccaaggcccgcagagcggcatcaggacgacagcaggggtcttgtgcttcctgggtacaagtacctcggacccttcaacggactcgacaaaggagagccggtcaacgaggcagacgctgcggccctcgagcacgacaaggcctacgaccggcagctcgacagcggagacaacccgtacctcaagtacaaccacgccgacgcggagtttcaggagcgtcttaaagaagatacgtcttttgggggcaacctcggacgagcagtctcccaggcgaaaaagagggttcttgaacctctgggcctggttgaggaacctgttaagacggctccgggaaaaaagaggccggtagagcactctcctgcggagccagactcctcctcgggaaccggaaaagcgggccagcagcctgcaagaaagagattgaatttcggtcagactggagacgcagactccgtacctgacccccagcctctcggacagccaccagcagcccccacaagtttgggatctactacaatggctacaggcagtggcgcaccaatggcagacaataacgagggtgccgatggagtgggtaattcctcaggaaattggcattgcgattcccaatggctgggcgacagagtcatcaccaccagcacccgaacctgggccctgcccacctacaacaaccacctctacaagcaaatctccagccaatcaggagcatcgaacgacaaccactactttggctacagcaccccttgggggtattttgacttcaacagattccactgtcacttctccccacgtgactggcaaagactcatcaacaacaactggggattccgacccaagagactcaacttcaagctctttaacattcaagtcaaagaggtcacgcagaatgacggtacgacgacgattgccaataaccttaccagcacggttcaggtgtttactgactcggagtaccagctcccgtacgtcctcggctcggcgcatcaaggatgcctcccgccgtttccagcggacgtcttcatggtcccacagtatggatacctcaccctgaacaacgggagtcaggcggtaggacgctcttccttttactgcctggagtactttccttctcagatgctgcgtaccggaaacaactttaccttcagctacacctttgaggacgtgcccttccacagcagctacgctcacagccagagtttggaccggctgatgaatcctctgatcgaccagtatctgtattatctgaacaggacacaatcaaatagtggaactcttcagcagtctaggctactgtttagccaagctggacccaccagcatgtcccttcaagctaaaaactggctgcctggaccttgctacagacagcagcgtctgtcaaagcaggcaaacgacaacaacaacagcaactttccctggactgcggctacaaagtatcatctaaatggtcgggactcgttggttaatccaggaccagctatggccagccacaaagacgatgaagaaaagtttttccccatgcatggaaccctgatatttggtaaacaaggaacaaatgctaacgacgcggatttggaacatgtcatgattacagatgaagaagaaatcaggaccaccaatcccgtggctacagagcagtacggaaacgtgtcaaataatttgcaaaactcaaatactggtccaactacagaaaatgtcaatcaccagggagcgttacctggtatggtgtggcaggatcgagacgtgtacctgcagggacccatttgggccaagattcctcacaccgacggacactttcacccttctccactgatgggaggttttggactcaaacacccgcctcctcaaatcatgatcaaaaacactcctgttccagccaatcctcctacaaacttcagcgcggcaaagtttgcttccttcatcacacagtattccacgggacaggtcagcgtggagatcgagtgggagctgcagaaggagaacagcaaacgctggaaccccgagatccagtacacttccaactacaacaaatctgttaatgtggactttactgtggacgctaatggtgtgtattcagagcctcgccccattggcaccagatacctgactcgtaatctgtaa

SEQ ID NO: 3577 - DNA, 2208 bp, Artificial Sequence
  Description of Artificial Sequence: Synthetic polynucleotide
atggctgccgatggttatcttccagattggctcgaggacactctctctgaaggaataagacagtggtggaagctcaaacctggcccaccaccaccaaggcccgcagagcggcatcaggacgacagcaggggtcttgtgcttcctgggtacaagtacctcggacccttcaacggactcgacaaaggagagccggtcaacgaggcagacgctgcggccctcgagcacgacaaggcctacgaccggcagctcgacagcggagacaacccgtacctcaagtacaaccacgccgacgcggagtttcaggagcgtcttaaagaagatacgtcttttgggggcaacctcggacgagcagtcttccaggcgaaaaagagggttcttgaacctctgggcctggttgaggaacctgttaagacggctccgggaaaaaagaggccggtagagcactctcctgcggagccagactcctcctcgggaaccggaaaagcgggccagcagcctgcaagaaagagattgaatttcggtcagactggagacgcagactccgtacctgacccccagcctctcggacagccaccagcagcccccacaagtttgggatctactacaatggctacaggcagtggcgcaccaatggcagacaataacgagggtgccgatggagtgggtaattcctcaggaaattggcattgcgattcccaatggctgggcgacagagtcatcaccaccagcacccgaacctgggccctgcccacctacaacaaccacctctacaagcaaatctccagccaatcaggagcatcgaacgacaaccactactttggctacagcaccccttgggggtattttgacttcaacagattccactgtcacttctccccacgtgactggcaaagactcatcaacaacaactggggattccgacccaagagactcaacttcaagctctttaacattcaagtcaaagaggtcacgcagaatgacggtacgacgacgattgccaataaccttaccagcacggttcaggtgtttactgactcggagtaccagctcccgtacgtcctcggctcggcgcatcaaggatgcctcccgccgtttccagcggacgtcttcatggtcccacagtatggatacctcaccctgaacaacgggagtcaggcggtaggacgctcttccttttactgcctggagtactttccttctcagatgctgcgtaccggaaacaactttaccttcagctacacctttgaggacgtgcccttccacagcagctacgctcacagccagagtttggaccggctgatgagtcctctgatcgaccagtatctgtattatctgaacaggacacaatcaaatagtggaactcttcagcagtctaggctactgtttagccaagctggacccaccagcatgtcccttcaagctaaaaactggctgcctggaccttgctacagacagcagcgtctgtcaaagcaggcaaacgacaacaacaacagcaactttccctggactgcggctacaaagtatcatctaaatggtcgggactcgttggttaatccaggaccagctatggccagccacaaagacgatgaagaaaagtttttccccatgcatggaaccctgatatttggtaaacaaggaacaaatgctaacgacgcggatttggaacatgtcatgattacagatgaagaagaaatcaggaccaccaatcccgtggctacagagcagtacggaaacgtgtcaaataatttgcaaaactcaaatactggtccaactacagaaaatgtcaatcaccagggagcgttacctggtatggtgtggcaggatcgagacgtgtacctgcagggacccatttgggccaagattcctcacaccgacggacactttcacccttctccactgatgggaggttttggactcaaacacccgcctcctcaaatcatgatcaaaaacactcctgttccagccaatcctcctacaaacttcagcgcggcaaagtttgcttccttcatcacacagtattccacgggacaggtcagcgtggagatcgagtgggagctgcagaaggagaacagcaaacgctggaaccccgagatccagtacacttccaactacaacaaatctgttaatgtggactttactgtggacgctaatggtgtgtattcagagcctcgccccattggcaccagatacctgactcgtaatctgtaa

SEQ ID NO: 3578 - DNA, 2208 bp, Artificial Sequence
  Description of Artificial Sequence: Synthetic polynucleotide
atggctgccgatggttatcttccagattggctcgaggacactctctctgaaggaataagacagtggtggaagctcaaacctggcccaccaccaccaaggcccgcagagcggcatcaggacgacagcaggggtcttgtgcttcctgggtacaagtacctcggacccttcaacggactcgacaaaggagagccggtcaacgaggcagacgctgcggccctcgagcacgacaaggcctacgaccggcagctcgacagcggagacaacccgtacctcaagtacaaccacgccgacgcggagtttcaggagcgtcttaaagaagatacgtcttttgggggcaacctcggacgagcagtcttccaggcgaaaaagagggttcttgaacctctgggcctggttgaggaacctgttaagacggctccgggaaaaaagaggccggtagagcactctcctgcggagccagactcctcctcgggaaccggaaaagcgggccagcagcctgcaagaaagagattgaatttcggtcagactggagacgcagactccgtacctgacccccagcctctcggacagccaccagcagcccccacaagtttgggatctactacaatggctacaggcagtggcgcaccaatggcaggcaataacgagggtgccgatggagtgggtaattcctcaggaaattggcattgcgattcccaatggctgggcgacagagtcatcaccaccagcacccgaacctgggccctgcccacctacaacaaccacctctacaagcaaatctccagccaatcaggagcatcgaacgacaaccactactttggctacagcaccccttgggggtattttgacttcaacagattccactgtcacttctccccacgtgactggcaaagactcatcaacaacaactggggattccgacccaagagactcaacttcaagctctttaacattcaagtcaaagaggtcacgcagaatgacggtacgacgacgattgccaataaccttaccagcacggttcaggtgtttactgactcggagtaccagctcccgtacgtcctcggctcggcgcatcaaggatgcctcccgccgtttccagcggacgtcttcatggtcccacagtatggatacctcaccctgaacaacgggagtcaggcggtaggacgctcttccttttactgcctggagtactttccttctcagatgctgcgtaccggaaacaactttaccttcagctacacctttgaggacgtgcccttccacagcagctacgctcacagccagagtttggaccggctgatgaatcctctgatcgaccagtatctgtattatctgaacaggacacaatcaaatagtggaactcttcagcagtctaggctactgtttagccaagctggacccaccagcatgtcccttcaagctaaaaactggctgcctggaccttgctacagacagcagcgtctgtcaaagcaggcaaacgacaacaacaacagcaactttccctggactgcggctacaaagtatcatctaaatggtcgggactcgttggttaatccaggaccagctatggccagccacaaagacgatgaagaaaagtttttccccatgcatggaaccctgatatttggtaaacaaggaacaaatgctaacgacgcggatttggaacatgtcatgattacagatgaagaagaaatcaggaccaccaatcccgtggctacagagcagtacggaaacgtgtcaaataatttgcaaaactcaaatactggtccaactacagaaaatgtcaatcaccagggagcgttacctggtatggtgtggcaggatcgagacgtgtacctgcagggacccatttgggccaagattcctcacaccgacggacactttcacccttctccactgatgggaggttttggactcaaacacccgcctcctcaaatcatgatcaaaaacactcctgttccagccaatcctcctacaaacttcagcgcggcaaagtttgcttccttcatcacacagtattccacgggacaggtcagcgtggagatcgagtgggagctgcagaaggagaacagcaaacgctggaaccccgagatccagtacacttccaactacaacaaatctgttaatgtggactttactgtggacgctaatggtgtgtattcagagcctcgccccattggcaccagatacctgactcgtaatctgtaa

SEQ ID NO: 3579 - DNA, 2208 bp, Artificial Sequence
  Description of Artificial Sequence: Synthetic polynucleotide
atggctgccgatggttatcttccagattggctcgaggacactctctctgaaggaataagacagtggtggaagctcaaacctggcccaccaccaccaaggcccgcagagcggcatcaggacgacagcaggggtcttgtgcttcctgggtacaagtacctcggacccttcaacggactcgacaaaggagagccggtcaacgaggcagacgctgcggccctcgagcacgacaaggcctacgaccggcagctcgacagcggagacaacccgtacctcaagtacaaccacgccgacgcggagtttcaggagcgtcttaaagaagatacgtcttttgggggcaacctcggacgagcagtcttccaggcgaaaaagagggttcttgaacctctgggcctggttgaggaacctgttaagacggctccgggaaaaaagaggccggtagagcactctcctgcggagccagactcctcctcgggaaccggaaaagcgggccagcagcctgcaagaaagagattgaatttcggtcagactggagacgcagactccgtacctgacccccagcctctcggacagccaccagcagcccccacaagtttgggatctactacaatggctacaggcagtggcgcaccaatggcagacagtaacgagggtgccgatggagtgggtaattcctcaggaaattggcattgcgattcccaatggctgggcgacagagtcatcaccaccagcacccgaacctgggccctgcccacctacaacaaccacctctacaagcaaatctccagccaatcaggagcatcgaacgacaaccactactttggctacagcaccccttgggggtattttgacttcaacagattccactgtcacttctccccacgtgactggcaaagactcatcaacaacaactggggattccgacccaagagactcaacttcaagctctttaacattcaagtcaaagaggtcacgcagaatgacggtacgacgacgattgccaataaccttaccagcacggttcaggtgtttactgactcggagtaccagctcccgtacgtcctcggctcggcgcatcaaggatgcctcccgccgtttccagcggacgtcttcatggtcccacagtatggatacctcaccctgaacaacgggagtcaggcggtaggacgctcttccttttactgcctggagtactttccttctcagatgctgcgtaccggaaacaactttaccttcagctacacctttgaggacgtgcccttccacagcagctacgctcacagccagagtttggaccggctgatgaatcctctgatcgaccagtatctgtattatctgaacaggacacaatcaaatagtggaactcttcagcagtctaggctactgtttagccaagctggacccaccagcatgtcccttcaagctaaaaactggctgcctggaccttgctacagacagcagcgtctgtcaaagcaggcaaacgacaacaacaacagcaactttccctggactgcggctacaaagtatcatctaaatggtcgggactcgttggttaatccaggaccagctatggccagccacaaagacgatgaagaaaagtttttccccatgcatggaaccctgatatttggtaaacaaggaacaaatgctaacgacgcggatttggaacatgtcatgattacagatgaagaagaaatcaggaccaccaatcccgtggctacagagcagtacggaaacgtgtcaaataatttgcaaaactcaaatactggtccaactacagaaaatgtcaatcaccagggagcgttacctggtatggtgtggcaggatcgagacgtgtacctgcagggacccatttgggccaagattcctcacaccgacggacactttcacccttctccactgatgggaggttttggactcaaacacccgcctcctcaaatcatgatcaaaaacactcctgttccagccaatcctcctacaaacttcagcgcggcaaagtttgcttccttcatcacacagtattccacgggacaggtcagcgtggagatcgagtgggagctgcagaaggagaacagcaaacgctggaaccccgagatccagtacacttccaactacaacaaatctgttaatgtggactttactgtggacgctaatggtgtgtattcagagcctcgccccattggcaccagatacctgactcgtaatctgtaa

SEQ ID NO: 3580 - DNA, 2208 bp, Artificial Sequence
  Description of Artificial Sequence: Synthetic polynucleotide
atggctgccgatggttatcttccagattggctcgaggacactctctctgaaggaataagacagtggtggaagctcaaacctggcccaccaccaccaaggcccgcagagcggcatcaggacgacagcaggggtcttgtgcttcctgggtacaagtacctcggacccttcaacggactcgacaaaggagagccggtcaacgaggcagacgctgcggccctcgagcacgacaaggcctacgaccggcagctcgacagcggagacaacccgtacctcaagtacaaccacgccgacgcggagtttcaggagcgtcttaaagaagatacgtcttttgggggcaacctcggacgagcagtcttccaggcgaaaaagagggttcttgaacctctgggcctggttgaggaacctgttaagacggctccgggaaaaaagaggccggtagagcactctcctgcggagccagactcctcctcgggaaccggaaaagcgggccagcagcctgcaagaaagagattgaatttcggtcagactggagacgcagactccgtacctgacccccagcctctcggacagccaccagcagcccccacaagtttgggatctactacaatggctacaggcagtggcgcaccaatggcagacaataacgagggtgccgatggagtgggtaattcctcaggaaattggcattgcgattcccaatggctgggcgacagagtcatcaccaccagcacccgaacctgggccctgcccacctacaacaaccaccactacaagcaaatctccagccaatcaggagcatcgaacgacaaccactactttggctacagcaccccttgggggtattttgacttcaacagattccactgtcacttctccccacgtgactggcaaagactcatcaacaacaactggggattccgacccaagagactcaacttcaagctctttaacattcaagtcaaagaggtcacgcagaatgacggtacgacgacgattgccaataaccttaccagcacggttcaggtgtttactgactcggagtaccagctcccgtacgtcctcggctcggcgcatcaaggatgcctcccgccgtttccagcggacgtcttcatggtcccacagtatggatacctcaccctgaacaacgggagtcaggcggtaggacgctcttccttttactgcctggagtactttccttctcagatgctgcgtaccggaaacaactttaccttcagctacacctttgaggacgtgcccttccacagcagctacgctcacagccagagtttggaccggctgatgaatcctctgatcgaccagtatctgtattatctgaacaggacacaatcaaatagtggaactcttcagcagtctaggctactgtttagccaagctggacccaccagcatgtcccttcaagctaaaaactggctgcctggaccttgctacagacagcagcgtctgtcaaagcaggcaaacgacaacaacaacagcaactttccctggactgcggctacaaagtatcatctaaatggtcgggactcgttggttaatccaggaccagctatggccagccacaaagacgatgaagaaaagtttttccccatgcatggaaccctgatatttggtaaacaaggaacaaatgctaacgacgcggatttggaacatgtcatgattacagatgaagaagaaatcaggaccaccaatcccgtggctacagagcagtacggaaacgtgtcaaataatttgcaaaactcaaatactggtccaactacagaaaatgtcaatcaccagggagcgttacctggtatggtgtggcaggatcgagacgtgtacctgcagggacccatttgggccaagattcctcacaccgacggacactttcacccttctccactgatgggaggttttggactcaaacacccgcctcctcaaatcatgatcaaaaacactcctgttccagccaatcctcctacaaacttcagcgcggcaaagtttgcttccttcatcacacagtattccacgggacaggtcagcgtggagatcgagtgggagctgcagaaggagaacagcaaacgctggaaccccgagatccagtacacttccaactacaacaaatctgttaatgtggactttactgtggacgctaatggtgtgtattcagagcctcgccccattggcaccagatacctgactcgtaatctgtaa

SEQ ID NO: 3581 - DNA, 2208 bp, Artificial Sequence
  Description of Artificial Sequence: Synthetic polynucleotide
atggctgccgatggttatcttccagattggctcgaggacactctctctgaaggaataagacagtggtggaagctcaaacctggcccaccaccaccaaggcccgcagagcggcatcaggacgacagcaggggtcttgtgcttcctgggtacaagtacctcggacccttcaacggactcgacaaaggagagccggtcaacgaggcagacgctgcggccctcgagcacgacaaggcctacgaccggcagctcgacagcggagacaacccgtacctcaagtacaaccacgccgacgcggagtttcaggagcgtcttaaagaagatacgtcttttgggggcaacctcggacgagcagtcttccaggcgaaaaagagggttcttgaacctctgggcctggttgaggaacctgtgaagacggctccgggaaaaaagaggccggtagagcactctcctgcggagccagactcctcctcgggaaccggaaaagcgggccagcagcctgcaagaaagagattgaatttcggtcagactggagacgcagactccgtacctgacccccagcctctcggacagccaccagcagcccccacaagtttgggatctactacaatggctacaggcagtggcgcaccaatggcagacaataacgagggtgccgatggagtgggtaattcctcaggaaattggcattgcgattcccaatggctgggcgacagagtcatcaccaccagcacccgaacctgggccctgcccacctacaacaaccacctctacaagcaaatctccagccaatcaggagcatcgaacgacaaccactactttggctacagcaccccttgggggtattttgacttcaacagattccactgtcacttctccccacgtgactggcaaagactcatcaacaacaactggggattccgacccaagagactcaacttcaagctctttaacattcaagtcaaagaggtcacgcagaatgacggtacgacgacgattgccaataaccttaccagcacggttcgggtgtttactgactcggagtaccagctcccgtacgtcctcggctcggcgcatcaaggatgcctcccgccgtttccagcggacgtcttcatggtcccacagtatggatacctcaccctgaacaacgggagtcaggcggtaggacgctcttccttttactgcctggagtactttccttctcagatgctgcgtaccggaaacaactttaccttcagctacacctttgaggacgtgcccttccacagcagctacgctcacagccagagtttggaccggctgatgaatcctctgatcgaccagtatctgtattatctgaacaggacacaatcaaatagtggaactcttcagcagtctaggctactgtttagccaagctggacccaccagcatgtcccttcaagctaaaaactggctgcctggaccttgctacagacagcagcgtctgtcaaagcaggcaaacgacaacaacaacagcaactttccctggactgcggctacaaagtatcatctaaatggtcgggactcgttggttaatccaggaccagctatggccagccacaaagacgatgaagaaaagtttttccccatgcatggaaccctgatatttggtaaacaaggaacaaatgctaacgacgcggatttggaacatgtcatgattacagatgaagaagaaatcaggaccaccaatcccgtggctacagagcagtacggaaacgtgtcaaataatttgcaaaactcaaatactggtccaactacagaaaatgtcaatcaccagggagcgttacctggtatggtgtggcaggatcgagacgtgtacctgcagggacccatttgggccaagattcctcacaccgacggacactttcacccttctccactgatgggaggttttggactcaaacacccgcctcctcaaatcatgatcaaaaacactcctgttccagccaatcctcctacaaacttcagcgcggcaaagtttgcttccttcatcacacagtattccacgggacaggtcagcgtggagatcgagagggagctgcagaaggagaacagcaaacgctggaaccccgagatccagtacacttccaactacaacaagtctgttaatgtggactttactgtggacgctaatggtgtgtattcagagcctcgccccattggcaccagatacctgactcgtaatctgtaa

SEQ ID NO: 3582 - DNA, 2208 bp, Artificial Sequence
  Description of Artificial Sequence: Synthetic polynucleotide
atggctgccgatggttatcttccagattggctcgaggacactctctctgaaggaataagacagtggtggaagctcaaacctggcccaccaccaccaaggcccgcagagcggcatcaggacgacagcaggggtcttgtgcttcctgggtacaagtacctcggacccttcaacggactcgacaaaggagagccggtcaacgaggcagacgctgcggccctcgagcacgacaaggcctacgaccggcagctcgacagcggagacaacccgtacctcaagtacaaccacgccgacgcggagtttcaggagcgtcttaaagaagatacgtcttttgggggcaacctcggacgagcagtcttccaggcgaaaaagagggttcttgaacctctgggcctggttgaggaacctgttaagacggctccgggaaaaaagaggccggtagagcactctcctgcggagccagactcctcctcgggaaccggaaaagcgggccagcagcctgcaagaaagagattgaatttcggtcagactggagacgcagactccgtacctgacccccagcctctcggacagccaccagcagcccccacaagtttgggatctactacaatggctacaggcagtggcgcaccaatggcagacaataacgagggtgccgatggagtgggtaattcctcaggaaattggcattgcgattcccaatggctgggcgacagagtcatcaccaccagcacccgaacctgggccctgcccacctacaacaaccacctctacaagcaaatctccagccaatcaggagcatcgaacgacaaccactactttggctacagcaccccttgggggtattttgacttcaacagattccactgtcacttctccccacgtgactggcaaagactcatcaacaacaactggggattccgacccaagagactcaacttcaagctctttaacattcaagtcaaagaggtcacgcagaatgacggtacgacgacgattgccaataaccttaccagcacggttcaggtgtttactgactcggagtaccagctcccgtacgtcctcggctcggcgcatcaaggatgcctcccgccgtttccagcggacgtcttcatggtcccacagtatggatacctcaccctgaacaacgggagtcaggcggtaggacgctcttccttttactgcctggagtactttccttctcagatgctgcgtaccggaaacaactttaccttcagctacacctttgaggacgtgccctcccacagcagctacgctcacagccagagtttggaccggctgatgaatcctctgatcgaccagtatctgtattatctgaacaggacacaatcaaatagtggaactcttcagcagtctaggctactgtttagccaagctggacccaccagcatgtcccttcaagctaaaaactggctgcctggaccttgctacagacagcagcgtctgtcaaagcaggcaaacgacaacaacaacagcaactttccctggactgcggctacaaagtatcatctaaatggtcgggactcgttggttaatccaggaccagctatggccagccacaaagacgatgaagaaaagttcttccccatgcatggaaccctgatatttggtaaacaaggaacaaatgctaacgacgcggatttggaacatgtcatgattacagatgaagaagaaatcaggaccaccaatcccgtggctacagagcagtacggaaacgtgtcaaataatttgcaaaactcaaatactggtccaactacagaaaatgtcaatcaccagggagcgttacctggtatggtgtggcaggatcgagacgtgtacctgcagggacccatttgggccaagattcctcacaccgacggacactttcacccttctccactgatgggaggttttggactcaaacacccgcctcctcaaatcatgatcaaaaacactcctgttccagccaatcctcctacaaacttcagcgcggcaaagtttgcttccttcatcacacagtattccacgggacaggtcagcgtggagatcgagtgggagctgcagaaggagaacagcaaacgctggaaccccgagatccagtacacttccaactacaacaaatctgttaatgtggactttactgtggacgctaatggtgtgtattcagagcctcgccccattggcaccagatacctgactcgtaatctgtaa

SEQ ID NO: 3583 - DNA, 2208 bp, Artificial Sequence
  Description of Artificial Sequence: Synthetic polynucleotide
atggctgccgatggttatcttccagattggctcgaggacactctctctgaaggaataagacagtggtggaagctcaaacctggcccaccaccaccaaggcccgcagagcggcatcaggacgacagcaggggtcttgtgcttcctgggtacaagtacctcggacccttcaacggactcgacaaaggagagccggtcaacgaggcagacgctgcggccctcgagcacgacaaggcctacgaccggcagctcgacagcggagacaacccgtacctcaagtacaaccacgccgacgcggagtttcaggagcgtcttaaagaagatacgtcttttgggggcaacctcggacgagcagtcttccaggcgaaaaagagggttcttgaacctctgggcctggttgaggaacctgttaagacggctccgggaaaaaagaggccggtagagcactctcctgcggagccagactcctcctcgggaaccggaaaagcgggccagcggcctgcaagaaagagattgaatttcggtcagactggagacgcagactccgtacctgacccccagcctctcggacagccaccagcagcccccacaagtttgggatctactacaatggctacaggcagtggcgcaccaatggcagacaataacgagggtgccgatggagtgggtaattcctcaggaaattggcattgcgattcccaatggctgggcgacagagtcatcaccaccagcacccgaacctgggccctgcccacctacaacaaccacctctacaagcaaatctccagccaatcaggagcatcgaacgacaaccactactttggctacagcaccccttgggggtattttgacttcaacagattccactgtcacttctccccacgtgactggcaaagactcatcaacaacaactggggattccgacccaagagactcaacttcaagctctttaacattcaagtcaaagaggtcacgcagaatgacggtacgacgacgattgccaataaccttaccagcacggttcaggtgtttactgactcggagtaccagctcccgtacgtcctcggctcggcgcatcaaggatgcctcccgccgtttccagcggacgtcttcatggtcccacagtatggatacctcaccctgaacaacgggagtcaggcggtaggacgctcttccttttactgcctggagtactttccttctcagatgctgcgtaccggaaacaactttaccttcagctacacctttgaggacgtgcccttccacagcagctacgctcacagccagagtttggaccggctgatgaatcctctgatcgaccagtatctgtattatctgaacaggacacaatcaaatagtggaactcttcagcagtctaggctactgtttagccaagctggacccaccagcatgtcccttcaagctaaaaactggctgcctggaccttgctacagacagcagcgtctgtcaaagcaggcaaacgacaacaacaacagcaactttccctggactgcggctacaaagtatcatctaaatggtcgggactcgttggttaatccaggaccagctatggccagccacaaagacgatgaagaaaagtttttccccatgcatggaaccctgatatttggtaaacaaggaacaaatgctaacgacgcggatttggaacatgtcatgattacagatgaagaagaaatcaggaccaccaatcccgtggctacagagcagtacggaaacgtgtcaaataatttgcaaaactcaaatactggtccaactacagaaaatgtcaatcaccagggagcgttacctggtatggtgtggcaggatcgagacgtgtacctgcagggacccatttgggccaagattcctcacaccgacggacactttcacccttctccactgatgggaggttttggactcaaacacccgcctcctcaaatcatgatcaaaaacactcctgttccagccaatcctcctacaaacttcagcgcggcaaagtttgcttccttcatcacacagtattccacgggacaggtcagcgtggagatcgagtgggagctgcagaaggagaacagcaaacgctggaaccccgagatccagtacacttccaactacaacaaatctgttaatgtggactttactgtggacgctaatggtgtgtattcagagcctcgccccattggcaccagatacctgactcgtaatctgtaa

SEQ ID NO: 3584 - DNA, 2208 bp, Artificial Sequence
  Description of Artificial Sequence: Synthetic polynucleotide
atggctgccgatggttatcttccagattggctcgaggacactctctctgaaggaataagacagtggtggaagctcaaacctggcccaccaccgccaaagcccgcagagcggcataaggacgacagcaggggtcttgtgcttcctgggtacaagtacctcggacccttcaacggactcgacaaaggagagccggtcaacgaggcagacgccgcggccctcgagcacgacaaggcctacgaccggcagctcgacagcggagacaacccgtacctcaagtacaaccacgccgacgcggagtttcaggagcgccttaaagaagatacgtcttttgggggcaacctcgcaagagcagtattccaggcgaaaaagagggttcttgaacctctgggcctggttgaggagcctgttaagacggctccgggaaaaaagaggccggtagagcactctcctgcggagccagattcctcctccggaactggaaagtcgggccaacagcctgcaagaaagagattgaattttggtcagactggagacgcagactccgtacctgacccccagcctctcggacagccaccagcagccccctctggtctgggaactaatacgatggcttcaggcagtggcgcaccaatggcagacaataacgagggcgccgacggagtgggtaattcctcgggaaattggcattgcgattccacatggatgggcgacagagtcatcaccaccagcacccgcacctgggctctgcccacctacaacaaccatctgtacaagcaaatttccagccagtctggagcagcgaacgacaaccactactttggctacagcaccccttgggggtattttgacttcaacagattccactgccacttctccccacgtgactggcaaagactcatcaacaacaattggggattccggcccaaaagactcaacttcaagctctttaacattcaagtcaaggaggtcacgcagaatgacggtacgacgacgattgccaataaccttaccagcacggttcaggtgtttactgactcggagtaccagctcccgtacgtcctcggctcggcgcatcaaggatgcctcccgccgttcccagcagacgtcttcatggtgccacagtatggatacctcaccctgaacaacgggagtcaggcggtaggacgctcttcattttactgcctggagtactttccttctcagatgctgcgtaccggaaacaactttaccttcagctacacctttgaggacgtgcccttccacagcagctacgctcacagccagagtttggaccggctgatgaatcctctgatcgaccagtatctgtattatctgaacaggacacaatcaaatagtggaactcttcagcagtctaggctactgtttagccaagctggacccaccagcatgtcccttcaagctaaaaactggctgcctggaccttgctacagacagcagcgtctgtcaaagcaggcaaacgacaacaacaacagcaactttccctggactgcggctacaaagtatcatctaaatggtcgggactcgttggttaatccaggaccagctatggccagccacaaagacgatgaagaaaagtttttccccatgcatggaaccctgatatttggtaaacaaggaacaaatgctaacgacgcggatttggaacatgtcatgattacagatgaagaagaaatcaggaccaccaatcccgtggctacagagcagtacggaaacgtgtcaaataatttgcaaaactcaaatactggtccaactacagaaaatgtcaatcaccagggagcgttacctggtatggtgtggcaggatcgagacgtgtacctgcagggacccatttgggccaagattcctcacaccgacggacactttcacccttctccactgatgggaggttttggactcaaacacccgcctcctcaaatcatgatcaaaaacactcctgttccagccaatcctcctacaaacttcagcgcggcaaagtttgcttccttcatcacacagtattccacgggacaggtcagcgtggagatcgagtgggagctgcagaaggagaacagcaaacgctggaaccccgagatccagtacacttccaactacaacaaatctgttaatgtggactttactgtggacgctaatggtgtgtattcagagcctcgccccattggcaccagatacctgactcgtaatctgtaa

SEQ ID NO: 3585 - DNA, 2208 bp, Artificial Sequence
  Description of Artificial Sequence: Synthetic polynucleotide
atggctgccgatggttatcttccagattggctcgaggacactctctctgaaggaataagacagtggtggaagctcaaacctggcccaccaccaccaaggcccgcagagcggcatcaggacgacagcaggggtcttgtgcttcctgggtacaagtacctcggacccttcaacggactcgacaaaggagagccggtcaacgaggcagacgctgcggccctcgagcacgacaaggcctacgaccggcagctcgacagcggagacaacccgtacctcaagtacaaccacgccgacgcggagtttcaggagcgtcttaaagaagatacgtcttttgggggcaacctcggacgagcagtcttccaggcgaaaaagagggttcttgaacctctgggcctggttgaggaacctgttaagacggctccgggaaaaaagaggccggtagagcactctcctgcggagccagactcctcctcgggaaccggaaaagcgggccagcagcctgcaagaaagagattgaatttcggtcagactggagacgcagactccgtacctgacccccggcctctcggacagccaccagcagcccccacaagtttgggatctactacaatggctacaggcagtggcgcaccaatggcagacaataacgagggtgccgatggagtgggtaattcctcaggaaattggcattgcgattcccaatggctgggcgacagagtcatcaccaccagcacccgaacctgggccctgcccacctacaacaaccacctctacaagcaaatctccagccaatcaggagcatcgaacgacaaccactactttggctacagcaccccttgggggtattttgacttcaacagattccactgtcacttctccccacgtgactggcaaagactcatcaacaacaactggggattccgacccaagagactcaacttcaagctctttaacattcaagtcaaagaggtcacgcagaatgacggtacgacgacgattgccaataaccttaccagcacggttcaggtgtttactgactcggagtaccagctcccgtacgtcctcggctcggcgcatcaaggatgcctcccgccgtttccagcggacgtcttcatggtcccacagtatggatacctcaccctgaacaacgggagtcaggcggtaggacgctcttccttttactgcctggagtactttccttctcagatgctgcgtaccggaaacaactttaccttcagctacacctttgaggacgtgcccttccacagcagctacgctcacagccagagtttggaccggctgatgaatcctctgatcgaccagtatctgtattatctgaacaggacacaatcaaatagtggaactcttcagcagtctaggctactgtttagccaagctggacccaccagcatgtcccttcaagctaaaaactggctgcctggaccttgctacagacagcagcgtctgtcaaagcaggcaaacgacaacaacaacagcaactttccctggactgcggctacaaagtatcatctaaatggtcgggactcgttggttaatccaggaccagctatggccagccacaaagacgatgaagaaaagtttttccccatgcatggaaccctgatatttggtaaacaaggaacaaatgctaacgacgcggatttggaacatgtcatgattacagatgaagaagaaatcaggaccaccaatcccgtggctacagagcagtacggaaacgtgtcaaataatttgcaaaactcaaatactggtccaactacagaaaatgtcaatcaccagggagcgttacctggtatggtgtggcaggatcgagacgtgtacctgcagggacccatttgggccaagattcctcacaccgacggacactttcacccttctccactgatgggaggttttggactcaaacacccgcctcctcaaatcatgatcaaaaacactcctgttccagccaatcctcctacaaacttcagcgcggcaaagtttgcttccttcatcacacagtattccacgggacaggtcagcgtggagatcgagtgggagctgcagaaggagaacagcaaacgctggaaccccgagatccagtacacttccaactacaacaaatctgttaatgtggactttactgtggacgctaatggtgtgtattcagagcctcgccccattggcaccagatacctgactcgtaatctgtaa

SEQ ID NO: 3586 - DNA, 2208 bp, Artificial Sequence
  Description of Artificial Sequence: Synthetic polynucleotide
atggctgccgatggttatcttccagattggctcgaggacactctctctgaaggaataagacagtggtggaagctcaaacctggcccaccaccgccaaagcccgcagagcggcataaggacgacagcaggggtcttgtgcttcctgggtacaagtacctcggacccttcaacggactcgacaaaggagagccggtcaacgaggcagacgccgcggccctcgagcacgacaaggcctacgaccggcagctcgacagcggagacaacccgtacctcaagtacaaccacgccgacgcggagtttcaggagcgccttaaagaagatacgtcttttgggggcaacctcgcaagagcagtattccaggcgaaaaagagggttcttgaacctctgggcctggttgaggagcctgttaagacggctccgggaaaaaagaggccggtagagcactctcctgcggagccagattcctcctccggaactggaaagtcgggccaacagcctgcaagaaagagattgaatttcggtcagactggagacgcagactccgtacctgacccccagcctctcggacagccaccagcagcccccacaagtttgggatctactacaatggctacaggcagtggcgcaccaatggcagacaataacgagggtgccgatggagtgggtaattcctcaggaaattggcattgcgattcccaatggctgggcgacagagtcatcaccaccagcacccgaacctgggccctgcccacctacaacaaccacctctacaagcaaatctccagccaatcaggagcatcgaacgacaaccactactttggctacagcaccccttgggggtattttgacttcaacagattccactgtcacttctccccacgtgactggcaaagactcatcaacaacaactggggattccgacccaagagactcaacttcaagctctttaacattcaagtcaaagaggtcacgcagaatgacggtacgacgacgattgccaataaccttaccagcacggttcaggtgtttactgactcggagtaccagctcccgtacgtcctcggctcggcgcatcaaggatgcctcccgccgtttccagcggacgtcttcatggtcccacagtatggatacctcaccctgaacaacgggagtcaggcggtaggacgctcttccttttactgcctggagtactttccttctcagatgctgcgtaccggaaacaactttaccttcagctacacctttgaggacgtgcccttccacagcagctacgctcacagccagagtttggaccggctgatgaatcctctgatcgaccagtatctgtattatctgaacaggacacaatcaaatagtggaactcttcagcagtctaggctactgtttagccaagctggacccaccagcatgtcccttcaagctaaaaactggctgcctggaccttgctacagacagcagcgtctgtcaaagcaggcaaacgacaacaacaacagcaactttccctggactgcggctacaaagtatcatctaaatggtcgggactcgttggttaatccaggaccagctatggccagccacaaagacgatgaagaaaagtttttccccatgcatggaaccctgatatttggtaaacaaggaacaaatgctaacgacgcggatttggaacatgtcatgattacagatgaagaagaaatcaggaccaccaatcccgtggctacagagcagtacggaaacgtgtcaaataatttgcaaaactcaaatactggtccaactacagaaaatgtcaatcaccagggagcgttacctggtatggtgtggcaggatcgagacgtgtacctgcagggacccatttgggccaagattcctcacaccgacggacactttcacccttctccactgatgggaggttttggactcaaacacccgcctcctcaaatcatgatcaaaaacactcctgttccagccaatcctcctacaaacttcagcgcggcaaagtttgcttccttcatcacacagtattccacgggacaggtcagcgtggagatcgagtgggagctgcagaaggagaacagcaaacgctggaaccccgagatccagtacacttccaactacaacaaatctgttaatgtggactttactgtggacgctaatggtgtgtattcagagcctcgccccattggcaccagatacctgactcgtaatctgtaa

SEQ ID NO: 3587 - DNA, 2208 bp, Artificial Sequence
  Description of Artificial Sequence: Synthetic polynucleotide
atggctgccgatggttatcttccagattggctcgaggacactctctctgaaggaataagacagtggtggaagctcaaacctggcccaccaccaccaaggcccgcagagcggcatcaggacgacagcaggggtcttgtgcttcctgggtacaagtacctcggacccttcaacggactcgacaaaggagagccggtcaacgaggcagacgctgcggccctcgagcacgacaaggcctacgaccggcagctcgacagcggagacaacccgtacctcaagtacaaccacgccgacgcggagtttcaggagcgtcttaaagaagatacgtcttttgggggcaacctcggacgagcagtcttccaggcgaaaaagagggttcttgaacctctgggcctggttgaggaacctgttaagacggctccgggaaaaaagaggccggtagagcactctcctgcggagccagactcctcctcgggaaccggaaaagcgggccagcagcctgcaagaaagagattgaatttcggtcagactggagacgcagactccgtacctgacccccagcctctcggacagccaccagcagcccccacaagtttgggatctactacaatggctacaggcagtggcgcaccaatggcagacaataacgagggtgccgatggagtgggtaattcctcaggaaattggcattgcgattcccaatggctgggcgacagagtcatcaccaccagcacccgaacctgggccctgcccacctacaacaaccacctctacaagcaaatctccagccaatcaggagcatcgaacgacaaccactactttggctacagcaccccttgggggtattttgacttcaacagattccactgtcacttctccccacgtgactggcaaagactcatcaacaacaactggggattccgacccaagagactcaacttcaagctctttaacattcaagtcaaagaggtcacgcagaatgacggtacgacgacgattgccaataaccttaccagcacggttcgggtgtttactgactcggagtaccagctcccgtacgtcctcggctcggcgcatcaaggatgcctcccgccgtttccagcggacgtcttcatggtcccacagtatggatacctcaccctgaacaacgggagtcaggcggtaggacgctcttccttttactgcctggagtactttccttctcagatgctgcgtaccggaaacaactttaccttcagctacacctttgaggacgtgcccttccacagcagctacgctcacagccagagtttggaccggctgatgaatcctctgatcgaccagtatctgtattatctgaacaggacacaatcaaatagtggaactcttcagcagtctaggctactgtttagccaagctggacccaccagcatgtcccttcaagctaaaaactggctgcctggaccttgctacagacagcagcgtctgtcaaagcaggcaaacgacaacaacaacagcaactttccctggactgcggctacaaagtatcatctaaatggtcgggactcgttggttaatccaggaccagctatggccagccacaaagacgatgaagaaaagtttttccccatgcatggaaccctgatatttggtaaacaaggaacaaatgctaacgacgcggatttggaacatgtcatgattacagatgaagaagaaatcaggaccaccaatcccgtggctacagagcagtacggaaacgtgtcaaataatttgcaaaactcaaatactggtccaactacagaaaatgtcaatcaccagggagcgttacctggtatggtgtggcaggatcgagacgtgtacctgcagggacccatttgggccaagattcctcacaccgacggacactttcacccttctccactgatgggaggttttggactcaaacacccgcctcctcaaatcatgatcaaaaacactcctgttccagccaatcctcctacaaacttcagcgcggcaaagtttgcttccttcatcacacagtattccacgggacaggtcagcgtggagatcgagagggagctgcagaaggagaacagcaaacgctggaaccccgagatccagtacacttccaactacaacaagtctgttaatgtggactttactgtgggcgctaatggtgtgtattcagagcctcgccccattggcaccagatacctgactcgtaatctgtaa

SEQ ID NO: 3588 - DNA, 2208 bp, Artificial Sequence
  Description of Artificial Sequence: Synthetic polynucleotide
atggctgccgatggttatcttccagattggctcgaggacactctctctgaaggaataagacagtggtggaagctcaaacctggcccaccaccgccaaagcccgcagagcggcataaggacgacagcaggggtcttgtgcttcctgggtacaagtacctcggacccttcaacggactcgacaaaggagagccggtcaacgaggcagacgccgcggccctcgagcacgacaaggcctacgaccggcagctcgacagcggagacaacccgtacctcaagtacaaccacgccgacgcggagtttcaggagcgccttaaagaagatacgtcttttgggggcaacctcgcaagagcagtattccaggcgaaaaagagggttcttgaacctctgggcctggttgaggagcctgttaagacggctccgggaaaaaagaggccggtagagcactctcctgcggagccagattcctcctccggaactggaaagtcgggccaacagcctgcaagaaagagattgaattttggtcagactggagacgcagactccgtacctgacccccagcctctcggacagccaccagcagccccctctggtctgggaactaatacgatggcttcaggcagtggcgcaccaatggcagacaataacgagggcgccgacggagtgggtaattcctcaggaaattggcattgcgattcccaatggctgggcgacagagtcatcaccaccagcacccgaacctgggccctgcccacctacaacaaccacctctacaagcaaatctccagccaatcaggagcatcgaacgacaaccactactttggctacagcaccccttgggggtattttgacttcaacagattccactgtcacttctccccacgtgactggcaaagactcatcaacaacaactggggattccgacccaagagactcaacttcaagctctttaacattcaagtcaaagaggtcacgcagaatgacggtacgacgacgattgccaataaccttaccagcacggttcaggtgtttactgactcggagtaccagctcccgtacgtcctcggctcggcgcatcaaggatgcctcccgccgtttccagcggacgtcttcatggtcccacagtatggatacctcaccctgaacaacgggagtcaggcggtaggacgctcttccttttactgcctggagtactttccttctcagatgctgcgtaccggaaacaactttaccttcagctacacctttgaggacgtgcccttccacagcagctacgctcacagccagagtttggaccggctgatgaatcctctgatcgaccagtatctgtattatctgaacaggacacaatcaaatagtggaactcttcagcagtctaggctactgtttagccaagctggacccaccagcatgtcccttcaagctaaaaactggctgcctggaccttgctacagacagcagcgtctgtcaaagcaggcaaacgacaacaacaacagcaactttccctggactgcggctacaaagtatcatctaaatggtcgggactcgttggttaatccaggaccagctatggccagccacaaagacgatgaagaaaagtttttccccatgcatggaaccctgatatttggtaaacaaggaacaaatgctaacgacgcggatttggaacatgtcatgattacagatgaagaagaaatcaggaccaccaatcccgtggctacagagcagtacggaaacgtgtcaaataatttgcaaaactcaaatactggtccaactacagaaaatgtcaatcaccagggagcgttacctggtatggtgtggcaggatcgagacgtgtacctgcagggacccatttgggccaagattcctcacaccgacggacactttcacccttctccactgatgggaggttttggactcaaacacccgcctcctcaaatcatgatcaaaaacactcctgttccagccaatcctcctacaaacttcagcgcggcaaagtttgcttccttcatcacacagtattccacgggacaggtcagcgtggagatcgagtgggagctgcagaaggagaacagcaaacgctggaaccccgagatccagtacacttccaactacaacaaatctgttaatgtggactttactgtggacgctaatggtgtgtattcagagcctcgccccattggcaccagatacctgactcgtaatctgtaa

SEQ ID NO: 3589 - DNA, 2208 bp, Artificial Sequence
  Description of Artificial Sequence: Synthetic polynucleotide
atggctgccgatggttatcttccagattggctcgaggacactctctctgaaggaataagacagtggtggaagctcaaacctggcccaccaccaccaaggcccgcagagcggcatcaggacgacagcaggggtcttgtgcttcctgggtacaagtacctcggacccttcaacggactcgacaaaggagagccggtcaacgaggcagacgctgcggccctcgagcacgacaaggcctacgaccggcagctcgacagcggagacaacccgtacctcaagtacaaccacgccgacgcggagtttcaggagcgtcttaaagaagatacgtcttttgggggcaacctcggacgagcagtcttccaggcgaaaaagagggttcttgaacctctgggcctggttgaggaacctgttaagacggctccgggaaaaaagaggccggtagagcactctcctgcggagccagactcctcctcgggaaccggaaaagcgggccagcagcctgcaagaaagagattgaatttcggtcagactggagacgcagactccgtacctgacccccagcctctcggacagccaccagcagcccccacaagtttgggatctactacaatggctacaggcagtggcgcaccaatggcagacaataacgagggtgccgatggagtgggtaattcctcaggaaattggcattgcgattcccaatggctgggcgacagagtcatcaccaccagcacccgaacctgggccctgcccacctacaacaaccacctctacaagcaaatctccagccaatcaggagcatcgaacgacaaccactactttggctacagcaccccttgggggtattttgacttcaacagattccactgtcacttctccccacgtgactggcaaagactcatcaacaacaactggggattccgacccaagagactcaacttcaagctctttaacattcaagtcaaagaggtcacgcagaatgacggtacgacgacgattgccaataaccttaccagcacggttcaggtgtttactgactcggagtaccagctcccgtacgtcctcggctcggcgcatcaaggatgcctcccgccgtttccagcggacgtcttcatggtcccacagtatggatacctcaccctgaacaacgggagtcaggcggtaggacgctcttccttttactgcctggagtactttccttctcagatgctgcgtaccggaaacaactttaccttcagctacacctttgaggacgtgcccttccacagcagctacgctcacagccagagtttggaccggctgatgaatcctctgatcgaccagtatctgtattatctgaacaggacacaatcaaatagtggaactcttcagcagtctaggctactgtttagccaagctggacccaccagcatgtcccttcaagctaaaaactggctgcctggaccttgctacagacagcagcgtctgtcaaagcaggcaaacgacaacaacaacagcaactttccctggactgcggctacaaagtatcatctaaatggtcgggactcgttggttaatccaggaccagctatggccagccacaaagacgatgaagaaaagtttttccccatgcatggaaccctgatatttggtaaacaaggaacaaatgctaacgacgcggatttggaacatgtcatgattacagatgaagaagaaatcaggaccaccaatcccgtggctacagagcagtacggaaacgtgtcaaataatttgcaaaactcaaatactggtccaactacagaaaatgtcaatcaccagggagcgttacctggtatggtgtggcaggatcgagacgtgtacctgcagggacccatttgggccaagattcctcacaccgacggacactttcacccttctcctcttatgggaggatttggactgaagcaccctcccccgcagattctcatcaagaataccccggtacctgcgaatccttctaccaccttcagcgcggcaaagtttgcttccttcatcacacagtactccacggggcaggtcagcgtggagatcgagtgggagctgcagaaagagaacagcaaacgctggaaccccgagatccagtatacctccaactacaacaagtctgttaatgtggactttactgtggacactaatggcgtgtattcagagcctcgccccattggcacaagatacctgactcgtaatctgtaa

SEQ ID NO: 3590 - DNA, 2208 bp, Artificial Sequence
  Description of Artificial Sequence: Synthetic polynucleotide
atggctgccgatggttatcttccagattggctcgaggacactctctctgaaggaataagacagtggtggaagctcaaacctggcccaccaccaccaaggcccgcagagcggcatcaggacgacagcaggggtcttgtgcttcctgggtacaagtacctcggacccttcaacggactcgacaaaggagagccggtcaacgaggcagacgctgcggccctcgagcacgacaaggcctacgaccggcagctcgacagcggagacaacccgtacctcaagtacaaccacgccgacgcggagtttcaggagcgtcttaaagaagatacgtcttttgggggcaacctcggacgagcagtcttccaggcgaaaaagagggttcttgaacctctgggcctggttgaggaacctgttaagacggctccgggaaaaaagaggccggtagagcactctcctgcggagccagactcctcctcgggaaccggaaaagcgggccagcagcctgcaagaaagagattgaatttcggtcagactggagacgcagactccgtacctgacccccagcctctcggacagccaccagcagcccccacaagtttgggatctactacaatggctacaggcagtggcgcaccaatggcagacaataacgagggtgccgatggagtgggtaattcctcaggaaattggcattgcgattcccaatggctgggcgacagagtcatcaccaccagcacccgaacctgggccctgcccacctacaacaaccacctctacaagcaaatctccagccaatcaggagcatcgaacgacaaccactactttggctacagcaccccttgggggtattttgacttcaacagattccactgtcacttctccccacgtgactggcaaagactcatcaacaacaactggggattccgacccaagagactcaacttcaagctctttaacattcaagtcaaagaggtcacgcagaatgacggtacgacgacgattgccaataaccttaccagcacggttcaggtgtttactgactcggagtaccagctcccgtacgtcctcggctcggcgcatcaaggatgcctcccgccgtttccagcggacgtcttcatggtcccacagtatggatacctcaccctgaacaacgggagtcaggcggtaggacgctcttccttttactgcctggagtactttccttctcagatgctgcgtaccgggaacaactttaccttcagctacacctttgaggacgtgcccttccacagcagctacgctcacagccagagtttggaccggctgatgaatcctctgatcgaccagtatctgtattatctgaacaggacacaatcaaatagtggaactcttcagcagtctaggctactgtttagccaagctggacccaccagcatgtcccttcaagctaaaaactggctgcctggaccttgctacagacagcagcgtctgtcaaagcaggcaaacgacaacaacaacagcaactttccctggactgcggctacaaagtatcatctaaatggtcgggactcgtcggttaatccaggaccagctatggccagccacaaagacgatgaagaaaagtttttctccatgcatggaaccctgatatttggtaaacaaggaacaaatgctaacgacgcggatttggaacatgtcatgattacagatgaagaagaaatcaggaccaccaatcccgtggctacagagcagtacggaaacgtgtcaaataatttgcaaaactcaaatactggtccaactacagaaaatgtcaatcaccagggagcgttacctggtatggtgtggcaggatcgagacgtgtacctgcagggacccatttgggccaagattcctcacaccgacggacactttcacccttctccactgatgggaggttttggactcaaacacccgcctccccaaatcatgatcaaaaacactcctgttccagccaatcctcctacaaacttcagcgcggcaaagtttgcttccttcatcacacagtattccacgggacaggtcagcgtggagatcgagtgggagctgcagaaggagaacagcaaacgctggaaccccgagatccagtacacttccaactacaacaaatctgttaatgtggactttactgtggacgctaatggtgtgtattcagagcctcgccccattggcaccagatacctgactcgtaatctgtaa

SEQ ID NO: 3591 - DNA, 2208 bp, Artificial Sequence
  Description of Artificial Sequence: Synthetic polynucleotide
atggctgccgatggttatcttccagattggctcgaggacactctctctgaaggaataagacagtggtggaagctcaaacctggcccaccaccaccaaggcccgcagagcggcatcaggacgacagcaggggtcttgtgcttcctgggtacaagtacctcggacccttcaacggactcgacaaaggagagccggtcaacgaggcagacgctgcggccctcgagcacgacaaggcctacgaccggcagctcgacagcggagacaacccgtacctcaagtacaaccacgccgacgcggagtttcaggagcgtcttaaagaagatacgtcttttgggggcaacctcggacgagcagtcttccaggcgaaaaagagggttcttgaacctctgggcctggttgaggaacctgttaagacggctccgggaaaaaagaggccggtagagcactctcctgcggagccagactcctcctcgggaaccggaaaagcgggccagcagcctgcaagaaagagattgaatttcggtcagactggagacgcagactccgtacctgacccccagcctctcggacagccaccagcagcccccacaagtttgggatctactacaatggctacaggcagtggcgcaccaatggcagacaataacgagggtgccgatggagtgggtaattcctcaggaaattggcattgcgattcccaatggctgggcgacagagtcatcaccaccagcacccgaacctgggccctgcccacctacaacaaccacctctacaagcaaatctccagccaatcaggagcatcgaacgacaaccactactttggctacagcaccccttgggggtattttgacttcaacagattccactgtcacttctccccacgtgactggcaaagactcatcaacaacaactggggattccgacccaagagactcaacttcaagctctttaacattcaagtcaaagaggtcacgcagaatgacggtacgacgacgattgccaataaccttaccagcacggttcaggtgtttactgactcggagtaccagctcccgtacgtcctcggctcggcgcatcaaggatgcctcccgccgtttccagcgggcgtcttcatggtcccacagtatggatacctcaccctgaacaacgggagtcaggcggtaggacgctcttccttttactgcctggagtactttccttctcagatgctgcgtaccggaaacaactttaccttcagctacacctttgaggacgtgcccttccacagcagctacgctcacagccagagtttggaccggctgatgaatcctctgatcgaccagtatctgtattatctgaacaggacacaatcaaatagtggaactcttcagcagtctaggctactgtttagccaagctggacccaccagcatgtcccttcaagctaaaaactggctgcctggaccttgctgcagacagcagcgtctgtcaaagcaggcaaacgacaacaacaacagcaactttccctggactgcggctacaaagtatcatctaaatggtcgggactcgttggttaatccaggaccagctatggccagccacaaagacgatgaagaaaagtttttccccatgcatggaaccctgatatttggtaaacaaggaacaaatgctaacgacgcggatttggaacatgtcatgattacagatgaagaagaaatcaggaccaccaatcccgtggctacagagcagtacggaaacgtgtcaaataatttgcaaaactcaaatactggtccaactacagaaaatgtcaatcaccagggagcgttacctggtatggtgtggcaggatcgagacgtgtacctgcagggacccatttgggccaagattcctcacaccgacggacactttcacccttctccactgatgggaggttttggactcaaacacccgcctcctcaaatcatgatcaaaaacactcctgttccagccaatcctcctacaaacttcagcgcggcaaagtttgcttccttcatcacacagtattccacgggacaggtcagcgtggagatcgagtgggagctgcagaaggagaacagcaaacgctggaaccccgagatccagtacacttccaactacaacaaatctgttaatgtggactttactgtggacgctaatggtgtgtattcagagcctcgccccattggcaccagatacctgactcgtaatctgtaa

SEQ ID NO: 3592 - DNA, 2208 bp, Artificial Sequence
  Description of Artificial Sequence: Synthetic polynucleotide
atggctgccgatggttatcttccagattggctcgaggacactctctctgaaggaataagacagtggtggaagctcaaacctggcccaccaccaccaaggcccgcagagcggcatcaggacgacagcaggggtcttgtgcttcctgggtacaagtacctcggacccttcaacggactcgacaaaggagagccggtcaacgaggcagacgctgcggccctcgagcacgacaaggcctacgaccggcagctcgacagcggagacaacccgtacctcaagtacaaccacgccgacgcggagtttcaggagcgtcttaaagaagatacgtcttttgggggcaacctcggacgagcagtcttccaggcgaaaaagagggttcttgaacctctgggcctggttgaggaacctgttaagacggctccgggaaaaaagaggccggtagagcactctcctgcggagccagactcctcctcgggaaccggaaaagcgggccagcagcctgcaagaaagagattgaatttcggccagactggagacgcagactccgtacctgacccccagcctcccggacagccaccagcagcccccacaagtttgggatctactacaatggctacaggcagtggcgcaccaatggcagacaataacgagggtgccgatggagtgggtaattcctcaggaaattggcattgcgattcccaatggctgggcgacagagtcatcaccaccagcacccgaacctgggccctgcccacctacaacaaccacctctacaagcaaatctccagccaatcaggagcatcgaacgacaaccactactttggctacagcaccccttgggggtattttgacttcaacagattccactgtcacttctccccacgtgactggcaaagactcatcaacaacaactggggattccgacccaagagactcaacttcaagctctttaacattcaagtcaaagaggtcacgcagaatgacggtacgacgacgattgccaataaccttaccagcacggttcaggtgtttactgactcggagtaccagctcccgtacgtcctcggctcggcgcatcaaggatgcctcccgccgtttccagcggacgtcttcatggtcccacagtatggatacctcaccctgaacaacgggagtcaggcggtaggacgctcttccttttactgcctggagtactttccttctcagatgctgcgtaccggaaacaactttaccttcagctacacctttgaggacgtgcccttccacagcagctacgctcacagccagagtttggaccggctgatgaatcctctgatcgaccagtatctgtattatctgaacaggacacaatcaaatagtggaactcttcagcagtctaggctactgtttagccaagctggacccaccagcatgtcccttcaagctaaaaactggctgcctggaccttgctacagacagcagcgtctgtcaaagcaggcaaacgacaacaacaacagcaactttccctggactgcggctacaaagtatcatctaaatggtcgggactcgttggttaatccaggaccagctatggccagccacaaagacgatgaagaaaagtttttccccatgcatggaaccctgatatttggtaaacaaggaacaaatgctaacgacgcggatttggaacatgtcatgattacagatgaagaagaaatcaggaccaccaatcccgtggctacagagcagtacggaaacgtgtcaaataatttgcaaaactcaaatactggtccaactacagaaaatgtcaatcaccagggagcgttacctggtatggtgtggcaggatcgagacgtgtacctgcagggacccatttgggccaagattcctcacaccgacggacactttcacccttctccactgatgggaggttttggactcaaacacccgcctcctcaaatcatgatcaaaaacactcctgttccagccaatcctcctacaaacttcagcgcggcaaagtttgcttccttcatcacacagtattccacgggacaggtcagcgtggagatcgagtgggagctgcagaaggagaacagcaaacgctggaaccccgagatccagtacacttccaactacaacaaatctgttaatgtggactttactgtggacgctaatggtgtgtattcagagcctcgccccattggcaccagatacctgactcgtaatctgtaa

SEQ ID NO: 3593 - DNA, 2208 bp, Artificial Sequence
  Description of Artificial Sequence: Synthetic polynucleotide
atggctgccgatggttatcttccagattggctcgaggacactctctctgaaggaataagacagtggtggaagctcaaacctggcccaccaccaccaaggcccgcagagcggcatcaggacgacagcaggggtcttgtgcttcctgggtacaagtacctcggacccttcaacggactcgacaaaggagagccggtcaacgaggcagacgctgcggccctcgagcacgacaaggcctacgaccggcagctcgacagcggagacaacccgtacctcaagtacaaccacgccgacgcggagtttcaggagcgtcttaaagaagatacgtcttttgggggcaacctcggacgagcagtcttccaggcgaaaaagagggttcttgaacctctgggcctggttgaggaacctgttaagacggctccgggaaaaaagaggccggtagagcactctcctgcggagccagactcctcctcgggaaccggaaaagcgggccagcagcctgcaagaaagagattgaatttcggtcagactggagacgcagactccgtacctgacccccagcctctcggacagccaccagcagcccccacaagtttgggatctactacaatggctacaggcagtggcgcaccaatggcagacaataacgagggtgccgatggagtgggtaattcctcaggaaattggcattgcgattcccaatggctgggcgacagagtcatcaccaccagcacccgaacctgggccctgcccacctacaacaaccaccactacaagcaaatctccagccaatcaggagcatcgaacgacaaccactactttggctacagcaccccttgggggtattttgacttcaacagattccactgtcacttctccccacgtgactggcaaagactcatcaacaacaactggggattccgacccaagagactcaacttcaagctctttaacattcaagtcaaagaggtcacgcagaatgacggtacgacgacgattgccaataaccttaccagcacggttcaggtgtttactgactcggagtaccagctcccgtacgtcctcggctcggcgcatcaaggatgcctcccgccgtttccagcggacgtcttcatggtcccacagtatggatacctcaccctgaacaacgggagtcaggcggtaggacgctcttccttttactgcctggagtactttccttctcagatgctgcgtaccggaaacaactttaccttcagctacacctttgaggacgtgcccttccacagcagctacgctcacagccagagtttggaccggctgatgaatcctctgatcgaccagtatctgtattatctgaacaggacacaatcaaatagtggaactcttcagcagtctaggctactgtttagccaagctggacccaccagcatgtcccttcaagctaaaaactggctgcctggaccttgctacagacagcagcgtctgtcaaagcaggcaaacgacaacaacaacagcaactttccctggactgcggctacaaagtatcatctaaatggtcgggactcgttggttaatccaggaccagctatggccagccacaaagacgatgaagaaaagtttttccccatgcatggaaccctgatatttggtaaacaaggaacaaatgctaacgacgcggatttggaacatgtcatgattacagatgaagaagaaatcaggaccaccaatcccgtggctacagagcagtacggaaacgtgtcaaataatttgcaaaactcaaatactggtccaactacagaagatgtcaatcaccagggagcgttacctggtatggtgtggcaggatcgagacgtgtacctgcagggacccatttgggccaagattcctcacaccgacggacactttcacccttctccactgatgggaggttttggactcaaacacccgcctcctcaaatcatgatcaaaaacactcctgttccagccaatcctcctacaaacttcagcgcggcaaagtttgcttccttcatcacacagtattccacgggacaggtcagcgtggagatcgagtgggagctgcagaaggagaacagcaaacgctggaaccccgagatccagtacacttccaactacaacaaatctgttaatgtggactttactgtggacgctaatggtgtgtattcagagcctcgccccattggcaccagatacctgactcgtaatctgtaa

SEQ ID NO: 3594 - DNA, 2208 bp, Artificial Sequence
  Description of Artificial Sequence: Synthetic polynucleotide
atggctgccgatggttatcttccagattggctcgaggacactctctctgaaggaataagacagtggtggaagctcaaacctggcccaccaccaccaaggcccgcagagcggcatcaggacgacagcaggggtcttgtgcttcctgggtacaagtacctcggacccttcaacggactcgacaaaggagagccggtcaacgaggcagacgctgcggccctcgagcacgacaaggcctacgaccggcagctcgacagcggagacaacccgtacctcaagtacaaccacgccgacgcggagtttcaggagcgtcttaaagaagatacgtcttttgggggcaacctcggacgagcagtcttccaggcgaaaaagagggttcttgaacctctgggcctggttgaggaacctgttaagacggctccgggaaaaaagaggccggtagagcactctcctgcggagccagactcctcctcgggaaccggaaaagcgggccagcagcctgcaagaaagagattgaatttcggtcagactggagacgcagactccgtacctgacccccggcctctcggacagccaccagcagcccccacaagtttgggatctactacaatggctacaggcagtggcgcaccaatggcagacaataacgagggtgccgatggagtgggtaattcctcaggaaattggcattgcgattcccaatggctgggcgacagagtcatcaccaccagcacccgaacctgggccctgcccacctacaacaaccacctctacaagcaaatctccagccaatcaggagcatcgaacgacaaccactactttggctacagcaccccttgggggtattttgacttcaacagattccactgtcacttctccccacgtgactggcaaagactcatcaacaacaactggggattccgacccaagagactcaacttcaagctctttaacattcaagtcaaagaggtcacgcagaatgacggtacgacgacgattgccaataaccttaccagcacggttcaggtgtttactgactcggagtaccagctcccgtacgtcctcggctcggcgcatcaaggatgcctcccgccgtttccagcggacgtcttcatggtcccacagtatggatacctcaccctgaacaacgggagtcaggcggtaggacgctcttccttttactgcctggagtactttccttctcagatgctgcgtaccggaaacaactttaccttcagctacacctttgaggacgtgcccttccacagcagctacgctcacagccagagtttggaccggctgatgaatcctctgatcgaccagtatctgtattatctgaacaggacacaatcaaatagtggaactcttcagcagtctaggctactgtttagccaagctggacccaccagcatgtcccttcaagctaaaaactggctgcctggaccttgctacagacagcagcgtctgtcaaagcaggcaaacgacaacaacaacagcaactttccctggactgcggctacaaagtatcatctaaatggtcgggactcgttggttaatccaggaccagctatggccagccacaaagacgatgaagaaaagtttttccccatgcatggaaccctgatatttggtaaacaaggaacaaatgctaacgacgcggatttggaacatgtcatgattacagatgaagaagaaatcaggaccaccgatcccgtggctacagagcagtacggaaacgtgtcaaataatttgcaaaactcaaatactggtccaactacagaaaatgtcaatcaccagggagcgttacctggtatggtgtggcaggatcgagacgtgtacctgcagggacccatttgggccaagattcctcacaccgacggacactttcacccttctccactgatgggaggttttggactcaaacacccgcctcctcaaatcatgatcaaaaacactcctgttccagccaatcctcctacaaacttcagcgcggcaaagtttgcttccttcatcacacagtattccacgggacaggtcagcgtggagatcgagtgggagctgcagaaggagaacagcaaacgctggaaccccgagatccagtacacttccaactacaacaaatctgttaatgtggactttactgtggacgctaatggtgtgtattcagagcctcgccccattggcaccagatacctgactcgtaatctgtaa

SEQ ID NO: 3595 - DNA, 2208 bp, Artificial Sequence
  Description of Artificial Sequence: Synthetic polynucleotide
atggctgccgatggttatcttccagattggctcgaggacactctctctgaaggaataagacagtggtggaagctcaaacctggcccaccaccaccaaggcccgcagagcggcatcaggacgacagcaggggtcttgtgcttcctgggtacaagtacctcggacccttcaacggactcgacaaaggagagccggtcaacgaggcagacgctgcggccctcgagcacgacaaggcctacgaccggcagctcgacagcggagacaacccgtacctcaagtacaaccacgccgacgcggagtttcaggagcgtcttaaagaagatacgtcttttgggggcaacctcggacgagcagtcttccaggcgaaaaagagggttcttgaacctctgggcctggttgaggaacctgttaagacggctccgggaaaaaagaggccggtagagcactctcctgcggagccagactcctcctcgggaaccggaaaagcgggccagcagcctgcaagaaagagattgaatttcggtcagactggagacgcagactccgtacctgacccccagcctctcggacagccaccagcagcccccacaagtttgggatctactacaatggctacaggcagtggcgcaccaatggcagacaataacgagggtgccgatggagtgggtaattcctcaggaaattggcattgcgattcccaatggctgggcgacagagtcatcaccaccagcacccgaacctgggccctgcccacctacaacaaccacctctacaagcaaatctccagccaatcaggagcatcgaacgacaaccactactttggctacagcaccccttgggggtattttgacttcaacagattccactgtcacttctccccacgtgactggcaaagactcatcaacaacaactggggattccgacccaagagactcaacttcaagctctttaacattcaagtcaaagaggtcacgcagaatgacggtacgacgacgattgccaataaccttaccagcacggttcaggtgtttactgactcggagtaccagctcccgtacgtcctcggctcggcgcatcaaggatgcctcccgccgtttccagcggacgtcttcatggtcccacagtatggatacctcaccctgaacaacgggagtcaggcggtaggacgctcttccttttactgcctggagtactttccttctcagatgctgcgtaccggaaacaactttaccttcagctacacctttgaggacgtgcccttccacagcagctacgctcacagccagagtttggaccggctgatgaatcctctgatcgaccagtatctgtattatctgaacaggacacaatcaaatagtggaactcttcagcagtctaggctactgtttagccaagctggacccaccagcatgtcccttcaagctaaaaactggctgcctggaccttgctacagacagcagcgtctgtcaaagcaggcaaacgacaacaacaacagcaactttccctggactgcggctacaaagtatcatctaaatggtcgggactcgttggttaatccaggaccagctatggccagccacaaagacgatgaagaaaagtttttccccatgcatggaaccctgatatttggtaaacaaggaacaaatgctaacgacgcggatttggaacatgtcatgattacagatgaagaagaaatcaggaccaccaatcccgtggctacagagcagtacggaaacgtgtcaaataatttgcaaaactcaaatactggtccaactacaggaaatgtcaatcaccagggagcgttacctggtatggtgtggcaggatcgagacgtgtacctgcagggacccatttgggccaagattcctcacaccgacggacactttcacccttctccactgatgggaggttttggactcaaacacccgcctcctcaaatcatgatcaaaaacactcctgttccagccaatcctcctacaaacttcagcgcggcaaagtttgcttccttcatcacacagtattccacgggacaggtcagcgtggagatcgagtgggagctgcagaaggagaacagcaaacgctggaaccccgagatccagtacacttccaactacaacaaatctgttaatgtggactttactgtggacgctaatggtgtgtattcagagcctcgccccattggcaccagatacctgactcgtaatctgtaa

SEQ ID NO: 3596 - DNA, 2208 bp, Artificial Sequence
  Description of Artificial Sequence: Synthetic polynucleotide
atggctgccgatggttatcttccagattggctcgaggacactctctctgaaggaataagacagtggtggaagctcaaacctggcccaccaccaccaaggcccgcagagcggcatcaggacgacagcaggggtcttgtgcttcctgggtacaagtacctcggacccttcaacggactcgacaaaggagagccggtcaacgaggcagacgctgcggccctcgagcacgacaaggcctacgaccggcagctcgacagcggagacaacccgtacctcaagtacaaccacgccgacgcggagtttcaggagcgtcttaaagaagatacgtcttttgggggcaacctcggacgagcagtcttccaggcgaaaaagagggttcttgaacctctgggcctggttgaggaacctgttaagacggctccgggaaaaaagaggccggtagagcactctcctgcggagccagactcctcctcgggaaccggaaaagcgggccagcagcctgcaagaaagagattgaatttcggtcagactggagacgcagactccgtacctgacccccagcctctcggacagccaccagcagcccccacaagtttgggatctactacaatggctacaggcagtggcgcaccaatggcagacaataacgagggtgccgatggagtgggtaattcctcaggagattggcattgcgattcccaatggctgggcgacagagtcatcaccaccagcacccgaacctgggccctgcccacctacaacaaccacctctacaagcaaatctccagccaatcaggagcatcgaacgacaaccactactttggctacagcaccccttgggggtattttgacttcaacagattccactgtcacttctccccacgtgactggcaaagactcatcaacaacaactggggattccgacccaagagactcaacttcaagctctttaacattcaagtcaaagaggtcacgcagaatgacggtacgacgacgattgccaataaccttaccagcacggttcaggtgtttactgactcggagtaccagctcccgtacgtcctcggctcggcgcatcaaggatgcctcccgccgtttccagcggacgtcttcatggtcccacagtatggatacctcaccctgaacaacgggagtcaggcggtaggacgctcttccttttactgcctggagtactttccttctcagatgctgcgtaccggaaacaactttaccttcagctacacctttgaggacgtgcccttccacagcagctacgctcacagccagagtttggaccggctgatgaatcctctgatcgaccagtatctgtattatctgaacaggacacaatcaaatagtggaactcttcagcagtctaggctactgtttagccaagctggacccaccagcatgtcccttcaagctaaaaactggctgcctggaccttgctacagacagcagcgtctgtcaaagcaggcaaacgacaacaacaacagcaactttccctggactgcggctacaaagtatcatctaaatggtcgggactcgttggttaatccaggaccagctatggccagccacaaagacgatgaagaaaagtttttccccatgcatggaaccctgatatttggtaaacaaggaacaaatgctaacgacgcggatttggaacatgtcatgattacagatgaagaagaaatcaggaccaccaatcccgtggctacagagcagtacggaaacgtgtcaaatagtttgcaaaactcaaatactggtccaactacagaaaatgtcaatcaccagggagcgttacctggtatggtgtggcaggatcgagacgtgtacctgcagggacccatttgggccaagattcctcacaccgacggacactttcacccttctccactgatgggaggttttggactcaaacacccgcctcctcaaatcatgatcaaaaacactcctgttccagccaatcctcctacaaacttcagcgcggcaaagtttgcttccttcatcacacagtattccacgggacaggtcagcgtggagatcgagtgggagctgcagaaggagaacagcaaacgctggaaccccgagatccagtacacttccaactacaacaaatctgttaatgtggactttactgtggacgctaatggtgtgtattcagagcctcgccccattggcaccagatacctgactcgtaatctgtaa

SEQ ID NO: 3597 - DNA, 2208 bp, Artificial Sequence
  Description of Artificial Sequence: Synthetic polynucleotide
atggctgccgatggttatcttccagattggctcgaggacattctctctgaaggaataagacagtggtggaagctcaaacctggcccaccaccaccaaagcccgcagagcggcataaggacgacagcaggggtcttgtgcttcctgggtacaagtacctcggacccttcaacggactcgacaaaggagagccggtcaacgaggcagacgccgcggccctcgagcacgacaaggcctacgaccggcagctcgacagcggagacaacccgtacctcaagtacaaccacgccgacgcggagtttcaggagcgtcttaaagaagatacgtcttttgggggcaacctcggacgagcagtcttccaggcaaaaaagagggttcttgaacctctgggcctggttgaggaacctgttaagacgactccgggaaaaaagaggccggtagagcaatctcctgcggagccagactcctcctcgggaaccggaaaggcgggcaaccagcctgcaagaaagagattgaattttggtcagactggagacgcagactccgtacctgacccccagcctctcggacagccaccagcagccccctctggtctgggatctactacaatggctacaggcagtggcgcaccaatggcagacaataacgagggtgccgatggagtgggtaattcctcaggaaattggcattgcgattcccaatggttgggcgacagagtcatcaccaccagcacccgaacctgggccctgcccacctacaacaatcacctctacaagcaaatctccagccaatcaggagccagcaacgacaaccactactttggctacagcaccccctgggggtattttgacttcaacagattccactgccacttttcaccacgtgactggcaaagactcatcaacaacaactggggattccgacccaaaagactcaacttcaagctctttaacattcaagtcaaagaggtcacgcagaatgacggtacgacgacgattgccaataaccttaccagcacggttcaggtgtttactgactcggagtaccagctcccgtacgtcctcggctcggcgcatcaaggatgcctcccgccgtttccagcggacgtcttcatggtcccacagtatggatacctcaccctgaacaacgggagtcaggcggtaggacgctcttccttttactgcctggagtactttccttctcagatgcttcgtaccggaaacaactttaccttcagttacacctttgaagacgttcctttccacagcagctacgctcacagtcaaagtctggaccggctgatgaatcctctgatagaccagtacctgtattatctaaacaaaacacaatcaaatagtggaactcttcagcagtctcggctactgtttagtcaagctggacccaccagcatgtctcttcaagctaaaaactggctgcctggaccttgctacagacaacagcgtctgtcaaagcaggcaaacgacaacaacaacagcaactttccctggactgcggctacaaagtatcatctaaatggccgggactcgttggttaatccaggaccagctatggccagccacaaagacgatgaagaaaagtttttccccatgcatggaaccctgatatttggtaaacaaggaacaaatgctaacgacgcggatttggacaatgtcatgattacagatgaagaagaaatccgcaccaccaatcccgtggctacggagcagtacgggactgtgtcaaataatttgcaaaactcaaatactggtccaactactggaactgtcaatcaccaaggagcgttacctggtatggtgtggcaggatcgagacgtgtaccttcagggacccatttgggccaagattcctcacaccgatggacactttcatccttctccactgatgggaggttttggactcaaacacccgcctcctcagatcatgatcaaaaacactcccgttccagccaatcctcctacaaacttcagttctgccaagtttgcttctttcatcacacagtattccacggggcaggtcagcgtggagatagagtgggagctgcagaaggagaacagcaaacgctggaaccccgagatccagtatacttccaactacaacaagtctgttaatgtggactttactgtggacactaatggtgtgtattcagagcctcgccccattggcaccagatacctgactcgtaatctgtaa

SEQ ID NO: 3598 - DNA, 2208 bp, Artificial Sequence
  Description of Artificial Sequence: Synthetic polynucleotide
atggctgccgatggttatcttccagattggctcgaggacattctctctgaaggaataagacagtggtggaagctcaaacctggcccaccaccaccaaagcccgcagagcggcataaggacgacagcaggggtcttgtgcttcctgggtacaagtacctcggacccttcaacggactcgacaaaggagagccggtcaacgaggcagacgccgcggccctcgagcacgacaaggcctacgaccggcagctcgacagcggagacaacccgtacctcaagtacaaccacgccgacgcggagtttcaggagcgtcttaaagaagatacgtcttttgggggcaacctcggacgagcagtcttccaggcaaaaaagagggttcttgaacctctgggcctggttgaggaacctgttaagacggctccgggaaaaaagaggccggtagagcaatctcctgcggagccagactcctcctcgggaaccggaaaggcgggcaaccagcctgcaagaaagagattgaattttggtcagactggagacgcagactccgtacctgacccccagcctctcggacagccaccagcagccccctctggtctgggatctactacaatggctacaggcagtggcgcaccaatggcagacaataacgagggtgccgatggagtgggtaattcctcaggaaattggcattgcgattcccaatggttgggcgacagagtcatcaccaccagcacccgaacctgggccctgcccacctacaacaatcacctctacaagcaaatctccagccaatcaggagccagcaacgacaaccactactttggctacagcaccccctgggggtattttgacttcaacagattccactgccacttttcaccacgtgactggcaaagactcatcaacaacaactggggattccgacccaaaagactcaacttcaagctctttaacattcaagtcaaagaggtcacgcagaatgacggtacgacgacgattgccaataaccttaccagcacggttcaggtgtttactgactcggagtaccagctcccgtacgtcctcggctcggcgcatcaaggatgcctcccgccgtttccagcggacgtcttcatggtcccacagtatggatacctcaccctgaacaacgggagtcaggcggtaggacgctcttccttttactgcctggagtactttccttctcagatgcttcgtaccggaaacaactttaccttcagttacacctttgaagacgttcctttccacagcagctacgctcacagtcaaagtctggaccggctgatgaatcctctgatagaccagtacctgtattatctaaacaaaacacaatcaaatagtggaactcttcagcagtctcggctactgtttagtcaagctggacccaccagcatgtctcttcaagctaaaaactggctgcctggaccttgctacagacaacagcgtctgtcaaagcaggcaaacgacaacaacaacagcaactttccctggactgcggctacaaagtatcatctaaatggccgggactcgttggttaatccaggaccagctatggccagccacaaagacgatgaagaaaagtttttccccatgcatggaaccctgatatttggtaaacaaggaacaaatgctaacgacgcggatttggacaatgtcatgattacagatgaagaagaaatccgcaccaccaatcccgtggctacggagcagtacgggactgtgtcaaataatttgcaaaactcaaatactggtccaactactggaactgtcaatcaccaaggagcgttacctggtatggtgtggcaggatcgagacgtgtaccttcagggacccatttgggccaagattcctcacaccgatggacactttcatccttctccactgatgggaggttttggactcaaacacccgcctcctcagatcatgatcaaaaacactcccgttccagccaatcctcctacaaacttcagttctgccaagtttgcttctttcatcacacagtattccacggggcaggtcagcgtggagatagagtgggagctgcagaaggagaacagcaaacgctggaaccccgagatccagtatacttccaactacaacaagtctgttaatgtggactttactgtggacactaatggtgtgtattcagagcctcgccccattggcaccagatacctgactcgtaatctgtaa

SEQ ID NO: 3599 - DNA, 2208 bp, Artificial Sequence
  Description of Artificial Sequence: Synthetic polynucleotide
atggctgccgatggttatcttccagattggctcgaggacattctctctgaaggaataagacagtggtggaagctcaaacctggcccaccaccaccaaagcccgcagagcggcataaggacgacagcaggggtcttgtgcttcctgggtacaagtacctcggacccttcaacggactcgacaaaggagagccggtcaacgaggcagacgccgcggccctcgagcacgacaaggcctacgaccggcagctcgacagcggagacaacccgtacctcaagtacaaccacgccgacgcggagtttcaggagcgtcttaaagaagatacgtcttttgggggcaacctcggacgagcagtcttccaggcaaaaaagagggttcttgaacctctgggcctggttgaggaacctgttaagacggctccgggaaaaaagaggccggtagagcaatctcctgcggagccagactcctcctcgggaaccggaaaggcgggcaaccagcctgcaagaaagagattgaattttggtcagactggagacgcagactccgtacctgacccccagcctctcggacagccaccagcagccccctctggtctgggatctactacaatggctacaggcagtggcgcaccaatggcagacaataacgagggtgccgatggagtgggtaattcctcaggaaattggcattgcgattcccaatggttgggcgacagagtcatcaccaccagcacccgaacctgggccctgcccacctacaacaatcacctctacaagcaaatctccagccaatcaggagccagcaacgacaaccactactttggctacagcaccccctgggggtattttgacttcaacagattccactgccacttttcaccacgtgactggcaaagactcatcaacaacaactggggattccgacccaaaagactcaacttcaagctctttaacattcaagtcaaagaggtcacgcagaatgacggtacgacgacgattgccaataaccttaccagcacggttcaggtgtttactgactcggagtaccagctcccgtacgtcctcggctcggcgcatcaaggatgcctcccgccgtttccagcggacgtcttcatggtcccacagtatggatacctcaccctgaacaacgggagtcaggcggtaggacgctcttccttttactgcctggagtactttccttctcagatgcttcgtaccggaaacaactttaccttcagttacacctttgaagacgttcctttccacagcggctacgctcacagtcaaagtctggaccggctgatgaatcctctgatagaccagtacctgtattatctaaacaaaacacaatcaaatagtggaactcttcagcagtctcggctactgtttagtcaagctggacccaccagcatgtctcttcaagctaaaaactggctgcctggaccttgctacagacaacagcgtctgtcaaagcaggcaaacgacaacaacaacagcaactttccctggactgcggctacaaagtatcatctaaatggccgggactcgttggttaatccaggaccagctatggccagccacaaagacgatgaagaaaagtttttccccatgcatggaaccctgatatttggtaaacaaggaacaaatgctaacgacgcggatttggacaatgtcatgattacagatgaagaagaaatccgcaccaccaatcccgtggctacggagcagtacgggactgtgtcaaataatttgcaaaactcaaatactggtccaactactggaactgtcaatcaccaaggagcgttacctggtatggtgtggcaggatcgagacgtgtaccttcagggacccatttgggccaagattcctcacaccgatggacactttcatccttctccactgatgggaggttttggactcaaacacccgcctcctcagatcatgatcaaaaacactcccgttccagccaatcctcctacaaacttcagttctgccaagtttgcttctttcatcacacagtattccacggggcaggtcagcgtggagatagagtgggagctgcagaaggagaacagcaaacgctggaaccccgagatccagtatacttccaactacaacaagtctgttaatgtggactttactgtggacactaatggtgtgtattcagagcctcgccccattggcaccagatacctgactcgtaatctgtaa

SEQ ID NO: 3600 - DNA, 2205 bp, Artificial Sequence
  Description of Artificial Sequence: Synthetic polynucleotide
atggctgccgatggttatcttccagattggctcgaggacattctctctgaaggaataagacagtggtggaagctcaaacctggcccaccaccaaagcccgcagagcggcataaggacgacagcaggggtcttgtgcttcctgggtacaagtacctcggacccttcaacggactcgacaaaggagagccggtcaacgaggcagacgccgcggccctcgagcacgacaaggcctacgaccggcagctcgacagcggagacaacccgtacctcaagtacaaccacgccgacgcggagtttcaggagcgtcttaaagaagatacgtcttttgggggcaacctcggacgagcagtcttccaggcaaaaaagagggttcttgaacctctgggcctggttgaggaacctgttaagacggctccgggaaaaaagaggccggtagagcaatctcctgcggagccagactcctcctcgggaaccggaaaggcgggcaaccagcctgcaagaaagagattgaattttggtcagactggagacgcagactccgtacctgacccccagcctctcggacagccaccagcagccccctctggtctgggatctactacaatggctacaggcagtggcgcaccaatggcagacaataacgagggtgccgatggagtgggtaattcctcaggaaattggcattgcgattcccaatggttgggcgacagagtcatcaccaccagcacccgaacctgggccctgcccacctacaacaatcacctctacaagcaaatctccagccaatcaggagccagcaacgacaaccactactttggctacagcaccccctgggggtattttgacttcaacagattccactgccacttttcaccacgtgactggcaaagactcatcaacaacaactggggattccgacccaaaagactcaacttcaagctctttaacattcaagtcaaagaggtcacgcagaatgacggtacgacgacgattgccaataaccttaccagcacggttcaggtgtttactgactcggagtaccagctcccgtacgtcctcggctcggcgcatcaaggatgcctcccgccgtttccagcggacgtcttcatggtcccacagtatggatacctcaccctgaacaacgggagtcaggcggtaggacgctcttccttttactgcctggagtactttccttctcagatgcttcgtaccggaaacaactttaccttcagttacacctttgaagacgttcctttccacagcagctacgctcacagtcaaagtctggaccggctgatgaatcctctgatagaccagtacctgtattatctaaacaaaacacaatcaaatagtggaactcttcagcagtctcggctactgtttagtcaagctggacccaccagcatgtctcttcaagctaaaaactggctgcctggaccttgctacagacaacagcgtctgtcaaagcaggcaaacgacaacaacaacagcaactttccctggactgcggctacaaagtatcatctaaatggccgggactcgttggttaatccaggaccagctatggccagccacaaagacgatgaagaaaagtttttccccatgcatggaaccctgatatttggtaaacaaggaacaaatgctaacgacgcggatttggacaatgtcatgattacagatgaagaagaaatccgcaccaccaatcccgtggctacggagcagtacgggactgtgtcaaataatttgcaaaactcaaatactggtccaactactggaactgtcaatcaccaaggagcgttacctggtatggtgtggcaggatcgagacgtgtaccttcagggacccatttgggccaagattcctcacaccgatggacactttcatccttctccactgatgggaggttttggactcaaacacccgcctcctcagatcatgatcaaaaacactcccgttccagccaatcctcctacaaacttcagttctgccaagtttgcttctttcatcacacagtattccacggggcaggtcagcgtggagatagagtgggagctgcagaaggagaacagcaaacgctggaaccccgagatccagtatacttccaactacaacaagtctgttaatgtggactttactgtggacactaatggtgtgtattcagagcctcgccccattggcaccagatacctgactcgtaatctgtaa

SEQ ID NO: 3601 - DNA, 2208 bp, Artificial Sequence
  Description of Artificial Sequence: Synthetic polynucleotide
atggctgccgatggttatcttccagattggctcgaggacactctctctgaaggaataagacagtggtggaagctcaaacctggcccaccaccaccaaggcccgcagagcggcatcaggacgacagcaggggtcttgtgcttcctgggtacaagtacctcggacccttcaacggactcgacaaaggagagccggtcaacgaggcagacgctgcggccctcgagcacgacaaggcctacgaccggcagctcgacagcggagacaacccgtacctcaagtacaaccacgccgacgcggagtttcaggagcgtcttaaagaagatacgtcttttgggggcaacctcggacgagcagtcttccaggcgaaaaagagggttcttgaacctctgggcctggttgaggaacctgttaagacggctccgggaaaaaagaggccggtagagcactctcctgcggagccagactcctcctcgggaaccggaaaagcgggccagcagcctgcaagaaagagattgaatttcggtcagactggagacgcagactccgtacctgacccccagcctctcggacagccaccagcagcccccacaagtttgggatctactacaatggctacaggcagtggcgcaccaatggcagacaataacgagggtgccgatggagtgggtaattcctcaggaaattggcattgcgattcccaatggctgggcgacagagtcatcaccaccagcacccgaacctgggccctgcccacctacaacaaccacctctacaagcaaatctccagccaatcaggagcatcgaacgacaaccactactttggctacagcaccccttgggggtattttgacttcaacagattccactgtcacttctccccacgtgactggcaaagactcatcaacaacaactggggattccgacccaagagactcaacttcaagctctttaacattcaagtcaaagaggtcacgcagaatgacggtacgacgacgattgccaataaccttaccagcacggttcaggtgtttactgactcggagtaccagctcccgtacgtcctcggctcggcgcatcaaggatgcctcccgccgtttccagcggacgtcttcatggtcccacagtatggatacctcaccctgaacaacgggagtcaggcggtaggacactcttcctcttactgcctggagtactttccttctcagatgctgcgtaccggaaacaactttaccttcagctacacctttgaggacgtgcctttccacagcagctacgctcacagccagagtttggaccggctgatgaatcctctgatcgaccagtatctgtattatctgaacaggacacaatcaaatagtggaactcttcagcagtctaggctactgtttagccaagctggacccaccagcatgtctcttcaagctaaaaactggctgcctggaccttgctacagacagcagcgtctgtcaaagcaggcaaacgacaacaacaacagcaactttccctggactgcggctacaaagtatcatctaaatggtcgggactcgttggttaatccaggaccagctatggccagccacaaagacgatgaagaaaagtttttccccatgcatggaaccctgatatttggtaaacaaggaacaaatgctaacgacgcggatttggaacatgtcatgattacagatgaagaagaaatcaggaccaccaatcccgtggctacagagcagtacggaaacgtgtcaaataatttgcaaaactcaaatactggtccaactacagaaaatgtcaatcaccagggagcgttacctggtatggtgtggcaggatcgagacgtgtacctgcagggacccatttgggccaagattcctcacaccgacggacactttcacccttctccactgatgggaggttttggactcaaacacccgcctcctcaaatcatgatcaaaaacactcctgttccagccaatcctcctacaaacttcagcgcggcaaagtttgcttccttcatcacacagtattccacgggacaggtcagcgtggagatcgagtgggagctgcagaaggagaacagcaaacgctggaaccccgagatccagtacacttccaactacaacaaatctgttaatgtggactttactgtagacactaatggtgtgtattcagagcctcgccccattggcaccagatacctgactcgtaatctgtaa

SEQ ID NO: 3602 - DNA, 2208 bp, Artificial Sequence
  Description of Artificial Sequence: Synthetic polynucleotide
atggctgccgatggttatcttccagattggctcgaggacactctctctgaaggaataagacagtggtggaagctcaaacctggcccaccaccaccaaagcccgcagagcggcatcaggacgacagcaggggtcttgtgcttcccgggcacaagtacctcggacccttcaacggactcgacaaaggagagccggtcaacgaggcagacgctgcggccctcgagcacgacaaggcctacgaccggcagctcgacagcggagacaacccgtacctcaagtacaaccacgccgacgcggagtttcaggagcgtcttaaagaagatacgtcttttgggggcaacctcggacgagcagtcttccaggcgaaaaagagggttcttgaacctctgggcctggttgaggaacctgttaagacggctccgggaaaaaagaggccggtagagcactctcctgcggagccagactcctcctcgggaaccggaaaagcgggccagcagcctgcaagaaagagattgaatttcggtcagactggagacgcagactccgtacctgacccccagcctctcggacagccaccagcagcccccacaagtttgggatctactacaatggctacaggcagtggcgcaccaatggcagacaataacgagggtgccgatggagtgggtaattcctcaggaaattggcattgcgattcccaatggctgggcgacagagtcatcaccaccagcacccgaacctgggccctgcccacctacaacaaccacctctataagcaaatctccagccaatcaggagcatcgaacgacaaccactactttggctacagcaccccttgggggtattttgacttcaacagattccactgtcacttctccccacgtgactggcaaagactcatcaacaacaactggggattccgacccaagagactcaacttcaagctctttaacattcaagtcaaagaggtcacgcagaatgacggtacgacgacgattgccaataaccttaccagcacggttcaggtgtttactgactcggagtaccagctcccgtacgtcctcggctcggcgcatcaaggatgcctcccgccgtttccagcggacgtcttcatggtcccacagtatggatacctcaccctgaacaacgggagtcaggcggtaggacgctcttccttttactgcctggagtactttccttctcagatgctgcgtaccggaaacaactttaccttcagctacacctttgaggacgtgcccttccacagcagctacgctcacagccagagtttggaccggctgatgaatcctctgatcgaccagtatctgtattatctgaacaggacacaatcaaatagtggaactcttcagcagtctaggctactgtttagccaagctggacccaccagcatgtcccttcaagctaaaaactggctgcctggaccttgctacagacagcagcgtctgtcaaagcaggcaaacgacaacaacaacagcaactttccctggactgcggctacaaagtatcatctaaatggtcgggactcgttggttaatccaggaccagctatggccagccacaaagacgatgaagaaaagtttttccccatgcatggaaccctgatatttggtaaacaaggaacaaatgctaacgacgcggatttggaacatgtcatgattacagatgaagaagaaatcaggaccaccaatcccgtggctacagagcagtacggaaacgtgtcaaataatttgcaaaactcaaatactggtccaactacagaaaatgtcaatcaccagggagcgttacctggtatggtgtggcaggatcgagacgtgtacctgcagggacccatttgggccaagattcctcacaccgacggacactttcacccttctccactgatgggaggttttggactcaaacacccgcctcctcaaatcatgatcaaaaacactcctgttccagccaatcctcctacaaacttcagcgcggcaaagtttgcttccttcatcacacagtattccacgggacaggtcagcgtggagatcgagtgggagctgcagaaggagaacagcaaacgctggaaccccgagatccagtacacttccaactacaacaaatctgttaatgtggactttactgtggacgctaatggtgtgtattcagagcctcgccccattggcaccagatacctgactcgtaatctgtaa

SEQ ID NO: 3603 - DNA, 2208 bp, Artificial Sequence
  Description of Artificial Sequence: Synthetic polynucleotide
atggctgccgatggttatcttccagattggctcgaggacactctctctgaaggaataagacagtggtggaagctcaaacctggcccaccaccgccaaagcccgcagagcggcataaggacgacagcaggggtcttgtgcttcctgggtacaagtacctcggacccttcaacggactcgacaagggagagccggtcaacgaggcagacgccgcggccctcgagcacgacaaggcctacgaccggcagctcgacagcggagacaacccgtacctcaagtacaaccacgccgacgcggagtttcaggagcgccttaaagaagatacgtcttttgggggcaacctcggacgagcagtcttccaggcgaaaaagagggttcttgaacctctgggcctggttgaggaacctgttaagacggctccgggaaaaaagaggccggtagagcactctcctgcggagccagactcctcctcgggaaccggaaaagcgggccagcagcctgcaagaaagagattgaatttcggtcagactggagacgcagactccgtacctgacccccagcctctcggacagccaccagcagcccccacaagtttgggatctactacaatggctacaggcagtggcgcaccaatggcagacaataacgagggtgccgatggagtgggtaattcctcaggaaattggcattgcgattcccaatggctgggcgacagagtcatcaccaccagcacccgaacctgggccctgcccacctacaacaaccacctctacaagcaaatctccagccaatcaggagcatcgaacgacaaccactactttggctacagcaccccttgggggtattttgacttcaacagattccactgtcacttctccccacgtgactggcaaagactcatcaacaacaactggggattccgacccaagagactcaacttcaagctctttaacattcaagtcaaagaggtcacgcagaatgacggtacgacgacgattgccaataaccttaccagcacggttcaggtgtttactgactcggagtaccagctcccgtacgtcctcggctcggcgcatcaaggatgcctcccgccgtttccagcggacgtcttcatggtcccacagtatggatacctcaccctgaacaacgggagtcaggcggtaggacgctcttccttttactgcctggagtactttccttctcagatgctgcgtaccggaaacaactttaccttcagctacacctttgaggacgtgcccttccacagcagctacgctcacagccagagtttggaccggctgatgaatcctctgatcgaccagtatctgtattatctgaacaggacacaatcaaatagtggaactcttcagcagtctaggctactgtttagccaagctggacccaccagcatgtcccttcaagctaaaaactggctgcctggaccttgctacagacagcagcgtctgtcaaagcaggcaaacgacaacaacaacagcaactttccctggactgcggctacaaagtatcatctaaatggtcgggactcgttggttaatccaggaccagctatggccagccacaaagacgatgaagaaaagtttttccccatgcatggaaccctgatatttggtaaacaaggaacaaatgctaacgacgcggatttggaacatgtcatgattacagatgaagaagaaatcaggaccaccaatcccgtggctacagagcagtacggaaacgtgtcaaataatttgcaaaactcaaatactggtccaactacagaaaatgtcaatcaccagggagcgttacctggtatggtgtggcaggatcgagacgtgtacctgcagggacccatttgggccaagattcctcacaccgacggacactttcacccttctccactgatgggaggttttggactcaaacacccgcctcctcaaatcatgatcaaaaacactcctgttccagccaatcctcctacaaacttcagcgcggcaaagtttgcttccttcatcacacagtattccacgggacaggtcagcgtggagatcgagtgggagctgcagaaggagaacagcaaacgctggaaccccgagatccagtacacttccaactacaacaaatctgttaatgtggactttactgtggacgctaatggtgtgtattcagagcctcgccccattggcaccagatacctgactcgtaatctgtaa

SEQ ID NO: 3604 - DNA, 2208 bp, Artificial Sequence
  Description of Artificial Sequence: Synthetic polynucleotide
atggctgccgatggttatcttccagattggctcgaggacactctctctgaaggaataagacagtggtggaagctcaaacctggcccaccaccaccaaggcccgcagagcggcatcaggacgacagcaggggtcttgtgcttcctgggtacaagtacctcggacccttcaacggactcgacaaaggagagccggtcaacgaggcagacgctgcggccctcgagcacgacaaggcctacgaccggcagctcgacagcggagacaacccgtacctcaagtacaaccacgccgacgcggagtttcaggagcgtcttaaagaagatacgtcttttgggggcaacctcggacgagcagtcttccaggcgaaaaagagggttcttgaacctctgggcctggttgaggaacctgttaagacggctccgggaaaaaagaggccggtagagcactctcctgcggagccagactcctcctcgggaaccggaaaagcgggccagcagcctgcaagaaagagattgaatttcggtcagactggagacgcagactccgtacctgacccccagcctctcggacagccaccagcagcccccacaagtttgggatctactacaatggctacaggcagtggcgcaccaatggcagacaataacgagggtgccgatggagtgggtaattcctcaggaaattggcattgcgattcccaatggctgggcgacagagtcatcaccaccagcacccgaacctgggccctgcccacctacaacaaccacctctacaagcaaatctccagccaatcaggagcatcgaacgacaaccactactttggctacagcaccccttgggggtattttgacttcaacagattccactgtcacttctccccacgtgactggcaaagactcatcaacaacaactggggattccgacccaagagactcaacttcaagctctttaacattcaagtcaaagaggtcacgcagaatgacggtacgacgacgattgccaataaccttaccagcacggttcaggtgtttactgactcggagtaccagctcccgtacgtcctcggctcggcgcatcaaggatgcctcccgccgtttccagcggacgtcttcatggtcccacagtatggatacctcaccctgaacaacgggagtcaggcggtaggacgctcttcctcttactgcctggagtactttccttctcagatgctgcgtaccggaaacaactttaccttcagctacacctttgaggacgtgcccttccacagcagctacgctcacagccagagtttggaccggctgatgaatcctctgatcgaccagtatctgtattatctgaacaggacacaatcaaatagtggaactcttcagcagtctaggctactgtttagccaagctggacccaccagcatgtcccttcaagctaaaaactggctgcctggaccttgctacagacagcagcgtctgtcaaagcaggcaaacgacaacaacaacagcaactttccctggactgcggctacaaagtatcatctaaatggtcgggactcgttggttaatccaggaccagctatggccagccacaaagacgatgaagaaaagtttttccccatgcatggaaccctgatatttggtaaacaaggaacaaatgctaacgacgcggatttggaacatgtcatgattacagatgaagaagaaatcaggaccaccaatcccgtggctacagagcagtacggaaacgtgtcaaataatttgcaaaactcaaatactggtccaactacagaaaatgtcaatcaccagggagcgttacctggtatggtgtggcaggatcgagacgtgtacctgcagggacccatttgggccaagattcctcacaccgacggacactttcacccttctccactgatgggaggttttggactcaaacacccgcctcctcaaatcatgatcaaaaacactcctgttccagccaatcctcctacaaacttcagcgcggcaaagtttgcttccttcatcacacagtattccacgggacaggtcagcgtggagatcgagtgggagctgcagaaggagaacagcaaacgctggaaccccgagatccagtacacttccaactacaacaaatctgttaatgtggactttactgtggacgctaatggtgtgtattcagagcctcgccccattggcaccagatacctgactcgtaatctgtaa

SEQ ID NO: 3605 - DNA, 2208 bp, Artificial Sequence
  Description of Artificial Sequence: Synthetic polynucleotide
atggctgccgatggttatcttccagattggctcgaggacactctctctgaaggaataagacagtggtggaagctcaaacctggcccaccaccaccaaggcccgcagagcggcatcaggacgacagcaggggtcttgtgcttcctgggtacaagtacctcggacccttcaacggactcgacaaaggagagccggtcaacgaggcagacgctgcggccctcgagcacgacaaggcctacgaccggcagctcgacagcggagacaacccgtacctcaagtacaaccacgccgacgcggagtttcaggagcgtcttaaagaagatacgtcttttgggggcaacctcggacgagcagtcttccaggcgaaaaagagggttcttgaacctctgggcctggttgaggaacctgttaagacggctccgggaaaaaagaggccggtagagcactctcctgcggagccagactcctcctcgggaaccggaaaagcgggccagcagcctgcaagaaagagattgaatttcggtcagactggagacgcagactccgtacctgacccccagcctctcggacagccaccagcagcccccacaagtttgggatctactacaatggctacaggcagtggcgcaccaatggcagacaataacgagggtgccgatggagtgggtaattcctcaggaaattggcattgcgattcccaatggctgggcgacagagtcatcaccaccagcacccgaacctgggccctgcccacctacaacaaccacctctacaagcaaatctccagccaatcaggagcatcgaacgacaaccactactttggctacagcaccccttgggggtattttgacttcaacagattccactgtcacttctccccacgtgactggcaaagactcatcaacaacaactggggattccgacccaagagactcaacttcaagctctttaacattcaagtcaaagaggtcacgcagaatgacggtacgacgacgattgccaataaccttaccagcacggttcaggtgtttactgactcggagtaccagctcccgtacgtcctcggctcggcgcatcaaggatgcctcccgccgtttccagcggacgtcttcatggtcccacagtatggatacctcaccctgaacaacgggagtcaggcggtaggacgctcttccttttactgcctggagtactttccttctcagatgctgcgtaccggaaacaactttaccttcagctacacctttgaggacgtgcccttccacagcagctacgctcacagccagagtttggaccggctgatgaatcctctgatcgaccagtatctgtattatccgaacaggacacaatcaaatagtggaactcttcagcagtctaggctactgtttagccaagctggacccaccagcatgtcccttcaagctaaaaactggctgcctggaccttgctacagacagcagcgtctgtcaaagcaggcaaacgacaacaacaacagcaactttccctggactgcggctacaaagtatcatctaaatggtcgggactcgttggttaatccaggaccagctatggccagccacaaagacgatgaagaaaagtttttccccatgcatggaaccctgatatttggtaaacaaggaacaaatgctaacgacgcggatttggaacatgtcatgattacagatgaagaagaaatcaggaccaccaatcccgtggctacagagcagtacggaaacgtgtcaaataatttgcaaaactcaaatactggtccaactacagaaaatgtcaatcaccagggagcgttacctggtatggtgtggcaggatcgagacgtgtacctgcagggacccatttgggccaagattcctcacaccgacggacactttcacccttctccactgatgggaggttttggactcaaacacccgcctcctcaaatcatgatcaaaaacactcctgttccagccaatcctcctacaaacttcagcgcggcaaagtttgcttccttcatcacacagtattccacgggacaggtcagcgtggagatcgagtgggagctgcagaaggagaacagcaaacgctggaaccccgagatccagtacacttccaactacaacaaatctgttaatgtggactttactgtggacgctaatggtgtgtattcagagcctcgccccattggcaccagatacctgactcgtaatctgtaa

SEQ ID NO: 3606 - DNA, 2208 bp, Artificial Sequence
  Description of Artificial Sequence: Synthetic polynucleotide
atggctgccgatggttatcttccagattggctcgaggacactctctctgaaggaataagacagtggtggaagctcaaacctggcccaccaccaccaaggcccgcagagcggcatcaggacgacagcaggggtcttgtgcttcctgggtacaagtacctcggacccttcaacggactcgacaaaggagagccggtcaacgaggcagacgctgcggccctcgagcacgacaaggcctacgaccggcagctcgacagcggagacaacccgtacctcaagtacaaccacgccgacgcggagtttcaggagcgtcttaaagaagatacgtcttttgggggcaacctcggacgagcagtcttccaggcgaaaaagagggttcttgaacctctgggcctggttgaggaacctgttaagacggctccgggaaaaaagaggccggtagagcactctcctgcggagccagactcctcctcgggaaccggaaaagcgggccagcagcctgcaagaaagagattgaatttcggtcagactggagacgcagactccgtacctgacccccagcctctcggacagccaccagcagcccccacaagtttgggatctactacaatggctacaggcagtggcgcaccaatggcagacaataacgagggtgccgatggagtgggtaattcctcaggaaattggcattgcgattcccaatggctgggcgacagagtcatcaccaccagcacccgaacctgggccctgcccacctacaacaaccacctctacaagcaaatctccagccaatcaggagcatcgaacgacaaccactactttggctacagcaccccttgggggtattttgacttcaacagattccactgtcacttctccccacgtgactggcaaagactcatcaacaacaactggggattccgacccaagagactcaacttcaagctctttaacattcaagtcaaagaggtcacgcagaatgacggtacgacgacgattgccaataaccttaccagcacggttcaggtgtttactgactcggagtaccagctcccgtacgtcctcggctcggcgcatcaaggatgcctcccgccgtttccagcggacgtcttcatggtcccacagtatggatacctcaccctgaacaacgggagtcaggcggtaggacgctcttccttttactgcctggagtactttccttctcagatgcttcgtaccggaaacaactttaccttcagttacacctttgaagacgttcctttccacagcagctacgctcacagtcaaagtctggaccggctgatgaatcctcttatcgaccagtacctgtattatctaaacaaaacacaatcaaatagtggaactcttcagcagtctcggctactgtttagtcaagctggacctaccagcatgtctcttcaagctaaaaactggctgcctggaccttgctacagacaacagcgtctgtcaaagcaggcaaacgacaacaacaacagcaactttccctggactgcggctacaaagtatcatctaaatggccgggactcgttggttaatccaggaccagctatggccagccacaaagacgatgaagaaaagtttttccccatgcatggaaccctgatatttggcaaacaagggacaaatgctaacgacgcggatttggacaatgtcatgattacagatgaagaagaaatccgtaccaccaatcccgtggctacggagcagtacgggactgtgtcaaataatttgcaaaactcaaatactggtccaactactggaactgtcaatcaccaaggagcgttacctggtatggtgtggcaggatcgagacgtgtaccttcagggacccatttgggccaagattcctcacaccgatggacactttcacccttctccgctgatgggaggttttggactcaaacacccgcctcctcagatcatgatcaaaaacactcccgttccagccaatcctcccacaaacttcagttctgccaagtttgcttctttcatcacacagtattccacgggacaggttagcgtggagatcgagtgggagctgcagaaggagaacagcaaacgctggaaccccgagatccagtacacttccaactacaacaagtctgttaatgtggactttactgtggacactaatggtgtgtattcagagcctcgccccattggcaccagatacctgactcgtaatctgtaa

SEQ ID NO: 3607 - DNA, 2208 bp, Artificial Sequence
  Description of Artificial Sequence: Synthetic polynucleotide
atggctgccgatggttatcttccagattggctcgaggacactctctctgaaggaataagacagtggtggaagctcaaacctggcccaccaccaccaaagcccgcagagcggcatcaggacgacagcaggggtcttgtgcttcccgggcacaagtacctcggacccttcaacggactcgacaaaggagagccggtcaacgaggcagacgctgcggccctcgagcacgacaaggcctacgaccggcagctcgacagcggagacaacccgtacctcaagtacaaccacgccgacgcggagtttcaggagcgtcttaaagaagatacgtcttttgggggcaacctcggacgagcagtcttccaggcgaaaaagagggttcttgaacctctgggcctggttgaggaacctgttaagacggctccgggaaaaaagaggccggtagagcactctcctgcggagccagactcctcctcgggaaccggaaaagcgggccagcagcctgcaagaaagagattgaatttcggtcagactggagacgcagactccgtacctgacccccagcctctcggacagccaccagcagcccccacaagtttgggatctactacaatggctacaggcagtggcgcaccaatggcagacaataacgagggtgccgatggagtgggtaattcctcaggaaattggcattgcgattcccaatggctgggcgacagagtcatcaccaccagcacccgaacctgggccctgcccacctacaacaaccacctctataagcaaatctccagccaatcaggagcatcgaacgacaaccactactttggctacagcaccccttgggggtattttgacttcaacagattccactgtcacttctccccacgtgactggcaaagactcatcaacaacaactggggattccgacccaagagactcaacttcaagctctttaacattcaagtcaaagaggtcacgcagaatgacggtacgacgacgattgccaataaccttaccagcacggttcaggtgtttactgactcggagtaccagctcccgtacgtcctcggctcggcgcatcaaggatgcctcccgccgtttccagcggacgtcttcatggtcccacagtatggatacctcaccctgaacaacgggagtcaggcggtaggacactcttcctcttactgcctggagtactttccttctcagatgctgcgtaccggaaacaactttaccttcagctacacctttgaggacgtgcctttccacagcagctacgctcacagccagagtttggaccggctgatgaatcctctgatcgaccagtatctgtattatctgaacaggacacaatcaaatagtggaactcttcagcagtctaggctactgtttagccaagctggacccaccagcatgtctcttcaagctaaaaactggctgcctggaccttgctacagacagcagcgtctgtcaaagcaggcaaacgacaacaacaacagcaactttccctggactgcggctacaaagtatcatctaaatggtcgggactcgttggttaatccaggaccagctatggccagccacaaagacgatgaagaaaagtttttccccatgcatggaaccctgatatttggtaaacaaggaacaaatgctaacgacgcggatttggaacatgtcatgattacagatgaagaagaaatcaggaccaccaatcccgtggctacagagcagtacggaaacgtgtcaaataatttgcaaaactcaaatactggtccaactacagaaaatgtcaatcaccagggagcgttacctggtatggtgtggcaggatcgagacgtgtacctgcagggacccatttgggccaagattcctcacaccgacggacactttcacccttctccactgatgggaggttttggactcaaacacccgcctcctcaaatcatgatcaaaaacactcctgttccagccaatcctcctacaaacttcagcgcggcaaagtttgcttccttcatcacacagtattccacgggacaggtcagcgtggagatcgagtgggagctgcagaaggagaacagcaaacgctggaaccccgagatccagtacacttccaactacaacaaatctgttaatgtggactttactgtagacactaatggtgtgtattcagagcctcgccccattggcaccagatacctgactcgtaatctgtaa

SEQ ID NO: 3608 - DNA, 2208 bp, Artificial Sequence
  Description of Artificial Sequence: Synthetic polynucleotide
atggctgccgatggttatcttccagattggctcgaggacactctctctgaaggaataagacagtggtggaagctcaaacctggcccaccaccaccaaggcccgcagagcggcatcaggacgacagcaggggtcttgtgcttcctgggtacaagtacctcggacccttcaacggactcgacaaaggagagccggtcaacgaggtagacgctgcggccctcgagcacgacaaggcctacgaccggcagctcgacagcggagacaacccgtacctcaagtacaaccacgccgacgcggagtttcaggagcgtcttaaagaagatacgtcttttgggggcaacctcggacgagcagtcttccaggcgaaaaagagggttcttgaacctctgggcctggttgaggaacctgttaagacggctccgggaaaaaagaggccggtagagcactctcctgcggagccagactcctcctcgggaaccggaaaagcgggccagcagcctgcaagaaagagattgaatttcggtcagactggagacgcagactccgtacctgacccccagcctctcggacagccaccagcagcccccacaagtttgggatctactacaatggctacaggcagtggcgcaccaatggcagacaataacgagggtgccgatggagtgggtaattcctcaggaaattggcattgcgattcccaatggctgggcgacagagtcatcaccaccagcacccgaacctgggccctgcccacctacaacaaccacctctacaagcaaatctccagccaatcaggagcatcgaacgacaaccactactttggctacagcaccccttgggggtattttgacttcaacagattccactgtcacttctccccacgtgactggcaaagactcatcaacaacaactggggattccgacccaagagactcaacttcaagctctttaacattcaagtcaaagaggtcacgcagagtgacggtacgacgacgattgccaataaccttaccagcacggttcaggtgtttactgactcggagtaccagctcccgtacgtcctcggctcggcgcatcaaggatgcctcccgccgtttccagcggacgtcttcatggtcccacagtatggatacctcaccctgaacaacgggagtcaggcggtaggacgctcttccttttactgcctggagtactttccttctcagatgctgcgtaccggaaacaactttaccttcagctacacctttgaggacgtgcccttccacagcagctacgctcacagccagagtttggaccggctgatgaatcctctgatcgaccagtatctgtattatctgaacaggacacaatcaaatagtggaactcttcagcagtctaggctactgtttagccaagctggacccaccagcatgtcccttcaagctaaaaactggctgcctggaccttgctacagacagcagcgtctgtcaaagcaggcaaacgacaacaacaacagcaactttccctggactgcggctacaaagtatcatctaaatggtcgggactcgttggttaatccaggaccagctatggccagccacaaagacgatgaagaaaagtttttccccatgcatggaaccctgatatttggtaaacaaggaacaaatgctaacgacgcggatttggaacatgtcatgattacagatgaagaagaaatcaggaccaccaatcccgtggctacagagcagtacggaaacgtgtcaaataatttgcaaaactcaaatactggtccaactacagaaaatgtcaatcaccagggagcgttacctggtatggtgtggcaggatcgagacgtgtacctgcagggacccatttgggccaagattcctcacaccgacggacactttcacccttctccactgatgggaggttttggactcaaacacccgcctcctcaaatcatgatcaaaaacactcctgttccagccaatcctcctacaaacttcagcgcggcaaagtttgcttccttcatcacacagtattccacgggacaggtcagcgtggagatcgagtgggagctgcagaaggagaacagcaaacgctggaaccccgagatccagtacacttccaactacaacaaatctgttaatgtggactttactgtggacgctaatggtgtgtattcagagcctcgccccattggcaccagatacctgactcgtaatctgtaa

SEQ ID NO: 3609 - DNA, 2208 bp, Artificial Sequence
  Description of Artificial Sequence: Synthetic polynucleotide
atggctgccgatggttatcttccagattggctcgaggacactctctctgaaggaataagacagtggtggaagctcaaacctggcccaccaccaccaaggcccgcagagcggcatcaggacgacagcaggggtcttgtgcttcctgggtacaagtacctcggacccttcaacggactcgacaaaggagagccggtcaacgaggcagacgctgcggccctcgagcacgacaaggcctacgaccggcagctcgacagcggagacaacccgtacctcaagtacaaccacgccgacgcggagtttcaggagcgtcttaaagaagatacgtcttttgggggcaacctcggacgagcagtcttccaggcgaaaaagagggttcttgaacctctgggcctggttgaggaacctgttaagacggctccgggaaaaaagaggccggtagagcactctcctgcggagccagactcctcctcgggaaccggaaaagcgggccagcagcctgcaagaaagagattgaatttcggtcagactggagacgcagactccgtacctgacccccagcctctcggacagccaccagcagcccccacaagtttgggatctactacaatggctacaggcagtggcgcaccaatggcagacaataacgagggtgccgatggagtgggtaattcctcaggaaattggcattgcgattcccaatggctgggcgacagagtcatcaccaccagcacccgaacctgggccctgcccacctacaacaaccacctctacaagcaaatctccagccaatcaggagcatcgaacgacaaccactactttggctacagcaccccttgggggtattttgacttcaacagattccactgtcacttctccccacgtgactggcaaagactcatcaacaacaactggggattccgacccaagagactcaacttcaagctctttaacattcaagtcaaagaggtcacgcagaatgacggtacgacgacgattgccaataaccttaccagcacggttcaggtgtttactgactcggagtaccagctcccgtacgtcctcggctcggcgcatcaaggatgcctcccgccgtttccagcggacgtcttcatggtcccacagtatggatacctcaccctgaacaacgggagtcaggcggtaggacgctcttccttttactgcctggagtactttccttctcagatgctgcgtaccggaaacaactttaccttcagctacacctttgaggacgtgcccttccacagcagctacgctcacagccagagtttggaccggctgatgaatcctctgatcgaccagtatctgtattatctgaacaggacacaatcaaatagtggaactcttcagcagtctaggctactgtttagccaagctggacccaccagcatgtcccttcaagctaaaaactggctgcctggaccttgctacagacagcagcgtctgtcaaagcaggcaaacgacaacaacaacagcaactttccctggactgcggctacaaagtatcatctaaatggtcgggactcgttggttaatccaggaccagctatggccagccacaaagacgatgaagaaaagtttttccccatgcatggaaccctgatatttggtaaacaaggaacaaatgctaacgacgcggatttggaacatgtcatgattacagatgaagaagaaatcaggaccaccaatcccgtggctacagagcagtacggaaacgtgtcaaataatttgcaaaactcaaatactggtccaactacagaaaatgtcaatcaccagggagcgttacctggtatggtgtggcaggatcgagacgtgtacctgcagggacccatttgggccaagattcctcacaccgacggacactttcacccttctccactgatgggaggttttggactcaaacacccgcctcctcaaatcatgatcaaaaacactcctgttccagccaatcctcctacaaacttcagcgcggcaaagtttgcttccttcatcacacagtattccacgggacaggtcagcgtggagatcgagtgggagctgcagaaggagaacagcaaacgctggaaccccgagatccagtatacctccaactacaacaagtctgttaatgtggactttactgtggacactaatggcgtgtattcagagcctcgccccattggcacaagatacctgactcgtaatctgtaa

SEQ ID NO: 3610 - DNA, 2208 bp, Artificial Sequence
  Description of Artificial Sequence: Synthetic polynucleotide
atggctgccgatggttatcttccagattggctcgaggacactctctctgaaggaataagacagtggtggaagctcaaacctggcccaccaccaccaaagcccgcagagcggcatcaggacgacagcaggggtcttgtgcttcccgggcacaagtacctcggacccttcaacggactcgacaaaggagagccggtcaacgaggcagacgctgcggccctcgagcacgacaaggcctacgaccggcagctcgacagcggagacaacccgtacctcaagtacaaccacgccgacgcggagtttcaggagcgtcttaaagaagatacgtcttttgggggcaacctcggacgagcagtcttccaggcgaaaaagagggttcttgaacctctgggcctggttgaggaacctgttaagacggctccgggaaaaaagaggccggtagagcactctcctgcggagccagactcctcctcgggaaccggaaaagcgggccagcagcctgcaagaaagagattgaatttcggtcagactggagacgcagactccgtacctgacccccagcctctcggacagccaccagcagcccccacaagtttgggatctactacaatggctacaggcagtggcgcaccaatggcagacaataacgagggtgccgatggagtgggtaattcctcaggaaattggcattgcgattcccaatggctgggcgacagagtcatcaccaccagcacccgaacctgggccctgcccacctacaacaaccacctctataagcaaatctccagccaatcaggagcatcgaacgacaaccactactttggctacagcaccccttgggggtattttgacttcaacagattccactgtcacttctccccacgtgactggcaaagactcatcaacaacaactggggattccgacccaagagactcaacttcaagctctttaacattcaagtcaaagaggtcacgcagaatgacggtacgacgacgattgccaataaccttaccagcacggttcaggtgtttactgactcggagtaccagctcccgtacgtcctcggctcggcgcatcaaggatgcctcccgccgtttccagcggacgtcttcatggtcccacagtatggatacctcaccctgaacaacgggagtcaggcggtaggacactcttcctcttactgcctggagtactttccttctcagatgctgcgtaccggaaacaactttaccttcagctacacctttgaggacgtgcctttccacagcagctacgctcacagccagagtttggaccggctgatgaatcctctgatcgaccagtatctgtattatctgaacaggacacaatcaaatagtggaactcttcagcagtctaggctactgtttagccaagctggacccaccagcatgtctcttcaagctaaaaactggctgcctggaccttgctacagacagcagcgtctgtcaaagcaggcaaacgacaacaacaacagcaactttccctggactgcggctacaaagtatcatctaaatggtcgggactcgttggttaatccaggaccagctatggccagccacaaagacgatgaagaaaagtttttccccatgcatggaaccctgatatttggtaaacaaggaacaaatgctaacgacgcggatttggaacatgtcatgattacagatgaagaagaaatcaggaccaccaatcccgtggctacagagcagtacggaaacgtgtcaaataatttgcaaaactcaaatactggtccaactacagaaaatgtcaatcaccagggagcgttacctggtatggtgtggcaggatcgagacgtgtacctgcagggacccatttgggccaagattcctcacaccgacggacactttcacccttctccactgatgggaggttttggactcaaacacccgcctcctcaaatcatgatcaaaaacactcctgttccagccaatcctcctacaaacttcagcgcggcaaagtttgcttccttcatcacacagtattccacgggacaggtcagcgtggagatcgagtgggagctgcagaaggagaacagcaaacgctggaaccccgagatccagtacacttccaactacaacaaatctgttaatgtggactttactgtggacgctaatggtgtgtattcagagcctcgccccattggcaccagatacctgactcgtaatctgtaa

SEQ ID NO: 3611 - DNA, 2208 bp, Artificial Sequence
  Description of Artificial Sequence: Synthetic polynucleotide
atggctgccgatggttatcttccagattggctcgaggacactctctctgaaggaataagacagtggtggaagctcaaacctggcccaccaccaccaaggcccgcagagcggcatcaggacgacagcaggggtcttgtgcttcctgggtacaagtacctcggacccttcaacggactcgacaaaggagagccggtcaacgaggcagacgctgcggccctcgagcacgacaaggcctacgaccggcagctcgacagcggagacaacccgtacctcaagtacaaccacgccgacgcggagtttcaggagcgtcttaaagaagatacgtcttttgggggcaacctcggacgagcagtcttccaggcgaaaaagagggttcttgaacctctgggcctggttgaggaacctgttaagacggctccgggaaaaaagaggccggtagagcactctcctgcggagccagactcctcctcgggaaccggaaaagcgggccagcagcctgcaagaaagagattgaatttcggtcagactggagacgcagactccgtacctgacccccagcctctcggacagccaccagcagcccccacaagtttgggatctactacaatggctacaggcagtggcgcaccaatggcagacaataacgagggtgccgatggagtgggtaattcctcaggaaattggcattgcgattcccaatggctgggcgacagagtcatcaccaccagcacccgaacctgggccctgcccacctacaacaaccacctctacaagcaaatctccagccaatcaggagcatcgaacgacaaccactactttggctacagcaccccttgggggtattttgacttcaacagattccactgtcacttctccccacgtgactggcaaagactcatcaacaacaactggggattccgacccaagagactcaacttcaagctctttaacattcaagtcaaagaggtcacgcagaatgacggtacgacgacgattgccaataaccttaccagcacggttcaggtgtttactgactcggagtaccagctcccgtacgtcctcggctcggcgcatcaaggatgcctcccgccgtttccagcggacgtcttcatggtcccacagtatggatacctcaccctgaacaacgggagtcaggcggtaggacgctcttccttttactgcctggagtactttccttctcagatgctgcgtaccggaaacaactttaccttcagctacacctttgaggacgtgcccttccacagcagctacgctcacagccagagtttggaccggctgatgaatcctctgatcgaccagtatctgtattatctgaacaggacacaatcaaatagtggaactcttcagcagtctaggctactgtttagccaagctggacccaccagcatgtcccttcaagctaaaaactggctgcctggaccttgctacagacagcagcgtctgtcaaagcaggcaaacgacaacaacaacagcaactttccctggactgcggctacaaagtatcatctaaatggtcgggactcgttggttaatccaggaccagctatggccagccacaaagacgatgaagaaaagtttttccccatgcatggaaccctgatatttggtaaacaaggaacaaatgctaacgacgcggatttggaacatgtcatgattacagatgaagaagaaatcaggaccaccaatcccgtggctacagagcagtacggaaacgtgtcaaataatttgcaaaactcaaatactggtccaactacagaaaatgtcaatcaccagggagcgttacctggtatggtgtggcaggatcgagacgtgtacctgcagggacccatttgggccaagattcctcacaccgacggacactttcacccttctccactgatgggaggttttggactcaaacacccgcctcctcaaatcatgatcaaaaacactcctgttccagccaatcctcctacaaacttcagcgcggcaaagtttgcttccttcatcacacagtattccacgggacaggccagcgtggagatcgagtgggagctgcagaaggagaacagcaaacgctggaaccccgagatccagtacacttccaactacaacaaatctgttaatgtggactttactgtggacgctaatggtgtgtattcagagcctcgccccattggcaccagatacctgactcgtaatctgtaa

SEQ ID NO: 3612 - DNA, 2208 bp, Artificial Sequence
  Description of Artificial Sequence: Synthetic polynucleotide
atggctgccgatggttatcttccagattggctcgaggacactctctctgaaggaataagacagtggtggaagctcaaacctggcccaccaccgccaaagcccgcagggcggcataaggacgacagcaggggtcttgtgcttcctgggtacaagtacctcggacccttcaacggactcgacaagggagagccggtcaacgaggcagacgccgcggccctcgagcacgacaaggcctacgaccggcagctcgacagcggagacaacccgtacctcaagtacaaccacgccggcgcggagtttcaggagcgccttaaagaagatacgtcttttgggggcaacctcggacgagcagtattccaggcgaaaaagagggttcttgaacctctgggcctggttgaggagcctgttaagacggccccgggaaaaaagaggccggtagagcactctcctgtggagccagactcctcctcgggaaccggaaaagcgggccagcagcctgcgaggaagagattgaattttggtcagactggagacgcagactccgtacctgacccccagcctctcggacagccaccagcagcccccacaagtttgggatctactacaatggctacaggcagtggcgcaccaatggcagacaataacgagggtgccgatggagtgggtaattcctcagggaattggcattgcgattcccaatggttgggcgacagagtcatcaccaccagcacccgaacctgggccctgcccacctacaacaaccacctctacaagcaaatctccagccaatcaggagcagcgaacgacaaccactactttggctacagcaccccttgggggtattttgacttcaacagattccactgccacttttcaccacgtgactggcaaagactcatcaacaacaactggggattccgacccaagagactcaacttcaagctctttaacattcaagtcaaagaggtcacgcagaatgacggtacgacgacgattgccaataaccttaccagcacggttcaggtgtttactgactcggagtaccagctcccgtacgtcctcggctcggcgcatcaaggatgcctcccgccgtttccagcggacgtcttcatggtcccacagtatggatacctcaccctgaacaacgggagtcaggcggtaggacgctcttccttttactgcctggagtactttccttctcagatgctgcgtaccggaaacaactttaccttcagctacacctttgaggacgtgcccttccacagcagctacgctcacagccagagtttggaccggctgatgaatcctctgatcgaccagtatctgtattatctgaacaggacacaatcaaatagtggaactcttcagcagtctaggctactgtttagccaagctggacccaccagcatgtcccttcaagctaaaaactggctgcctggaccttgctacagacagcagcgtctgtcaaagcaggcaaacgacaacaacaacagcaactttccctggactgcggctacaaagtatcatctaaatggtcgggactcgttggttaatccaggaccagctatggccagccacaaagacgatgaagaaaagtttttccccatgcatggaaccctgatatttggtaaacaaggaacaaatgctaacgacgcggatttggaacatgtcatgattacagatgaagaagaaatcaggaccaccaatcccgtggctacagagcagtacggaaacgtgtcaaataatttgcaaaactcaaatactggtccaactacagaaaatgtcaatcaccagggagcgttacctggtatggtgtggcaggatcgagacgtgtacctgcagggacccatttgggccaagattcctcacaccgacggacactttcacccttctccactgatgggaggttttggactcaaacacccgcctcctcaaatcatgatcaaaaacactcctgttccagccaatcctcctacaaacttcagcgcggcaaagtttgcttccttcatcacacagtattccacgggacaggtcagcgtggagatcgagtgggagctgcagaaggagaacagcaaacgctggaaccccgagatccagtacacttccaactacaacaaatctgttaatgtggactttactgtggacgctaatggtgtgtattcagagcctcgccccattggcaccagatacctgactcgtaatctgtaa

SEQ ID NO: 3613 - DNA, 2208 bp, Artificial Sequence
  Description of Artificial Sequence: Synthetic polynucleotide
atggctgccgatggttatcttccagattggctcgaggacactctctctgaaggaataagacagtggtggaagctcaaacctggcccaccaccaccaaggcccgcagagcggcatcaggacgacagcaggggtcttgtgcttcctgggtacaagtacctcggacccttcaacggactcgacaaaggagagccggtcaacgaggcagacgctgcggccctcgagcacgacaaggcctacgaccggcagctcgacagcggagacaacccgtacctcaagtacaaccacgccgacgcggagtttcaggagcgtcttaaagaagatacgtcttttgggggcaacctcggacgagcagtcttccaggcgaaaaagagggttcttgaacctctgggcctggttgaggaacctgttaagacggctccgggaaaaaagaggccggtagagcactctcctgcggagccagactcctcctcgggaaccggaaaagcgggccagcagcctgcaagaaagagattgaatttcggtcagactggagacgcagactccgtacctgacccccagcctctcggacagccaccagcagcccccacaagtttgggatctactacaatggctacaggcagtggcgcaccaatggcagacaataacgagggtgccgatggagtgggtaattcctcaggaaattggcattgcgattcccaatggctgggcgacagagtcatcaccaccagcacccgaacctgggccctgcccacctacaacaaccacctctacaagcaaatctccagccaatcaggagcatcgaacgacaaccactactttggctacagcaccccttgggggtattttgacttcaacagattccactgtcacttctccccacgtgactggcaaagactcatcaacaacaactggggattccgacccaagagactcaacttcaagctctttaacattcaagtcaaagaggtcacgcagaatgacggtacgacgacgattgccaataaccttaccagcacggttcaggtgtttactgactcggagtaccagctcccgtacgtcctcggctcggcgcatcaaggatgcctcccgccgtttccagcggacgtcttcatggtcccacagtatggatacctcaccctgaacaacgggagtcaggcggtaggacgctcttccttttactgcctggagtactttccttctcagatgctgcgtaccggaaacaactttaccttcagctacacctttgaggacgtgcccttccacagcagctacgctcacagccagagtttggaccggctgatgaatcctctgatcgaccagtatctgtattatctgaacaggacacaatcaaatagtggaactcttcagcagtctaggctactgtttagccaagctggacccaccagcatgtcccttcaagctaaaaactggctgcctggaccttgctacagacagcagcgtctgtcaaagcaggcaaacgacaacaacaacagcaactttccctggactgcggctacaaagtatcatctaaatggtcgggactcgttggttaatccaggaccagctatggccagccacaaagacgatgaagaaaagtttttccccatgcatggaaccctgatatttggtaaacaaggaacaaatgctaacgacgcggatttggaacatgtcatgattacagatgaagaagaaatcaggaccaccaatcccgtggctacagagcagtacggaaacgtgtcaaataatttgcaaaactcaaatactggtccaactacagaaaatgtcaatcaccagggagcgttacctggtatggtgtggcaggatcgagacgtgtacctgcagggacccatttgggccaagattcctcacaccgacggacactttcacccttctccactgatgggaggttttggactcaaacacccgcctcctcaaatcatgatcaaaaacactcctgttccagcctatcctcctacaaacttcagcgcggcaaagtttgcttccttcatcacacagtattccacgagacaggtcagcgtggagatcgagtgggagctgcagaaggagaacagcaaacgctggaaccccgagatccagtacacttccaactacaacaaatctgttaatgtggactttactgtggacgctaatggtgtgtattcagagcctcgccccattggcaccagatacctgactcgtaatctgtaa

SEQ ID NO: 3614 - DNA, 2208 bp, Artificial Sequence
  Description of Artificial Sequence: Synthetic polynucleotide
atggctgccgatggttatcttccagattggctcgaggacactctctctgaaggaataagacagtggtggaagctcaaacctggcccaccaccaccaaggcccgcagagcggcatcaggacgacagcaggggtcttgtgcttcctgggtacaagtacctcggacccttcaacggactcgacaaaggagagccggtcaacgaggcagacgctgcggccctcgagcacgacaaggcctacgaccggcagctcgacagcggagacaacccgtacctcaagtacaaccacgccgacgcggagtttcaggagcgtcttaaagaagatacgtcttttgggggcaacctcggacgagcagtcttccaggcgaaaaagagggttcttgaacctctgggcctggttgaggaacctgttaagacggctccgggaaaaaagaggccggtagagcactctcctgcggagccagactcctcctcgggaaccggaaaagcgggccagcagcctgcaagaaagagattgaatttcggtcagactggagacgcagactccgtacctgacccccagcctctcggacagccaccagcagcccccacaagtttgggatctactacaatggctacaggcagtggcgcaccaatggcagacaataacgagggtgccgatggagtgggtaattcctcaggaaattggcattgcgattcccaatggctgggcgacagagtcatcaccaccagcacccgaacctgggccctgcccacctacaacaaccacctctacaagcaaatctccagccaatcaggagcatcgaacgacaaccactactttggctacagcaccccttgggggtattttgacttcaacagattccactgtcacttctccccacgtgactggcaaagactcatcaacaacaactggggattccgacccaagagactcaacttcaagctctttaacattcaagtcaaagaggtcacgcagaatgacggtacgacgacgattgccaataaccttaccagcacggttcaggtgtttactgactcggagtaccagctcccgtacgtcctcggctcggcgcatcaaggatgcctcccgccgtttccagcggacgtcttcatggtcccacagtatggatacctcaccctgaacaacgggagtcaggcggtaggacgctcttccttttactgcctggagtactttccttctcagatgctgcgtaccggaaacaactttaccttcagctacacctttgaggacgtgcccttccacagcagctacgctcacagccagagtttggaccggctgatgaatcctctgatcgaccagtatctgtattatctgaacaggacacaatcaaatagtggaactcttcagcagtctaggctactgtttagccaagctggacccaccagcatgtcccttcaagctaaaaactggctgcctggaccttgctacagacagcagcgtctgtcaaagcaggcaaacgacaacaacaacagcaactttccctggactgcggctacaaagtatcatctaaatggccgggactcgttggttaatccaggaccagctatggccagccacaaagacgatgaagaaaagtttttccccatgcatggaaccctgatatttggcaaacaagggacaaatgctaacgacgcggatttggacaatgtcatgattacagatgaagaagaaatccgtaccaccaatcccgtggctacggagcagtacgggactgtgtcaaataatttgcaaaactcaaatactggtccaactactggaactgtcaatcaccaaggagcgttacctggtatggtgtggcaggatcgagacgtgtaccttcagggacccatttgggccaagattcctcacaccgatggacactttcacccttctccgctgatgggaggttttggactcaaacacccgcctcctcagatcatgatcaaaaacactcccgttccagccaatcctcccacaaacttcagttctgccaagtttgcttctttcatcacacagtattccacgggacaggttagcgtggagatcgagtgggagctgcagaaggagaacagcaaacgctggaaccccgagatccagtacacttccaactacaacaagtctgttaatgtggactttactgtggacactaatggtgtgtattcagagcctcgccccattggcaccagatacctgactcgtaatctgtaa

SEQ ID NO: 3615 - DNA, 2208 bp, Artificial Sequence
  Description of Artificial Sequence: Synthetic polynucleotide
atggctgccgatggttatcttccagattggctcgaggacattctctctgaaggaataagacagtggtggaagctcaaacctggcccaccaccaccaaagcccgcagagcggcataaggacgacagcaggggtcttgtgcttcctgggtacaagtacctcggacccttcaacggactcgacaaaggagagccggtcaacgaggcagacgccgcggccctcgagcacgacaaggcctacgaccggcagctcgacagcggagacaacccgtacctcaagtacaaccacgccgacgcggagtttcaggagcgtcttaaagaagatacgtcttttgggggcaacctcggacgagcagtcttccaggcaaaaaagagggttcttgaacctctgggcctggttgaggaacctgttaagacggctccgggaaaaaagaggccggtagagcaatctcctgcggagccagactcctcctcgggaaccggaaaggcgggcaaccagcctgcaagaaagagattgaattttggtcagactggagacgcagactccgtacctgacccccagcctctcggacagccaccagcagccccctctggtctgggatctactacaatggctacaggcagtggcgcaccaatggcagacaataacgagggtgccgatggagtgggtaattcctcaggaaattggcattgcgattcccaatggttgggcgacagagtcatcaccaccagcacccgaacctgggccctgcccacctacaacaatcacctctacaagcaaatctccagccaatcaggagcagcgaacgacaaccactactttggctacagcaccccctgggggtattttgacttcaacagattccactgccacttttcaccacgtgactggcaaagactcatcaacaacaactggggattccgacccaaaagactcaacttcaagctctttaacattcaagtcaaagaggtcacgcagaatgacggtacgacgacgattgccaataaccttaccagcacggttcaggtgtttactgactcggagtaccagctcccgtacgtcctcggctcggcgcatcaaggatgcctcccgccgtttccagcggacgtcttcatggtcccacagtatggatacctcaccctgaacaacgggagtcaggcggtaggacgctcttccttttactgcctggagtactttccttctcagatgcttcgtaccggaaacaactttaccttcagttacacctttgaagacgttcctttccacagcagctacgctcacagtcaaagtctggaccggctgatgaatcctctgatagaccagtacctgtattatctaaacaaaacacaatcaaatagtggaactcttcagcagtctcggctactgtttagtcaagctggacccaccagcatgtctcttcaagctaaaaactggctgcctggaccttgctacagacaacagcgtctgtcaaagcaggcaaacgacaacaacaacagcaactttccctggactgcggctacaaagtatcatctaaatggccgggactcgttggttaatccaggaccagctatggccagccacaaagacgatgaagaaaagtttttccccatgcatggaaccctgatatttggtaaacaaggaacaaatgctaacgacgcggatttggacaatgtcatgattacagatgaagaagaaatccgcaccaccaatcccgtggctacggagcagtacgggactgtgtcaaataatttgcaaaactcaaatactggtccaactactggaactgtcaatcaccaaggagcgttacctggtatggtgtggcaggatcgagacgtgtaccttcagggacccatttgggccaagattcctcacaccgatggacactttcatccttctccactgatgggaggttttggactcaaacacccgcctcctcagatcatgatcaaaaacactcccgttccagccaatcctcctacaaacttcagttctgccaagtttgcttctttcatcacacagtattccacggggcaggtcagcgtggagatagagtgggagctgcagaaggagaacagcaaacgctggaaccccgagatccagtatacttccaactacaacaagtctgttaatgtggactttactgtggacactaatggtgtgtattcagagcctcgccccattggcaccagatacctgactcgtaatctgtaa

SEQ ID NO: 3616 - DNA, 2208 bp, Artificial Sequence
  Description of Artificial Sequence: Synthetic polynucleotide
atggctgccgatggttatcttccagattggctcgaggacactctctctgaaggaataagacagtggtggaagctcaaacctggcccaccaccaccaaggcccgcagagcggcatcaggacgacagcaggggtcttgtgcttcctgggtacaagtacctcggacccttcaacggactcgacaaaggagagccggtcaacgaggcagacgctgcggccctcgagcacgacaaggcctacgaccggcagctcgacagcggagacaacccgtacctcaagtacaaccacgccggcgcggagtttcaggagcgccttaaagaagatacgtcttttgggggcaacctcggacgagcagtattccaggcgaaaaagagggttcttgaacctctgggcctggttgaggagcctgttaagacggccccgggaaaaaagaggccggtagagcactctcctgtggagccagactcctcctcgggaaccggaaaagcgggccagcagcctgcgaggaagagattgaattttggtcagactggagacgcagactccgtacctgacccccagcctctcggacagccaccagcagcccccacaagtttgggatctactacaatggctacaggcagtggcgcaccaatggcagacaataacgagggtgccgatggagtgggtaattcctcagggaattggcattgcgattcccaatggttgggcgacagagtcatcaccaccagcacccgaacctgggccctgcccacctacaacaaccacctctacaagcaaatctccagccaatcaggagcagcgaacgacaaccactactttggctacagcaccccctgggggtattttgacttcaacagattccactgccacttttcaccacgtgactggcaaagactcatcaacaacaactggggattccgacccaagagactcaacttcaagctctttaacattcaagtcaaagaggtcacgcagaatgacggtacgacgacgattgccaataaccttaccagcacggttccggtgtttactgactcggagtaccagctcccgtacgtcctcggctcggcgcatcaaggatgcctcccgccgtttccagcggacgtcttcatggtcccacagtatggatacctcaccctgaacaacgggagtcaggcggtaggacgctcttccttttactgcctggagtactttccttctcagatgcttcgtaccggaaacaactttaccttcagttacacctttgaagacgttcctttccacagcagctacgctcacagtcaaagtctggaccggctgatgaatcctcttatcgaccagtacctgtattatctaaacaaaacacaatcaaatagtggaactcttcagcagtctcggctactgtttagtcaagctggacctaccagcatgtctcttcaagctaaaaactggctgcctggaccttgctacagacaacagcgtctgtcaaagcaggcaaacgacaacaacaacagcaactttccctggactgcggctacaaagtatcatctaaatggccgggactcgttggttaatccaggaccagctatggccagccacaaagacgatgaagaaaagtttttccccatgcatggaaccctgatatttggcaaacaagggacaaatgctaacgacgcggatttggacaatgtcatgattacagatgaagaagaaatccgtaccaccaatcccgtggctacggagcagtacgggactgtgtcaaataatttgcaaaactcaaatactggtccaactactggaactgtcaatcaccaaggagcgttacctggtatggtgtggcaggatcgagacgtgtaccttcagggacccatttgggccaagattcctcacaccgatggacactttcacccttctccgctgatgggaggttttggactcaaacacccgcctcctcagatcatgatcaaaaacactcccgttccagccaatcctcccacaaacttcagttctgccaagtttgcttctttcatcacacagtattccacgggacaggttagcgtggagatcgagtgggagctgcagaaggagaacagcaaacgctggaaccccgagatccagtacacttccaactacaacaagtctgttaatgtggactttactgtggacactaatggtgtgtattcagagcctcgccccattggcaccagatacctgactcgtaatctgtaa

SEQ ID NO: 3617 - DNA, 2205 bp, Artificial Sequence
  Description of Artificial Sequence: Synthetic polynucleotide
atggctgccgatggttatcttccagattggctcgaggacactctctctgaaggaataagacagtggtggaagctcaaacctggcccaccaccaaggcccgcagagcggcatcaggacgacagcaggggtcttgtgcttcctgggtacaagtacctcggacccttcaacggactcgacaaaggagagccggtcaacgaggcagacgctgcggccctcgagcacgacaaggcctacgaccggcagctcgacagcggagacaacccgtacctcaagtacaaccacgccgacgcggagtttcaggagcgtcttaaagaagatacgtcttttgggggcaacctcggacgagcagtcttccaggcgaaaaagagggttcttgaacctctgggcctggttgaggaacctgttaagacggctccgggaaaaaagaggccggtagagcactctcctgcggagccagactcctcctcgggaaccggaaaagcgggccagcagcctgcaagaaagagattgaatttcggtcagactggagacgcagactccgtacctgacccccagcctctcggacagccaccagcagcccccacaagtttgggatctactacaatggctacaggcagtggcgcaccaatggcagacaataacgagggtgccgatggagtgggtaattcctcaggaaattggcattgcgattcccaatggctgggcgacagagtcatcaccaccagcacccgaacctgggccctgcccacctacaacaaccacctctacaagcaaatctccagccaatcaggagcatcgaacgacaaccactactttggctacagcaccccttgggggtattttgacttcaacagattccactgtcacttctccccacgtgactggcaaagactcatcaacaacaactggggattccgacccaagagactcaacttcaagctctttaacattcaagtcaaagaggtcacgcagaatgacggtacgacgacgattgccaataaccttaccagcacggttcaggtgtttactgactcggagtaccagctcccgtacgtcctcggctcggcgcatcaaggatgcctcccgccgtttccagcggacgtcttcatggtcccacagtatggatacctcaccctgaacaacgggagtcaggcggtaggacgctcttccttttactgcctggagtactttccttctcagatgctgcgtaccggaaacaactttaccttcagctacacctttgaggacgtgcccttccacagcagctacgctcacagccagagtttggaccggctgatgaatcctctgatcgaccagtatctgtattatctgaacaggacacaatcaaatagtggaactcttcagcagtctaggctactgtttagccaagctggacccaccagcatgtcccttcaagctaaaaactggctgcctggaccttgctacagacagcagcgtctgtcaaagcaggcaaacgacaacaacaacagcaactttccctggactgcggctacaaagtatcatctaaatggtcgggactcgttggttaatccaggaccagctatggccagccacaaagacgatgaagaaaagtttttccccatgcatggaaccctgatatttggtaaacaaggaacaaatgctaacgacgcggatttggaacatgtcatgattacagatgaagaagaaatcaggaccaccaatcccgtggctacagagcagtacggaaacgtgtcaaataatttgcaaaactcaaatactggtccaactacagaaaatgtcaatcaccagggagcgttacctggtatggtgtggcaggatcgagacgtgtacctgcagggacccatttgggccaagattcctcacaccgacggacactttcacccttctccactgatgggaggttttggactcaaacacccgcctcctcaaatcatgatcaaaaacactcctgttccagccaatcctcctacaaacttcagcgcggcaaagtttgcttccttcatcacacagtattccacgggacaggtcagcgtggagatcgagtgggagctgcagaaggagaacagcaaacgctggaaccccgagatccagtacacttccaactacaacaaatctgttaatgtggactttactgtggacgctaatggtgtgtattcagagcctcgccccattggcaccagatacctgactcgtaatctgtaa

SEQ ID NO: 3618 - DNA, 2208 bp, Artificial Sequence
  Description of Artificial Sequence: Synthetic polynucleotide
atggctgccgatggttatcttccagattggctcgaggacactctctctgaaggaataagacagtggtggaagctcaaacctggcccaccaccaccaaagcccgcagagcggcatcaggacgacagcaggggtcttgtgcttcccgggcacaagtacctcggacccttcaacggactcgacaaaggagagccggtcaacgaggcagacgctgcggccctcgagcacgacaaggcctacgaccggcagctcgacagcggagacaacccgtacctcaagtacaaccacgccgacgcggagtttcaggagcgtcttaaagaagatacgtcttttgggggcaacctcggacgagcagtcttccaggcgaaaaagagggttcttgaacctctgggcctggttgaggaacctgttaagacggctccgggaaaaaagaggccggtagagcactctcctgcggagccagactcctcctcgggaaccggaaaagcgggccagcagcctgcaagaaagagattgaatttcggtcagactggagacgcagactccgtacctgacccccagcctctcggacagccaccagcagcccccacaagtttgggatctactacaatggctacaggcagtggcgcaccaatggcagacaataacgagggtgccgatggagtgggtaattcctcaggaaattggcattgcgattcccaatggctgggcgacagagtcatcaccaccagcacccgaacctgggccctgcccacctacaacaaccacctctacaagcaaatctccagccaatcaggagcatcgaacgacaaccactactttggctacagcaccccttgggggtattttgacttcaacagattccactgtcacttctccccacgtgactggcaaagactcatcaacaacaactggggattccgacccaagagactcaacttcaagctctttaacattcaagtcaaagaggtcacgcagaatgacggtacgacgacgattgccaataaccttaccagcacggttcaggtgtttactgactcggagtaccagctcccgtacgtcctcggctcggcgcatcaaggatgcctcccgccgtttccagcggacgtcttcatggtcccacagtatggatacctcaccctgaacaacgggagtcaggcggtaggacgctcttccttttactgcctggagtactttccttctcagatgctgcgtaccggaaacaactttaccttcagctacacctttgaggacgtgcccttccacagcagctacgctcacagccagagtttggaccggctgatgaatcctctgatcgaccagtatctgtattatctgaacaggacacaatcaaatagtggaactcttcagcagtctaggctactgtttagccaagctggacccaccagcatgtcccttcaagctaaaaactggctgcctggaccttgctacagacagcagcgtctgtcaaagcaggcaaacgacaacaacaacagcaactttccctggactgcggctacaaagtatcatctaaatggtcgggactcgttggttaatccaggaccagctatggccagccacaaagacgatgaagaaaagtttttccccatgcatggaaccctgatatttggtaaacaaggaacaaatgctaacgacgcggatttggaacatgtcatgattacagatgaagaagaaatcaggaccaccaatcccgtggctacagagcagtacggaaacgtgtcaaataatttgcaaaactcaaatactggtccaactacagaaaatgtcaatcaccagggagcgttacctggtatggtgtggcaggatcgagacgtgtacctgcagggacccatttgggccaagattcctcacaccgacggacactttcacccttctccactgatgggaggttttggactcaaacacccgcctcctcaaatcatgatcaaaaacactcctgttccagccaatcctcctacaaacttcagcgcggcaaagtttgcttccttcatcacacagtattccacgggacaggtcagcgtggagatcgagtgggagctgcagaaggagaacagcaaacgctggaaccccgagatccagtacacttccaactacaacaaatctgttaatgtggactttactgtagacactaatggtgtgtattcagagcctcgccccattggcaccagatacctgactcgtaatctgtaa

SEQ ID NO: 3619 - DNA, 2208 bp, Artificial Sequence
  Description of Artificial Sequence: Synthetic polynucleotide
atggctgccgatggttatcttccagattggctcgaggacactctctctgaaggaataagacagtggtggaagctcaaacctggcccaccaccaccaaggcccgcagagcggcatcaggacgacagcaggggtcttgtgcttcctgggtacaagtacctcggacccttcaacggactcgacaaaggagagccggtcaacgaggcagacgctgcggccctcgagcacgacaaggcctacgaccggcagctcgacagcggagacaacccgtacctcaagtacaaccacgccgacgcggagtttcaggagcgtcttaaagaagatacgtcttttgggggcaacctcggacgagcagtcttccaggcgaaaaagagggttcttgaacctctgggcctggttgaggaacctgttaagacggctccgggaaaaaagaggccggtagagcactctcctgcggagccagactcctcctcgggaaccggaaaagcgggccagcagcctgcaagaaagagattgaatttcggtcagactggagacgcagactccgtacctgacccccagcctctcggacagccaccagcagcccccacaagtttgggatctactacaatggctacaggcagtggcgcaccaatggcagacaataacgagggtgccgatggagtgggtaattcctcaggaaattggcattgcgattcccaatggctgggcgacagagtcatcaccaccagcacccgaacctgggccctgcccacctacaacaaccacctctacaagcaaatctccagccaatcaggagcatcgaacgacaaccactactttggctacagcaccccttgggggtattttgacttcaacagattccactgtcacttctccccacgtgactggcaaagactcatcaacaacaactggggattccgacccaagagactcaacttcaagctctttaacattcaagtcaaagaggtcacgcagaatgacggtacgacgacgattgccaataaccttaccagcacggttcaggtgtttactgactcggagtaccagctcccgtacgtcctcggctcggcgcatcaaggatgcctcccgccgtttccagcggacgtcttcatggtcccacagtatggatacctcaccctgaacaacgggagtcaggcggtaggacactcttcctcttactgcctggagtactttccttctcagatgctgcgtaccggaaacaactttaccttcagctacacctttgaggacgtgcctttccacagcagctacgctcacagccagagtttggaccggctgatgaatcctctgatcgaccagtatctgtattatctgaacaggacacaatcaaatagtggaactcttcagcagtctaggctactgtttagccaagctggacccaccagcatgtctcttcaagctaaaaactggctgcctggaccttgctacagacagcagcgtctgtcaaagcaggcaaacgacaacaacaacagcaactttccctggactgcggctacaaagtatcatctaaatggtcgggactcgttggttaatccaggaccagctatggccagccacaaagacgatgaagaaaagtttttccccatgcatggaaccctgatatttggtaaacaaggaacaaatgctaacgacgcggatttggaacatgtcatgattacagatgaagaagaaatcaggaccaccaatcccgtggctacagagcagtacggaaacgtgtcaaataatttgcaaaactcaaatactggtccaactacagaaaatgtcaatcaccagggagcgttacctggtatggtgtggcaggatcgagacgtgtacctgcagggacccatttgggccaagattcctcacaccgacggacactttcacccttctccactgatgggaggttttggactcaaacacccgcctcctcaaatcatgatcaaaaacactcctgttccagccaatcctcctacaaacttcagcgcggcaaagtttgcttccttcatcacacagtattccacgggacaggtcagcgtggagatcgagtgggagctgcagaaggagaacagcaaacgctggaaccccgagatccagtacacttccaactacaacaaatctgttaatgtggactttactgtggacgctaatggtgtgtattcagagcctcgccccattggcaccagatacctgactcgtaatctgtaa

SEQ ID NO: 3620 - DNA, 2208 bp, Artificial Sequence
  Description of Artificial Sequence: Synthetic polynucleotide
atggctgccgatggttatcttccagattggctcgaggacactctctctgaaggaataagacagtggtggaagctcaaacctggcccaccaccaccaaggcccgcagagcggcatcaggacgacagcaggggtcttgtgcttcctgggtacaagtacctcggacccttcaacggactcgacaaaggagagccggtcaacgaggcagacgctgcggccctcgagcacgacaaggcctacgaccggcagctcgacagcggagacaacccgtacctcaagtacaaccacgccgacgcggagtttcaggagcgtcttaaagaagatacgtcttttgggggcaacctcggacgagcagtcttccaggcgaaaaagagggttcttgaacctctgggcctggttgaggaacctgttaagacggctccgggaaaaaagaggccggtagagcactctcctgcggagccagactcctcctcgggaaccggaaaagcgggccagcagcctgcaagaaagagattgaatttcggtcagactggagacgcagactccgtacctgacccccagcctctcggacagccaccagcagcccccacaagtttgggatctactacaatggctacaggcagtggcgcaccaatggcagacaataacgagggtgccgatggagtgggtaattcctcaggaaattggcattgcgattcccaatggctgggcgacagggtcatcaccaccagcacccgaacccgggccctgcccacctacaacaaccacctctacaagcaaatctccagccaatcaggagcatcgaacgacaaccactactttggctacagcaccccttgggggtattttgacttcaacagattccactgtcacttctccccacgtgactggcaaagactcaccaacaacaactggggattccgacccaagagactcaacttcaagctctttaacattcaagtcaaagaggtcacgcagaatgacggtacgacgacgattgccaataaccttaccagcacggttcaggtgtttactgactcggagtaccagctcccgtacgtcctcggctcggcgcatcaaggatgcctcccgccgtttccagcggacgtcttcatggtcccacagtatggatacctcaccctgaacaacgggagtcaggcggtaggacgctcttccttttactgcctggagtactttccttctcagatgctgcgtaccggaaacaactttaccttcagctacacctttgaggacgtgcccttccacagcagctacgctcacagccagagtttggaccggctgatgaatcctctgatcgaccagtatctgtattatctgaacaggacacaatcaaatagtggaactcttcagcagtctaggctactgtttagccaagctggacccaccagcatgtcccttcaagctaaaaactggctgcctggaccttgctacagacagcagcgtctgtcaaagcaggcaaacgacaacaacaacagcaactttccctggactgcggctacaaagtatcatctaaatggtcgggactcgttggttaatccaggaccagctatggccagccacaaagacgatgaagaaaagtttttccccatgcatggaaccctgatatttggtaaacaaggaacaaatgctaacgacgcggatttggaacatgtcatgattacagatgaagaagaaatcaggaccaccaatcccgtggctacagagcagtacggaaacgtgtcaaataatttgcaaaactcaaatactggtccaactacagaaaatgtcaatcaccagggagcgttacctggtatggtgtggcaggatcgagacgtgtacctgcagggacccatttgggccaagattcctcacaccgacggacactttcacccttctccactgatgggaggttttggactcaaacacccgcctcctcaaatcatgatcaaaaacactcctgttccagccaatcctcctacaaacttcagcgcggcaaagtttgcttccttcatcacacagtattccacgggacaggtcagcgtggagatcgagtgggagctgcagaaggagaacagcaaacgctggaaccccgagatccagtacacttccaactacaacaaatctgttaatgtggactttactgtggacgctaatggtgtgtattcagagcctcgccccattggcaccagatacctgactcgtaatctgtaa

SEQ ID NO: 3621 - DNA, 2208 bp, Artificial Sequence
  Description of Artificial Sequence: Synthetic polynucleotide
atggctgccgatggttatcttccagattggctcgaggacactctctctgaaggaataagacagtggtggaagctcaaacctggcccaccaccgccaaagcccgcagagcggcataaggacgacagcaggggtcttgtgcttcctgggtacaagtacctcggacccttcaacggactcgacaaaggagagccggtcaacgaggcagacgccgcggccctcgagcacgacaaggcctacgaccggcagctcgacagcggagacaacccgtacctcaagtacaaccacgccgacgcggagtttcaggagcgccttaaagaagatacgtcttttgggggcaacctcgcaagagcagtattccaggcgaaaaagagggttcttgaacctctgggcctggttgaggagcctgttaagacggctccgggaaaaaagaggccggtagagcactctcctgcggggccagattcctcctccggaactggaaagtcgggccaacagcctgcaagaaagagattgaattttggtcagactggagacgcagactccgtacctgacccccagcctctcggacagccaccagcagccccctctggtctgggaactaatacgatggcttcaggcagtggcgcaccaatggcagacaataacgagggcgccgacggagtgggtaattcctcgggaaattggcattgcgattccacatggatgggcgacagagtcatcaccaccagcacccgcacctgggctctgcccacctacaacaaccatctgtacaagcaaatttccagccagtctggagcagcgaacgacaaccactactttggctacagcaccccttgggggtattttgacttcaacagattccactgtcacttctccccacgtgactggcaaagactcatcaacaacaactggggattccgacccaagagactcaacttcaagctctttaacattcaagtcaaagaggtcacgcagaatgacggtacgacgacgattgccaataaccttaccagcacggttcaggtgtttactgactcggagtaccagctcccgtacgtcctcggctcggcgcatcaaggatgcctcccgccgtttccagcggacgtcttcatggtcccacagtatggatacctcaccctgaacaacgggagtcaggcggtaggacgctcttccttttactgcctggagtactttccttctcagatgctgcgtaccggaaacaactttaccttcagctacacctttgaggacgtgcccttccacagcagctacgctcacagccagagtttggaccggctgatgaatcctctgatcgaccagtatctgtattatctgaacaggacacaatcaaatagtggaactcttcagcagtctaggctactgtttagccaagctggacccaccagcatgtcccttcaagctaaaaactggctgcctggaccttgctacagacagcagcgtctgtcaaagcaggcaaacgacaacaacaacagcaactttccctggactgcggctacaaagtatcatctaaatggtcgggactcgttggttaatccaggaccagctatggccagccacaaagacgatgaagaaaagtttttccccatgcatggaaccctgatatttggtaaacaaggaacaaatgctaacgacgcggatttggaacatgtcatgattacagatgaagaagaaatcaggaccaccaatcccgtggctacagagcagtacggaaacgtgtcaaataatttgcaaaactcaaatactggtccaactacagaaaatgtcaatcaccagggagcgttacctggtatggtgtggcaggatcgagacgtgtacctgcagggacccatttgggccaagattcctcacaccgacggacactttcacccttctccactgatgggaggttttggactcaaacacccgcctcctcaaatcatgatcaaaaacactcctgttccagccaatcctcctacaaacttcagcgcggcaaagtttgcttccttcatcacacagtattccacgggacaggtcagcgtggagatcgagtgggagctgcagaaggagaacagcaaacgctggaaccccgagatccagtacacttccaactacaacaaatctgttaatgtggactttactgtggacgctaatggtgtgtattcagagcctcgccccattggcaccagatacctgactcgtaatctgtaa

SEQ ID NO: 3622 - DNA, 2205 bp, Artificial Sequence
  Description of Artificial Sequence: Synthetic polynucleotide
atggctgccgatggttatcttccagattggctcgaggacactctctctgaaggaataagacagtggtggaagctcaaacctggcccaccaccaccaaggcccgcagagcggcatcaggacgacagcaggggtcttgtgcttcctgggtacaagtacctcggacccttcaacggactcgacaaaggagagccggtcaacgaggcagacgctgcggccctcgagcacgacaaggcctacgaccggcagctcgacagcggagacaacccgtacctcaagtacaaccacgccgacgcggagtttcaggagcgtcttaaagaagatacgtcttttgggggcaacctcggacgagcagtcttccaggcgaaaaagagggttcttgaacctctgggcctggttgaggaacctgttaagacggctccgggaaaaaagaggccggtagagcactctcctgcggagccagactcctcctcgggaaccggaaaagcgggccagcagcctgcaagaaagagattgaatttcggtcagactggagacgcagactccgtacctgacccccagcctctcggacagccaccagcagcccccacaagtttgggatctactacaatggctacaggcagtggcgcaccaatggcagacaataacgagggtgccgatggagtgggtaattcctcaggaaattggcattgcgattcccaatggctgggcgacagagtcatcaccaccagcacccgaacctgggccctgcccacctacaacaaccacctctacaagcaaatctccagccaatcaggagcatcgaacgacaaccactactttggctacagcaccccttgggggtattttgacttcaacagattccactgtcacttctccccacgtgactggcaaagactcatcaacaacaactggggattccgacccaagagactcaacttcaagctctttaacattcaagtcaaagaggtcacgcagaatgacggtacgacgacgattgccaataaccttaccagcacggttcaggtgtttactgactcggagtaccagctcccgtacgtcctcggctcggcgcatcaaggatgcctcccgccgtttccagcggacgtcttcatggtcccacagtatggatacctcaccctgaacaacgggagtcaggcggtaggacgctcttccttttactgcctggagtactttccttctcagatgctgcgtaccggaaacaactttaccttcagctacacctttgaggacgtgcccttccacagcagctacgctcacagccagagtttggaccggctgatgaatcctctgatcgaccagtatctgtattatctgaacaggacacaatcaaatagtggaactcttcagcagtctaggctactgtttagccaagctggacccaccagcatgtcccttcaagctaaaaactggctgcctggaccttgctacagacagcagcgtctgtcaaagcaggcaaacgacaacaacagcaactttccctggactgcggctacaaagtatcatctaaatggtcgggactcgttggttaatccaggaccagctatggccagccacaaagacgatgaagaaaagtttttccccatgcatggaaccctgatatttggtaaacaaggaacaaatgctaacgacgcggatttggaacatgtcatgattacagatgaagaagaaatcaggaccaccaatcccgtggctacagagcagtacggaaacgtgtcaaataatttgcaaaactcaaatactggtccaactacagaaaatgtcaatcaccagggagcgttacctggtatggtgtggcaggatcgagacgtgtacctgcagggacccatttgggccaagattcctcacaccgacggacactttcacccttctccactgatgggaggttttggactcaaacacccgcctcctcaaatcatgatcaaaaacactcctgttccagccaatcctcctacaaacttcagcgcggcaaagtttgcttccttcatcacacagtattccacgggacaggtcagcgtggagatcgagtgggagctgcagaaggagaacagcaaacgctggaaccccgagatccagtacacttccaactacaacaaatctgttaatgtggactttactgtggacgctaatggtgtgtattcagagcctcgccccattggcaccagatacctgactcgtaatctgtaa

SEQ ID NO: 3623 - DNA, 2208 bp, Artificial Sequence
  Description of Artificial Sequence: Synthetic polynucleotide
atggctgccgatggttatcttccagattggctcgaggacactctctctgaaggaataagacagtggtggaagctcaaacctggcccaccaccgccaaagcccgcagagcggcataaggacgacagcaggggtcttgtgcttcctgggtacaagtacctcggacccttcaacggactcgacaaaggagagccggtcaacgaggcagacgccgcggccctcgagcacgacaaggcctacgaccggcagctcgacagcggagacaacccgtacctcaagtacaaccacgccgacgcggagtttcaggagcgccttaaagaagatacgtcttttgggggcaacctcgcaagagcagtattccaggcgaaaaagagggttcttgaacctctgggcctggttgaggagcctgttaagacggctccgggaaaaaagaggccggtagagcactctcctgcggggccagattcctcctccggaactggaaagtcgggccaacagcctgcaagaaagagattgaattttggtcagactggagacgcagactccgtacctgacccccagcctctcggacagccaccagcagcccccacaagtttgggatctactacaatggctacaggcagtggcgcaccaatggcagacaataacgagggtgccgatggagtgggtaattcctcaggaaattggcattgcgattcccaatggctgggcgacagagtcatcaccaccagcacccgaacctgggccctgcccacctacaacaaccacctctacaagcaaatctccagccaatcaggagcatcgaacgacaaccactactttggctacagcaccccttgggggtattttgacttcaacagattccactgtcacttctccccacgtgactggcaaagactcatcaacaacaactggggattccgacccaagagactcaacttcaagctctttaacattcaagtcaaagaggtcacgcagaatgacggtacgacgacgattgccaataaccttaccagcacggttcaggtgtttactgactcggagtaccagctcccgtacgtcctcggctcggcgcatcaaggatgcctcccgccgtttccagcggacgtcttcatggtcccacagtatggatacctcaccctgaacaacgggagtcaggcggtaggacgctcttccttttactgcctggagtactttccttctcagatgctgcgtaccggaaacaactttaccttcagctacacctttgaggacgtgcccttccacagcagctacgctcacagccagagtttggaccggctgatgaatcctctgatcgaccagtatctgtattatctgaacaggacacaatcaaatagtggaactcttcagcagtctaggctactgtttagccaagctggacccaccagcatgtcccttcaagctaaaaactggctgcctggaccttgctacagacagcagcgtctgtcaaagcaggcaaacgacaacaacaacagcaactttccctggactgcggctacaaagtatcatctaaatggtcgggactcgttggttaatccaggaccagctatggccagccacaaagacgatgaagaaaagtttttccccatgcatggaaccctgatatttggtaaacaaggaacaaatgctaacgacgcggatttggaacatgtcatgattacagatgaagaagaaatcaggaccaccaatcccgtggctacagagcagtacggaaacgtgtcaaataatttgcaaaactcaaatactggtccaactacagaaaatgtcaatcaccagggagcgttacctggtatggtgtggcaggatcgagacgtgtacctgcagggacccatttgggccaagattcctcacaccgacggacactttcacccttctccactgatgggaggttttggactcaaacacccgcctcctcaaatcatgatcaaaaacactcctgttccagccaatcctcctacaaacttcagcgcggcaaagtttgcttccttcatcacacagtattccacgggacaggtcagcgtggagatcgagtgggagctgcagaaggagaacagcaaacgctggaaccccgagatccagtacacttccaactacaacaaatctgttaatgtggactttactgtggacgctaatggtgtgtattcagagcctcgccccattggcaccagatacctgactcgtaatctgtaa

SEQ ID NO: 3624 - DNA, 2208 bp, Artificial Sequence
  Description of Artificial Sequence: Synthetic polynucleotide
atggctgccgatggttatcttccagattggctcgaggacactctctctgaaggaataagacagtggtggaagctcaaacctggcccaccaccgccaaagcccgcagggcggcataaggacgacagcaggggtcttgtgcttcctgggtacaagtacctcggacccttcaacggactcgacaagggagagccggtcaacgaggcagacgccgcggccctcgagcacgacaaggcctacgaccggcagctcgacagcggagacaacccgtacctcaagtacaaccacgccggcgcggagtttcaggagcgccttaaagaagatacgtcttttgggggcaacctcggacgagcagtattccaggcgaaaaagagggttcttgaacctctgggcctggttgaggagcctgttaagacggccccgggaaaaaagaggccggtagagcactctcctgtggagccagactcctcctcgggaaccggaaaagcgggccagcagcctgcgaggaagagattgaattttggtcagactggagacgcagactccgtacctgacccccagcctctcggacagccaccagcagcccccacaagtttgggatctactacaatggctacaggcagtggcgcaccaatggcagacaataacgagggtgccgatggagtgggtaattcctcagggaattggcattgcgattcccaatggttgggcgacagagtcatcaccaccagcacccgaacctgggccctgcccacctacaacaaccacctctacaagcaaatctccagccaatcaggagcagcgaacgacaaccactactttggctacagcaccccctgggggtattttgacttcaacagattccactgccacttttcaccacgtgactggcaaagactcatcaacaacaactggggattccgacccaagagactcaacttcaagctctttaacattcaagtcaaagaggtcacgcagaatgacggtacgacgacgattgccaataaccttaccagcacggttccggtgtttactgactcggagtaccagctcccgtacgtcctcggctcggcgcatcaaggatgcctcccgccgtttccagcggacgtcttcatggtcccacagtatggatacctcaccctgaacaacgggagtcaggcggtaggacgctcttccttttactgcctggagtactttccttctcagatgcttcgtaccggaaacaactttaccttcagttacacctttgaagacgttcctttccacagcagctacgctcacagtcaaagtctggaccggctgatgaatcctcttatcgaccagtacctgtattatctaaacaaaacacaatcaaatagtggaactcttcagcagtctcggctactgtttagtcaagctggacctaccagcatgtctcttcaagctaaaaactggctgcctggaccttgctacagacaacagcgtctgtcaaagcaggcaaacgacaacaacaacagcaactttccctggactgcggctacaaagtatcatctaaatggccgggactcgttggttaatccaggaccagctatggccagccacaaagacgatgaagaaaagtttttccccatgcatggaaccctgatatttggtaaacaaggaacaaatgctaacgacgcggatttggaacatgtcatgattacagatgaagaagaaatcaggaccaccaatcccgtggctacagagcagtacggaaacgtgtcaaataatttgcaaaactcaaatactggtccaactacagaaaatgtcaatcaccagggagcgttacctggtatggtgtggcaggatcgagacgtgtacctgcagggacccatttgggccaagattcctcacaccgacggacactttcacccttctccactgatgggaggttttggactcaaacacccgcctcctcaaatcatgatcaaaaacactcctgttccagccaatcctcctacaaacttcagcgcggcaaagtttgcttccttcatcacacagtattccacgggacaggtcagcgtggagatcgagtgggagctgcagaaggagaacagcaaacgctggaaccccgagatccagtacacttccaactacaacaaatctgttaatgtggactttactgtggacgctaatggtgtgtattcagagcctcgccccattggcaccagatacctgactcgtaatctgtaa

SEQ ID NO: 3625 - DNA, 2208 bp, Artificial Sequence
  Description of Artificial Sequence: Synthetic polynucleotide
atggctgccgatggttatcttccagattggctcgaggacactctctctgaaggaataagacagtggtggaagctcaaacctggcccaccaccgccaaagcccgcagggcggcataaggacgacagcaggggtcttgtgcttcctgggtacaagtacctcggacccttcaacggactcgacaagggagagccggtcaacgaggcagacgccgcggccctcgagcacgacaaggcctacgaccggcagctcgacagcggagacaacccgtacctcaagtacaaccacgccggcgcggagtttcaggagcgccttaaagaagatacgtcttttgggggcaacctcggacgagcagtattccaggcgaaaaagagggttcttgaacctctgggcctggttgaggagcctgttaagacggccccgggaaaaaagaggccggtagagcactctcctgtggagccagactcctcctcgggaaccggaaaagcgggccagcagcctgcgaggaagagattgaattttggtcagactggagacgcagactccgtacctgacccccagcctctcggacagccaccagcagcccccacaagtttgggatctactacaatggctacaggcagtggcgcaccaatggcagacaataacgagggtgccgatggagtgggtaattcctcagggaattggcattgcgattcccaatggttgggcgacagagtcatcaccaccagcacccgaacctgggccctgcccacctacaacaaccacctctacaagcaaatctccagccaatcaggagcagcgaacgacaaccactactttggctacagcaccccctgggggtattttgacttcaacagattccactgccacttttcaccacgtgactggcaaagactcatcaacaacaactggggattccgacccaagagactcaacttcaagctctttaacattcaagtcaaagaggtcacgcagaatgacggtacgacgacgattgccaataaccttaccagcacggttccggtgtttactgactcggagtaccagctcccgtacgtcctcggctcggcgcatcaaggatgcctcccgccgtttccagcggacgtcttcatggtcccacagtatggatacctcaccctgaacaacgggagtcaggcggtaggacgctcttccttttactgcctggagtactttccttctcagatgcttcgtaccggaaacaactttaccttcagttacacctttgaagacgttcctttccacagcagctacgctcacagtcaaagtctggaccggctgatgaatcctcttatcgaccagtacctgtattatctaaacaaaacacaatcaaatagtggaactcttcagcagtctcggctactgtttagtcaagctggacctaccagcatgtctcttcaagctaaaaactggctgcctggaccttgctacagacaacagcgtctgtcaaagcaggcaaacgacaacaacaacagcaactttccctggactgcggctacaaagtatcatctaaatggccgggactcgttggttaatccaggaccagctatggccagccacaaagacgatgaagaaaagtttttccccatgcatggaaccctgatatttggcaaacaagggacaaatgctaacgacgcggatttggacaatgtcatgattacagatgaagaagaaatccgtaccaccaatcccgtggctacggagcagtacgggactgtgtcaaataatttgcaaaactcaaatactggtccaactactggaactgtcaatcaccaaggagcgttacctggtatggtgtggcaggatcgagacgtgtacctgcagggacccatttgggccaagattcctcacaccgacggacactttcacccttctccactgatgggaggttttggactcaaacacccgcctcctcaaatcatgatcaaaaacactcctgttccagccaatcctcctacaaacttcagcgcggcaaagtttgcttccttcatcacacagtattccacgggacaggtcagcgtggagatcgagtgggagctgcagaaggagaacagcaaacgctggaaccccgagatccagtacacttccaactacaacaaatctgttaatgtggactttactgtggacgctaatggtgtgtattcagagcctcgccccattggcaccagatacctgactcgtaatctgtaa

SEQ ID NO: 3626 - DNA, 2208 bp, Artificial Sequence
  Description of Artificial Sequence: Synthetic polynucleotide
atggctgccgatggttatcttccagattggctcgaggacactctctctgaaggaataagacagtggtggaagctcaaacctggcccaccaccaccaaggcccgcagagcggcatcaggacgacagcaggggtcttgtgcttcctgggtacaagtacctcggacccttcaacggactcgacaaaggagagccggtcaacgaggcagacgctgcggccctcgagcacgacaaggcctacgaccggcagctcgacagcggagacaacccgtacctcaagtacaaccacgccgacgcggagtttcaggagcgtcttaaagaagatacgtcttttgggggcaacctcggacgagcagtcttccaggcgaaaaagagggttcttgaacctctgggcctggttgaggaacctgttaagacggctccgggaaaaaagaggccggtagagcactctcctgcggagccagactcctcctcgggaaccggaaaagcgggccagcagcctgcaagaaagagattgaatttcggtcagactggagacgcagactccgtacctgacccccagcctctcggacagccaccagcagcccccacaagtttgggatctactacaatggctacaggcagtggcgcaccaatggcagacaataacgagggtgccgatggagtgggtaattcctcaggaaattggcattgcgattcccaatggctgggcgacagagtcatcaccaccagcacccgaacctgggccctgcccacctacaacaaccacctctacaagcaaatctccagccaatcaggagcatcgaacgacaaccactactttggctacagcaccccttgggggtattttgacttcaacagattccactgtcacttctccccacgtgactggcaaagactcatcaacaacaactggggattccgacccaagagactcaacttcaagctctttaacattcaagtcaaagaggtcacgcagaatgacggtacgacgacgattgccaataaccttaccagcacggttcaggtgtttactgactcggagtaccagctcccgtacgtcctcggctcggcgcatcaaggatgcctcccgccgtttccagcggacgtcttcatggtcccacagtatggatacctcaccctgaacaacgggagtcaggcggtaggacgctcttccttttactgcctggagtactttccttctcagatgctgcgtaccggaaacaactttaccttcagctacacctttgaggacgtgcccttccacagcagctacgctcacagccagagtttggaccggctgatgaatcctctgatcgaccagtatctgtattatctgaacaggacacaatcaaatagtggaactcttcagcagtctaggctactgtttagccaagctggacccaccagcatgtcccttcaagctaaaaactggctgcctggaccttgctacagacagcagcgtctgtcaaagcaggcaaacgacaacaacaacagcaactttccctggactgcggctacaaagtatcatctaaatggtcgggactcgttggttaatccaggaccagctatggccagccacaaagacgatgaagaaaagtttttccccatgcatggaaccctgatatttggtaaacaaggaacaaatgctaacgacgcggatttggaacatgtcatgattacagatgaagaagaaatcaggaccaccaatcccgtggctacagagcagtacggaaacgtgtcaaataatttgcaaaactcaaatactggtccaactacagaaaatgtcaatcaccagggagcgttacctggtatggtgtggcaggatcgagacgtgtacctgcagggacccatttgggccaagattcctcacaccgacggacactttcacccttctccgctgatgggaggttttggactcaaacacccgcctcctcagatcatgatcaaaaacactcccgttccagccaatcctcccacaaacttcagttctgccaagtttgcttctttcatcacacagtattccacgggacaggttagcgtggagatcgagtgggagctgcagaaggagaacagcaaacgctggaaccccgagatccagtacacttccaactacaacaagtctgttaatgtggactttactgtggacactaatggtgtgtattcagagcctcgccccattggcaccagatacctgactcgtaatctgtaa

SEQ ID NO: 3627 - DNA, 2208 bp, Artificial Sequence
  Description of Artificial Sequence: Synthetic polynucleotide
atggctgccgatggttatcttccagattggctcgaggacactctctctgaaggaataagacagtggtggaagctcaaacctggcccaccaccaccaaagcccgcagagcggcatcaggacgacagcaggggtcttgtgcttcctgggtacaagtacctcggacccttcaacggactcgacaaaggagagccggtcaacgaggcagacgctgcggccctcgagcacgacaaggcctacgaccggcagctcgacagcggagacaacccgtacctcaagtacaaccacgccgacgcggagtttcaggagcgtcttaaagaagatacgtcttttgggggcaacctcggacgagcagtcttccaggcgaaaaagagggttcttgaacctctgggcctggttgaggaacctgttaagacggctccgggaaaaaagaggccggtagagcactctcctgcggagccagactcctcctcgggaaccggaaaagcgggccagcagcctgcaagaaagagattgaatttcggtcagactggagacgcagactccgtacctgacccccagcctctcggacagccaccagcagcccccacaagtttgggatctactacaatggctacaggcagtggcgcaccaatggcagacaataacgagggtgccgatggagtgggtaattcctcaggaaattggcattgcgattcccaatggctgggcgacagagtcatcaccaccagcacccgaacctgggccctgcccacctacaacaaccacctctacaagcaaatctccagccaatcaggagcagcgaacgacaaccactactttggctacagcaccccctgggggtattttgacttcaacagattccactgccacttttcaccacgtgactggcaaagactcatcaacaacaactggggattccgacccaagagactcaacttcaagctctttaacattcaagtcaaagaggtcacgcagaatgacggtacgacgacgattgccaataaccttaccagcacggttccggtgtttactgactcggagtaccagctcccgtacgtcctcggctcggcgcatcaaggatgcctcccgccgtttccagcggacgtcttcatggtcccacagtatggatacctcaccctgaacaacgggagtcaggcggtaggacgctcttccttttactgcctggagtactttccttctcagatgcttcgtaccggaaacaactttaccttcagttacacctttgaagacgttcctttccacagcagctacgctcacagtcaaagtctggaccggctgatgaatcctcttatcgaccagtacctgtattatctaaacaaaacacaatcaaatagtggaactcttcagcagtctcggctactgtttagtcaagctggacctaccagcatgtctcttcaagctaaaaactggctgcctggaccttgctacagacaacagcgtctgtcaaagcaggcaaacgacaacaacaacagcaactttccctggactgcggctacaaagtatcatctaaatggccgggactcgttggttaatccaggaccagctatggccagccacaaagacgatgaagaaaagtttttccccatgcatggaaccctgatatttggcaaacaagggacaaatgctaacgacgcggatttggacaatgtcatgattacagatgaagaagaaatccgtaccaccaatcccgtggctacggagcagtacgggactgtgtcaaataatttgcaaaactcaaatactggtccaactactggaactgtcaatcaccaaggagcgttacctggtatggtgtggcaggatcgagacgtgtaccttcagggacccatttgggccaagattcctcacaccgatggacactttcacccttctccgctgatgggaggttttggactcaaacacccgcctcctcagatcatgatcaaaaacactcccgttccagccaatcctcccacaaacttcagttctgccaagtttgcttctttcatcacacagtattccacgggacaggttagcgtggagatcgagtgggagctgcagaaggagaacagcaaacgctggaaccccgagatccagtacacttccaactacaacaagtctgttaatgtggactttactgtggacactaatggtgtgtattcagagcctcgccccattggcaccagatacctgactcgtaatctgtaa

SEQ ID NO: 3628 - DNA, 2208 bp, Artificial Sequence
  Description of Artificial Sequence: Synthetic polynucleotide
atggctgccgatggttatcttccagattggctcgaggacactctctctgaaggaataagacagtggtggaagctcaaacctggcccaccaccgccaaagcccgcagagcggcataaggacgacagcaggggtcttgtgcttcctgggtacaagtacctcggacccttcaacggactcgacaaaggagagccggtcaacgaggcagacgccgcggccctcgagcacgacaaggcctacgaccggcagctcgacagcggagacaacccgtacctcaagtacaaccacgccgacgcggagtttcaggagcgccttaaagaagatacgtcttttgggggcaacctcgcaagagcagtattccaggcgaaaaagagggttcttgaacctctgggcctggttgaggagcctgttaagacggctccgggaaaaaagaggccggtagagcactctcctgcggggccagattcctcctccggaactggaaagtcgggccaacagcctgcaagaaagagattgaattttggtcagactggagacgcagactccgtacctgacccccagcctctcggacagccaccagcagccccctctggtctgggaactaatacgatggcttcaggcagtggcgcaccaatggcagacaataacgagggcgccgacggagtgggtaattcctcgggaaattggcattgcgattccacatggatgggcgacagagtcatcaccaccagcacccgcacctgggctctgcccacctacaacaaccatctgtacaagcaaatttccagccagtctggagcagcgaacgacaaccactactttggctacagcaccccttgggggtattttgacttcaacagattccactgccacttctccccacgtgactggcaaagactcatcaacaacaattggggattccggcccaaaagactcaacttcgagctctttaacattcaagtcaaggaggtcacgcagaatgacggtacgacgacgattgccaataaccttaccagcacggttcaggtgtttactgactcggagtaccagctcccgtacgtcctcggctcggcgcatcaaggatgcctcccgccgttcccagcagacgtcttcatggtgccacagtatggatacctcaccctgaacaacgggagtcaggcggtaggacgctcttcattttactgcctggagtactttccttctcagatgctgcgtaccggaaacaactttaccttcagctacacctttgaggacgtgcccttccacagcagctacgctcacagccagagtttggaccggctgatgaatcctctgatcgaccagtatctgtattatctgaacaggacacaatcaaatagtggaactcttcagcagtctaggctactgtttagccaagctggacccaccagcatgtcccttcaagctaaaaactggctgcctggaccttgctacagacagcagcgtctgtcaaagcaggcaaacgacaacaacaacagcaactttccctggactgcggctacaaagtatcatctaaatggtcgggactcgttggttaatccaggaccagctatggccagccacaaagacgatgaagaaaagtttttccccatgcatggaaccctgatatttggtaaacaaggaacaaatgctaacgacgcggatttggaacatgtcatgattacagatgaagaagaaatcaggaccaccaatcccgtggctacagagcagtacggaaacgtgtcaaataatttgcaaaactcaaatactggtccaactacagaaaatgtcaatcaccagggagcgttacctggtatggtgtggcaggatcgagacgtgtacctgcagggacccatttgggccaagattcctcacaccgacggacactttcacccttctccactgatgggaggttttggactcaaacacccgcctcctcaaatcatgatcaaaaacactcctgttccagccaatcctcctacaaacttcagcgcggcaaagtttgcttccttcatcacacagtattccacgggacaggtcagcgtggagatcgagtgggagctgcagaaggagaacagcaaacgctggaaccccgagatccagtacacttccaactacaacaaatctgttaatgtggactttactgtggacgctaatggtgtgtattcagagcctcgccccattggcaccagatacctgactcgtaatctgtaa

SEQ ID NO: 3629 - DNA, 2208 bp, Artificial Sequence
  Description of Artificial Sequence: Synthetic polynucleotide
atggctgccgatggttatcttccagattggctcgaggacattctctctgaaggaataagacagtggtggaagctcaaacctggcccaccaccaccaaagcccgcagagcggcataaggacgacagcaggggtcttgtgcttcctgggtacaagtacctcggacccttcaacggactcgacaaaggagagccggtcaacgaggcagacgccgcggccctcgagcacgacaaggcctacgaccggcagctcgacagcggagacaacccgtacctcaagtacaaccacgccgacgcggagtttcaggagcgtcttaaagaagatacgtcttttgggggcaacctcggacgagcagtcttccaggcgaaaaagagggttcttgaacctctgggcctggttgaggaacctgttaagacggctccgggaaaaaagaggccggtagagcactctcctgcggagccagactcctcctcgggaaccggaaaagcgggccagcagcctgcaagaaagagattgaatttcggtcagactggagacgcagactccgtacctgacccccagcctctcggacagccaccagcagcccccacaagtttgggatctactacaatggctacaggcagtggcgcaccaatggcagacaataacgagggtgccgatggagtgggtaattcctcaggaaattggcattgcgattcccaatggctgggcgacagagtcatcaccaccagcacccgaacctgggccctgcccacctacaacaaccacctctacaagcaaatctccagccaatcaggagcatcgaacgacaaccactactttggctacagcaccccttgggggtattttgacttcaacagattccactgtcacttctccccacgtgactggcaaagactcatcaacaacaactggggattccgacccaagagactcaacttcaagctctttaacattcaagtcaaagaggtcacgcagaatgacggtacgacgacgattgccaataaccttaccagcacggttcaggtgtttactgactcggagtaccagctcccgtacgtcctcggctcggcgcatcaaggatgcctcccgccgtttccagcggacgtcttcatggtcccacagtatggatacctcaccctgaacaacgggagtcaggcggtaggacgctcttccttttactgcctggagtactttccttctcagatgctgcgtaccggaaacaactttaccttcagctacacctttgaggacgtgcccttccacagcagctacgctcacagccagagtttggaccggctgatgaatcctctgatcgaccagtatctgtattatctgaacaggacacaatcaaatagtggaactcttcagcagtctaggctactgtttagccaagctggacccaccagcatgtcccttcaagctaaaaactggctgcctggaccttgctacagacagcagcgtctgtcaaagcaggcaaacgacaacaacaacagcaactttccctggactgcggctacaaagtatcatctaaatggtcgggactcgttggttaatccaggaccagctatggccagccacaaagacgatgaagaaaagtttttccccatgcatggaaccctgatatttggtaaacaaggaacaaatgctaacgacgcggatttggaacatgtcatgattacagatgaagaagaaatcaggaccaccaatcccgtggctacagagcagtacggaaacgtgtcaaataatttgcaaaactcaaatactggtccaactacagaaaatgtcaatcaccagggagcgttacctggtatggtgtggcaggatcgagacgtgtacctgcagggacccatttgggccaagattcctcacaccgacggacactttcacccttctccactgatgggaggttttggactcaaacacccgcctcctcaaatcatgatcaaaaacactcctgttccagccaatcctcctacaaacttcagcgcggcaaagtttgcttccttcatcacacagtattccacgggacaggtcagcgtggagatcgagtgggagctgcagaaggagaacagcaaacgctggaaccccgagatccagtacacttccaactacaacaaatctgttaatgtggactttactgtggacgctaatggtgtgtattcagagcctcgccccattggcaccagatacctgactcgtaatctgtaa

SEQ ID NO: 3630 - DNA, 2208 bp, Artificial Sequence
  Description of Artificial Sequence: Synthetic polynucleotide
atggctgccgatggttatcttccagattggctcgaggacactctctctgaaggaataagacagtggtggaagctcaaacctggcccaccaccaccaaggcccgcagagcggcatcaggacgacagcaggggtcttgtgcttcctgggtacaagtacctcggacccttcaacggactcgacaaaggagagccggtcaacgaggcagacgctgcggccctcgagcacgacaaggcctacgaccggcagctcgacagcggagacaacccgtacctcaagtacaaccacgccgacgcggagtttcaggagcgtcttaaagaagatacgtcttttgggggcaacctcggacgagcagtattccaggcgaaaaagagggttcttgaacctctgggcctggttgaggagcctgttaagacggccccgggaaaaaagaggccggtagagcactctcctgtggagccagactcctcctcgggaaccggaaaagcgggccagcagcctgcgaggaagagattgaattttggtcagactggagacgcagactccgtacctgacccccagcctctcggacagccaccagcagcccccacaagtttgggatctactacaatggctacaggcagtggcgcaccaatggcagacaataacgagggtgccgatggagtgggtaattcctcagggaattggcattgcgattcccaatggttgggcgacagagtcatcaccaccagcacccgaacctgggccctgcccacctacaacaaccacctctacaagcaaatctccagccaatcaggagcagcgaacgacaaccactactttggctacagcaccccctgggggtattttgacttcaacagattccactgccacttttcaccacgtgactggcaaagactcatcaacaacaactggggattccgacccaagagactcaacttcaagctctttaacattcaagtcaaagaggtcacgcagaatgacggtacgacgacgattgccaataaccttaccagcacggttccggtgtttactgactcggagtaccagctcccgtacgtcctcggctcggcgcatcaaggatgcctcccgccgtttccagcggacgtcttcatggtcccacagtatggatacctcaccctgaacaacgggagtcaggcggtaggacgctcttccttttactgcctggagtactttccttctcagatgcttcgtaccggaaacaactttaccttcagttacacctttgaagacgttcctttccacagcagctacgctcacagtcaaagtctggaccggctgatgaatcctcttatcgaccagtacctgtattatctaaacaaaacacaatcaaatagtggaactcttcagcagtctcggctactgtttagtcaagctggacctaccagcatgtctcttcaagctaaaaactggctgcctggaccttgctacagacaacagcgtctgtcaaagcaggcaaacgacaacaacaacagcaactttccctggactgcggctacaaagtatcatctaaatggccgggactcgttggttaatccaggaccagctatggccagccacaaagacgatgaagaaaagtttttccccatgcatggaaccctgatatttggcaaacaagggacaaatgctaacgacgcggatttggacaatgtcatgattacagatgaagaagaaatccgtaccaccaatcccgtggctacggagcagtacgggactgtgtcaaataatttgcaaaactcaaatactggtccaactactggaactgtcaatcaccaaggagcgttacctggtatggtgtggcaggatcgagacgtgtaccttcagggacccatttgggccaagattcctcacaccgatggacactttcacccttctccgctgatgggaggttttggactcaaacacccgcctcctcagatcatgatcaaaaacactcccgttccagccaatcctcccacaaacttcagttctgccaagtttgcttctttcatcacacagtattccacgggacaggttagcgtggagatcgagtgggagctgcagaaggagaacagcaaacgctggaaccccgagatccagtacacttccaactacaacaagtctgttaatgtggactttactgtggacactaatggtgtgtattcagagcctcgccccattggcaccagatacctgactcgtaatctgtaa

SEQ ID NO: 3631 - DNA, 2208 bp, Artificial Sequence
  Description of Artificial Sequence: Synthetic polynucleotide
atggctgccgatggttatcttccagattggctcgaggacactctctctgaaggaataagacagtggtggaagctcaaacctggcccaccaccgccaaagcccgcagagcggcataaggacgacagcaggggtcttgtgcttcctgggtacaagtacctcggacccttcaacggactcgacaaaggagagccggtcaacgaggcagacgccgcggccctcgagcacgacaaggcctacgaccggcagctcgacagcggagacaacccgtacctcaagtacaaccacgccgacgcggagtttcaggagcgccttaaagaagatacgtcttttgggggcaacctcgcaagagcagtattccaggcgaaaaagagggttcttgaacctctgggcctggttgaggagcctgttaagacggctccgggaaaaaagaggccggtagagcactctcctgcggagccagattcctcctccggaaccggaaaagcgggccagcagcctgcaagaaagagattgaatttcggtcagactggagacgcagactccgtacctgacccccagcctctcggacagccaccagcagcccccacaagtttgggatctactacaatggctacaggcagtggcgcaccaatggcagacaataacgagggtgccgatggagtgggtaattcctcaggaaattggcattgcgattcccaatggctgggcgacagagtcatcaccaccagcacccgaacctgggccctgcccacctacaacaaccacctctacaagcaaatctccagccaatcaggagcatcgaacgacaaccactactttggctacagcaccccttgggggtattttgacttcaacagattccactgtcacttctccccacgtgactggcaaagactcatcaacaacaactggggattccgacccaagagactcaacttcaagctctttaacattcaagtcaaagaggtcacgcagaatgacggtacgacgacgattgccaataaccttaccagcacggttcaggtgtttactgactcggagtaccagctcccgtacgtcctcggctcggcgcatcaaggatgcctcccgccgtttccagcggacgtcttcatggtcccacagtatggatacctcaccctgaacaacgggagtcaggcggtaggacgctcttccttttactgcctggagtactttccttctcagatgctgcgtaccggaaacaactttaccttcagctacacctttgaggacgtgcccttccacagcagctacgctcacagccagagtttggaccggctgatgaatcctctgatcgaccagtatctgtattatctgaacaggacacaatcaaatagtggaactcttcagcagtctaggctactgtttagccaagctggacccaccagcatgtcccttcaagctaaaaactggctgcctggaccttgctacagacagcagcgtctgtcaaagcaggcaaacgacaacaacaacagcaactttccctggactgcggctacaaagtatcatctaaatggtcgggactcgttggttaatccaggaccagctatggccagccacaaagacgatgaagaaaagtttttccccatgcatggaaccctgatatttggtaaacaaggaacaaatgctaacgacgcggatttggaacatgtcatgattacagatgaagaagaaatcaggaccaccaatcccgtggctacagagcagtacggaaacgtgtcaaataatttgcaaaactcaaatactggtccaactacagaaaatgtcaatcaccagggagcgttacctggtatggtgtggcaggatcgagacgtgtacctgcagggacccatttgggccaagattcctcacaccgacggacactttcacccttctccactgatgggaggttttggactcaaacacccgcctcctcaaatcatgatcaaaaacactcctgttccagccaatcctcctacaaacttcagcgcggcaaagtttgcttccttcatcacacagtattccacgggacaggtcagcgtggagatcgagtgggagctgcagaaggagaacagcaaacgctggaaccccgagatccagtacacttccaactacaacaaatctgttaatgtggactttactgtggacgctaatggtgtgtattcagagcctcgccccattggcaccagatacctgactcgtaatctgtaa

SEQ ID NO: 3632 - DNA, 2208 bp, Artificial Sequence
  Description of Artificial Sequence: Synthetic polynucleotide
atggctgccgatggttatcttccagattggctcgaggacactctctctgaaggaataagacagtggtggaagctcaaacctggcccaccaccaccaaggcccgcagagcggcatcaggacgacagcaggggtcttgtgcttcctgggtacaagtacctcggacccttcaacggactcgacaaaggagagccggtcaacgaggcagacgctgcggccctcgagcacgacaaggcctacgaccggcagctcgacagcggagacaacccgtacctcaagtacaaccacgccgacgcggagtttcaggagcgtcttaaagaagatacgtcttttgggggcaacctcggacgagcagtcttccaggcgaaaaagagggttcttgaacctctgggcctggttgaggaacctgttaagacggctccgggaaaaaagaggccggtagagcactctcctgcggagccagactcctcctcgggaaccggaaaagcgggccagcagcctgcaagaaagagattgaatttcggtcagactggagacgcagactccgtacctgacccccagcctctcggacagccaccagcagcccccacaagtttgggatctactacaatggctacaggcagtggcgcaccaatggcagacaataacgagggtgccgatggagtgggtaattcctcagggaattggcattgcgattcccaatggttgggcgacagagtcatcaccaccagcacccgaacctgggccctgcccacctacaacaaccacctctacaagcaaatctccagccaatcaggagcagcgaacgacaaccactactttggctacagcaccccctgggggtattttgacttcaacagattccactgccacttttcaccacgtgactggcaaagactcatcaacaacaactggggattccgacccaagagactcaacttcaagctctttaacattcaagtcaaagaggtcacgcagaatgacggtacgacgacgattgccaataaccttaccagcacggttccggtgtttactgactcggagtaccagctcccgtacgtcctcggctcggcgcatcaaggatgcctcccgccgtttccagcggacgtcttcatggtcccacagtatggatacctcaccctgaacaacgggagtcaggcggtaggacgctcttccttttactgcctggagtactttccttctcagatgcttcgtaccggaaacaactttaccttcagttacacctttgaagacgttcctttccacagcagctacgctcacagtcaaagtctggaccggctgatgaatcctcttatcgaccagtacctgtattatctaaacaaaacacaatcaaatagtggaactcttcagcagtctcggctactgtttagtcaagctggacctaccagcatgtctcttcaagctaaaaactggctgcctggaccttgctacagacaacagcgtctgtcaaagcaggcaaacgacaacaacaacagcaactttccctggactgcggctacaaagtatcatctaaatggccgggactcgttggttaatccaggaccagctatggccagccacaaagacgatgaagaaaagtttttccccatgcatggaaccctgatatttggcaaacaagggacaaatgctaacgacgcggatttggacaatgtcatgattacagatgaagaagaaatccgtaccaccaatcccgtggctacggagcagtacgggactgtgtcaaataatttgcaaaactcaaatactggtccaactactggaactgtcaatcaccaaggagcgttacctggtatggtgtggcaggatcgagacgtgtaccttcagggacccatttgggccaagattcctcacaccgatggacactttcacccttctccgctgatgggaggttttggactcaaacacccgcctcctcagatcatgatcaaaaacactcccgttccagccaatcctcccacaaacttcagttctgccaagtttgcttctttcatcacacagtattccacgggacaggttagcgtggagatcgagtgggagctgcagaaggagaacagcaaacgctggaaccccgagatccagtacacttccaactacaacaagtctgttaatgtggactttactgtggacactaatggtgtgtattcagagcctcgccccattggcaccagatacctgactcgtaatctgtaa

SEQ ID NO: 3633 - DNA, 2208 bp, Artificial Sequence
  Description of Artificial Sequence: Synthetic polynucleotide
atggctgccgatggttatcttccagattggctcgaggacactctctctgaaggaataagacagtggtggaagctcaaacctggcccaccaccgccaaagcccgcagggcggcataaggacgacagcaggggtcttgtgcttcctgggtacaagtacctcggacccttcaacggactcgacaagggagagccggtcaacgaggcagacgccgcggccctcgagcacgacaaggcctacgaccggcagctcgacagcggagacaacccgtacctcaagtacaaccacgccggcgcggagtttcaggagcgccttaaagaagatacgtcttttgggggcaacctcggacgagcagtattccaggcgaaaaagagggttcttgaacctctgggcctggttgaggagcctgttaagacggctccgggaaaaaagaggccggtagagcactctcctgtggagccagactcctcctcgggaaccggaaaagcgggccagcagcctgcgaggaagagattgaattttggtcagactggagacgcagactccgtacctgacccccagcctctcggacagccaccagcagcccccacaagtttgggatctactacaatggctacaggcagtggcgcaccaatggcagacaataacgagggtgccgatggagtgggtaattcctcagggaattggcattgcgattcccaatggttgggcgacagagtcatcaccaccagcacccgaacctgggccctgcccacctacaacaaccacctctacaagcaaatctccagccaatcaggagcagcgaacgacaaccactactttggctacagcaccccctgggggtattttgacttcaacagattccactgccacttttcaccacgtgactggcaaagactcatcaacaacaactggggattccgacccaagagactcaacttcaagctctttaacattcaagtcaaagaggtcacgcagaatgacggtacgacgacgattgccaataaccttaccagcacggttccggtgtttactgactcggagtaccagctcccgtacgtcctcggctcggcgcatcaaggatgcctcccgccgtttccagcggacgtcttcatggtcccacagtatggatacctcaccctgaacaacgggagtcaggcggtaggacgctcttccttttactgcctggagtactttccttctcagatgcttcgtaccggaaacaactttaccttcagttacacctttgaagacgttcctttccacagcagctacgctcacagtcaaagtctggaccggctgatgaatcctcttatcgaccagtacctgtattatctaaacaaaacacaatcaaatagtggaactcttcagcagtctcggctactgtttagtcaagctggacctaccagcatgtctcttcaagctaaaaactggctgcctggaccttgctacagacaacagcgtctgtcaaagcaggcaaacgacaacaacaacagcaactttccctggactgcggctacaaagtatcatctaaatggccgggactcgttggttaatccaggaccagctatggccagccacaaagacgatgaagaaaagtttttccccatgcatggaaccctgatatttggcaaacaagggacaaatgctaacgacgcggatttggacaatgtcatgattacagatgaagaagaaatccgtaccaccaatcccgtggctacggagcagtacgggactgtgtcaaataatttgcaaaactcaaatactggtccaactactggaactgtcaatcaccaaggagcgttacctggtatggtgtggcaggatcgagacgtgtaccttcagggacccatttgggccaagattcctcacaccgatggacactttcacccttctccgctgatgggaggttttggactcaaacacccgcctcctcagatcatgatcaaaaacactcccgttccagccaatcctcccacaaacttcagttctgccaagtttgcttctttcatcacacagtattccacgggacaggttagcgtggagatcgagtgggagctgcagaaggagaacagcaaacgctggaaccccgagatccagtacacttccaactacaacaagtctgttaatgtggactttactgtggacactaatggtgtgtattcagagcctcgccccattggcaccagatacctgactcgtaatctgtaa

SEQ ID NO: 3634 - DNA, 2208 bp, Artificial Sequence
  Description of Artificial Sequence: Synthetic polynucleotide
atggctgccgatggttatcttccagattggctcgaggacactctctctgaaggaataagacagtggtggaagctcaaacctggcccaccaccaccaaggcccgcagagcggcatcaggacgacagcaggggtcttgtgcttcctgggtacaagtacctcggacccttcaacggactcgacaaaggagagccggtcaacgaggcagacgctgcggccctcgagcacgacaaggcctacgaccggcagctcgacagcggagacaacccgtacctcaagtacaaccacgccgacgcggagtttcaggagcgtcttaaagaagatacgtcttttgggggcaacctcggacgagcagtcttccaggcgaaaaagagggttcttgaacctctgggcctggttgaggaacctgttaagacggctccgggaaaaaagaggccggtagagcactctcctgcggagccagactcctcctcgggaaccggaaaagcgggccagcagcctgcaagaaagagattgaatttcggtcagactggagacgcagactccgtacctgacccccagcctctcggacagccaccagcagcccccacaagtttgggatctactacaatggctacaggcagtggcgcaccaatggcagacaataacgagggtgccgatggagtgggtaattcctcaggaaattggcattgcgattcccaatggctgggcgacagagtcatcaccaccagcacccgaacctgggccctgcccacctacaacaaccacctctacaagcaaatctccagccaatcaggagcatcgaacgacaaccactactttggctacagcacccctttggggtattttgacttcaacagattccactgtcacttctccccacgtgactggcaaagactcatcaacaacaactggggattccgacccaagagactcaacttcaagctctttaacattcaagtcaaagaggtcacgcagaatgacggtacgacgacgattgccaataaccttaccagcacggttcaggtgtttactgactcggagtaccagctcccgtacgtcctcggctcggcgcatcaaggatgcctcccgccgtttccagcggacgtcttcatggtcccacagtatggatacctcaccctgaacaacgggagtcaggcggtaggacgctcttccttttactgcctggagtactttccttctcagatgctgcgtaccggaaacaactttaccttcagctacacctttgaggacgtgcccttccacagcagctacgctcacagccagagtttggaccggctgatgaatcctctgatcgaccagtatctgtattatctgaacaggacacaatcaaatagtggaactcttcagcagtctaggctactgtttagccaagctggacccaccagcatgtcccttcaagctaaaaactggctgcctggaccttgctacagacagcagcgtctgtcaaagcaggcaaacgacaacaacaacagcaactttccctggactgcggctacaaagtatcatctaaatggtcgggactcgttggttaatccaggaccagctatggccagccacaaagacgatgaagaaaagtttttccccatgcatggaaccctgatatttggtaaacaaggaacaaatgctaacgacgcggatttggaacatgtcatgattacagatgaagaagaaatcaggaccaccaatcccgtggctacagagcagtacggaaacgtgtcaaataatttgcaaaactcaaatactggtccaactacagaaaatgtcaatcaccagggagcgttacctggtatggtgtggcaggatcgagacgtgtacctgcagggacccatttgggccaagattcctcacaccgacggacactttcacccttctccactgatgggaggttttggactcaaacacccgcctcctcaaatcatgatcaaaaacactcctgttccagccaatcctcctacaaacttcagcgcggcaaagtttgcttccttcatcacacagtattccacgggacaggtcagcgtggagatcgagtgggagctgcagaaggagaacagcaaacgctggaaccccgagatccagtacacttccaactacaacaaatctgttaatgtggactttactgtggacgctaatggtgtgtattcagagcctcgccccattggcaccagatacctgactcgtaatctgtaa

SEQ ID NO: 3635 - DNA, 2208 bp, Artificial Sequence
  Description of Artificial Sequence: Synthetic polynucleotide
atggctgccgatggttatcttccagattggctcgaggacactctctctgaaggaataagacagtggtggaagctcaaacctggcccaccaccgccaaagcccgcagggcggcataaggacgacagcaggggtcttgtgcttcctgggtacaagtacctcggacccttcaacggactcgacaagggagagccggtcaacgaggcagacgccgcggccctcgagcacgacaaggcctacgaccggcagctcgacagcggagacaacccgtacctcaagtacaaccacgccggcgcggagtttcaggagcgccttaaagaagatacgtcttttgggggcaacctcggacgagcagtattccaggcgaaaaagagggttcttgaacctctgggcctggttgaggagcctgttaagacggccccgggaaaaaagaggccggtagagcactctcctgtggagccagactcctcctcgggaaccggaaaagcgggccagcagcctgcgaggaagagattgaattttggtcagactggagacgcagactccgtacctgacccccagcctctcggacagccaccagcagcccccacaagtttgggatctactacaatggctacaggcagtggcgcaccaatggcagacaataacgagggtgccgatggagtgggtaattcctcagggaattggcattgcgattcccaatggttgggcgacagagtcatcaccaccagcacccgaacctgggccctgcccacctacaacaaccacctctacaagcaaatctccagccaatcaggagcagcgaacgacaaccactactttggctacagcaccccctgggggtattttgacttcaacagattccactgccacttttcaccacgtgactggcaaagactcatcaacaacaactggggattccgacccaagagactcaacttcaagctctttaacattcaagtcaaagaggtcacgcagaatgacggtacgacgacgattgccaataaccttaccagcacggttccggtgtttactgactcggagtaccagctcccgtacgtcctcggctcggcgcatcaaggatgcctcccgccgtttccagcggacgtcttcatggtcccacagtatggatacctcaccctgaacaacgggagtcaggcggtaggacgctcttccttttactgcctggagtactttccttctcagatgcttcgtaccggaaacaactttaccttcagttacacctttgaagacgttcctttccacagcagctacgctcacagtcaaagtctggaccggctgatgaatcctcttatcgaccagtatctgtattatctgaacaggacacaatcaaatagtggaactcttcagcagtctaggctactgtttagccaagctggacccaccagcatgtcccttcaagctaaaaactggctgcctggaccttgctacagacagcagcgtctgtcaaagcaggcaaacgacaacaacaacagcaactttccctggactgcggctacaaagtatcatctaaatggtcgggactcgttggttaatccaggaccagctatggccagccacaaagacgatgaagaaaagtttttccccatgcatggaaccctgatatttggtaaacaaggaacaaatgctaacgacgcggatttggaacatgtcatgattacagatgaagaagaaatcaggaccaccaatcccgtggctacagagcagtacggaaacgtgtcaaataatttgcaaaactcaaatactggtccaactacagaaaatgtcaatcaccagggagcgttacctggtatggtgtggcaggatcgagacgtgtacctgcagggacccatttgggccaagattcctcacaccgacggacactttcacccttctccactgatgggaggttttggactcaaacacccgcctcctcaaatcatgatcaaaaacactcctgttccagccaatcctcctacaaacttcagcgcggcaaagtttgcttccttcatcacacagtattccacgggacaggtcagcgtggagatcgagtgggagctgcagaaggagaacagcaaacgctggaaccccgagatccagtacacttccaactacaacaaatctgttaatgtggactttactgtggacgctaatggtgtgtattcagagcctcgccccattggcaccagatacctgactcgtaatctgtaa

SEQ ID NO: 3636 - DNA, 2208 bp, Artificial Sequence
  Description of Artificial Sequence: Synthetic polynucleotide
atggctgccgatggttatcttccagattggctcgaggacattctctctgaaggaataagacagtggtggaagctcaaacctggcccaccaccaccaaagcccgcagagcggcataaggacgacagcaggggtcttgtgcttcctgggtacaagtacctcggacccttcaacggactcgacaaaggagagccggtcaacgaggcagacgccgcggccctcgagcacgacaaggcctacgaccggcagctcgacagcggagacaacccgtacctcaagtacaaccacgccgacgcggagtttcaggagcgtcttaaagaagatacgtcttttgggggcaacctcggacgagcagtcttccaggcaaaaaagagggttcttgaacctctgggcctggttgaggaacctgttaagacggctccgggaaaaaagaggccggtagagcaatctcctgcggagccagactcctcctcgggaaccggaaaggcgggcaaccagcctgcaagaaagagattgaattttggtcagactggagacgcagactccgtacctgacccccagcctctcggacagccaccagcagccccctctggtctgggatctactacaatggctacaggcagtggcgcaccaatggcagacaataacgagggtgccgatggagtgggtaattcctcaggaaattggcattgcgattcccaatggttgggcgacagagtcatcaccaccagcacccgaacctgggccctgcccacctacaacaatcacctctacaagcaaatctccagccaatcaggagcagcgaacgacaaccactactttggctacagcaccccctgggggtattttgacttcaacagattccactgccacttttcaccacgtgactggcaaagactcatcaacaacaactggggattccgacccaagagactcaacttcaagctctttaacattcaagtcaaagaggtcacgcagaatgacggtacgacgacgattgccaataaccttaccagcacggttccggtgtttactgactcggagtaccagctcccgtacgtcctcggctcggcgcatcaaggatgcctcccgccgtttccagcggacgtcttcatggtcccacagtatggatacctcaccctgaacaacgggagtcaggcggtaggacgctcttccttttactgcctggagtactttccttctcagatgcttcgtaccggaaacaactttaccttcagttacacctttgaagacgttcctttccacagcagctacgctcacagtcaaagtctggaccggctgatgaatcctcttatcgaccagtacctgtattatctaaacaaaacacaatcaaatagtggaactcttcagcagtctcggctactgtttagtcaagctggacctaccagcatgtctcttcaagctaaaaactggctgcctggaccttgctacagacaacagcgtctgtcaaagcaggcaaacgacaacaacaacagcaactttccctggactgcggctacaaagtatcatctaaatggccgggactcgttggttaatccaggaccagctatggccagccacaaagacgatgaagaaaagtttttccccatgcatggaaccctgatatttggcaaacaagggacaaatgctaacgacgcggatttggacaatgtcatgattacagatgaagaagaaatccgtaccaccaatcccgtggctacggagcagtacgggactgtgtcaaataatttgcaaaactcaaatactggtccaactactggaactgtcaatcaccaaggagcgttacctggtatggtgtggcaggatcgagacgtgtaccttcagggacccatttgggccaagattcctcacaccgatggacactttcacccttctccgctgatgggaggttttggactcaaacacccgcctcctcagatcatgatcaaaaacactcccgttccagccaatcctcccacaaacttcagttctgccaagtttgcttctttcatcacacagtattccacgggacaggttagcgtggagatcgagtgggagctgcagaaggagaacagcaaacgctggaaccccgagatccagtacacttccaactacaacaagtctgttaatgtggactttactgtggacactaatggtgtgtattcagagcctcgccccattggcaccagatacctgactcgtaatctgtaa

SEQ ID NO: 3637 - DNA, 2208 bp, Artificial Sequence
  Description of Artificial Sequence: Synthetic polynucleotide
atggctgccgatggttatcttccagattggctcgaggacactctctctgaaggaataagacagtggtggaagctcaaacctggcccaccaccaccaaggcccgcagagcggcatcaggacgacagcaggggtcttgtgcttcctgggtacaagtacctcggacccttcaacggactcgacaaaggagagccggtcaacgaggcagacgctgcggccctcgagcacgacaaggcctacgaccggcagctcgacagcggagacaacccgtacctcaagtacaaccacgccgacgcggagtttcaggagcgtcttaaagaagatacgtcttttgggggcaacctcggacgagcagtcttccaggcgaaaaagagggttcttgaacctctgggcctggttgaggaacctgttaagacggctccgggaaaaaagaggccggtagagcactctcctgcggagccagactcctcctcgggaaccggaaaagcgggccagcagcctgcaagaaagagattgaatttcggtcagactggagacgcagactccgtacctgacccccagcctctcggacagccaccagcagcccccacaagtttgggatctactacaatggctacaggcagtggcgcaccaatggcagacaataacgagggtgccgatggagtgggtaattcctcaggaaattggcattgcgattcccaatggctgggcgacagagtcatcaccaccagcacccgaacctgggccctgcccacctacaacaaccacctctacaagcaaatctccagccaatcaggagcatcgaacgacaaccactactttggctacagcaccccttgggggtattttgacttcaacagattccactgtcacttctccccacgtgactggcaaagactcatcaacaacaactggggattccgacccaagagactcaacttcaagctctttaacattcaagtcaaagaggtcacgcagaatgacggtacgacgacgattgccaataaccttaccagcacggttcaggtgtttactgactcggagtaccagctcccgtacgtcctcggctcggcgcatcaaggatgcctcccgccgtttccagcggacgtcttcatggtcccacagtatggatacctcaccctgaacaacgggagtcaggcggtaggacgctcttccttttactgcctggagtactttccttctcagatgctgcgtaccggaaacaactttaccttcagctacacctttgaggacgtgcccttccacagcagctacgctcacagccagagtttggaccggctgatgaatcctctgatcgaccagtatctgtattatctgaacaggacacaatcaaatagtggaactcttcagcagtctaggctactgtttagccaagctggacccaccagcatgtcccttcaagctaaaaactggctgcctggaccttgctacagacagcagcgtctgtcaaagcaggcaaacgacaacaacaacagcaactttccctggactgcggctacaaagtatcatctaaatggtcgggactcgttggttaatccaggaccagctatggccagccacaaagacgatgaagaaaagtttttccccatgcatggaaccctgatatttggtaaacaaggaacaaatgctaacgacgcggatttggaacatgtcatgattacagatgaagaagaaatcaggaccaccaatcccgtggctacagagcagtacggaaacgtgtcaaataatttgcaaaactcaaatactggtccaactacagaaaatgtcaatcaccagggagcgttacctggtatggtgtggcaggatcgagacgtgtacctgcagggacccatttgggccaagattcctcacaccgacggacactttcacccttctccactgatgggaggttttggactcaaacacccgcctcctcaaatcatgatcaaaaacactcctgttccagccaatcctcctacaaacttcagcgcggcaaagtttgcttccttcatcacacagtattccacgggacaggtcagcgtggagatcgagtgggagctgcagaaggagaacagcaaacgctggaaccccgagatccagtacacttccaactacaacaaatctgttaatgtggactttactgtggacgctaatggtgtgtattcagagcctcgccccattggcaccagatacctgactcgtaatctgtaa

SEQ ID NO: 3638 - DNA, 2208 bp, Artificial Sequence
  Description of Artificial Sequence: Synthetic polynucleotide
atggctgccgatggttatcttccagattggctcgaggacactctctctgaaggaataagacagtggtggaagctcaaacctggcccaccaccgccaaagcccgcagggcggcataaggacgacagcaggggtcttgtgcttcctgggtacaagtacctcggacccttcaacggactcgacaagggagagccggtcaacgaggcagacgccgcggccctcgagcacgacaaggcctacgaccggcagctcgacagcggagacaacccgtacctcaagtacaaccacgccggcgcggagtttcaggagcgccttaaagaagatacgtcttttgggggcaacctcggacgagcagtattccaggcgaaaaagagggttcttgaacctctgggcctggttgaggagcctgttaagacggctccgggaaaaaagaggccggtagagcactctcctgtggagccagactcctcctcgggaaccggaaaagcgggccagcagcctgcgagaaagagattgaatttcggtcagactggagacgcagactccgtacctgacccccagcctctcggacagccaccagcagcccccacaagtttgggatctactacaatggctacaggcagtggcgcaccaatggcagacaataacgagggtgccgatggagtgggtaattcctcaggaaattggcattgcgattcccaatggctgggcgacagagtcatcaccaccagcacccgaacctgggccctgcccacctacaacaaccacctctataagcaaatctccagccaatcaggagcatcgaacgacaaccactactttggctacagcaccccttgggggtattttgacttcaacagattccactgtcacttctccccacgtgactggcaaagactcatcaacaacaactggggattccgacccaagagactcaacttcaagctctttaacattcaagtcaaagaggtcacgcagaatgacggtacgacgacgattgccaataaccttaccagcacggttcaggtgtttactgactcggagtaccagctcccgtacgtcctcggctcggcgcatcaaggatgcctcccgccgtttccagcggacgtcttcatggtcccacagtatggatacctcaccctgaacaacgggagtcaggcggtaggacactcttccycttactgcctggagtactttccttctcagatgctgcgtaccggaaacaactttaccttcagctacacctttgaggacgtgcctttccacagcagctacgctcacagccagagtttggaccggctgatgaatcctctgatcgaccagtatctgtattatctgaacaggacacaatcaaatagtggaactcttcagcagtctaggctactgtttagccaagctggacccaccagcatgtctcttcaagctaaaaactggctgcctggaccttgctacagacagcagcgtctgtcaaagcaggcaaacgacaacaacaacagcaactttccctggactgcggctacaaagtatcatctaaatggtcgggactcgttggttaatccaggaccagctatggccagccacaaagacgatgaagaaaagtttttccccatgcatggaaccctgatatttggtaaacaaggaacaaatgctaacgacgcggatttggaacatgtcatgattacagatgaagaagaaatcaggaccaccaatcccgtggctacagagcagtacggaaacgtgtcaaataatttgcaaaactcaaatactggtccaactacagaaaatgtcaatcaccagggagcgttacctggtatggtgtggcaggatcgagacgtgtacctgcagggacccatttgggccaagattcctcacaccgacggacactttcacccttctccactgatgggaggttttggactcaaacacccgcctcctcaaatcatgatcaaaaacactcctgttccagccaatcctcctacaaacttcagcgcggcaaagtttgcttccttcatcacacagtattccacgggacaggtcagcgtggagatcgagtgggagctgcagaaggagaacagcaaacgctggaaccccgagatccagtacacttccaactacaacaaatctgttaatgtggactttactgtagacactaatggtgtgtattcagagcctcgccccattggcaccagatacctgactcgtaatctgtaa

SEQ ID NO: 3639 - DNA, 2208 bp, Artificial Sequence
  Description of Artificial Sequence: Synthetic polynucleotide
atggctgccgatggttatcttccagattggctcgaggacactctctctgaaggaataagacagtggtggaagctcaaacctggcccaccaccgccaaagcccgcagagcggcatmaggacgacagcaggggtcttgtgcttcctgggtacaagtacctcggacccttcaacggactcgacaaaggagagccggtcaacgaggcagacgctgcggccctcgagcacgacaaggcctacgaccggcagctcgacagcggagacaacccgtacctcaagtacaaccacgccgacgcggagtttcaggagcgtcttaaagaagatacgtcttttgggggcaacctcggacgagcagtcttccaggcgaaaaagagggttcttgaacctctgggcctggttgaggaacctgttaagacggctccgggaaaaaagaggccggtagagcactctcctgcggagccagactcctcctcgggaaccggaaaagcgggccagcagcctgcaagaaagagattgaatttcggtcagactggagacgcagactccgtacctgacccccagcctctcggacagccaccagcagcccccacaagtttgggatctactacaatggctacaggcagtggcgcaccaatggcagacaataacgagggtgccgatggagtgggtaattcctcaggaaattggcattgcgattcccaatggctgggcgacagagtcatcaccaccagcacccgaacctgggccctgcccacctacaacaaccacctctacaagcaaatctccagccaatcaggagcatcgaacgacaaccactactttggctacagcaccccttgggggtattttgacttcaacagattccactgtcacttctccccacgtgactggcaaagactcatcaacaacaactggggattccgacccaagagactcaacttcaagctctttaacattcaagtcaaagaggtcacgcagaatgacggtacgacgacgattgccaataaccttaccagcacggttcaggtgtttactgactcggagtaccagctcccgtacgtcctcggctcggcgcatcaaggatgcctcccgccgtttccagcggacgtcttcatggtcccacagtatggatacctcaccctgaacaacgggagtcaggcggtaggacgctcttccttttactgcctggagtactttccttctcagatgctgcgtaccggaaacaactttaccttcagctacacctttgaggacgtgcccttccacagcagctacgctcacagccagagtttggaccggctgatgaatcctctgatcgaccagtatctgtattatctgaacaggacacaatcaaatagtggaactcttcagcagtctaggctactgtttagccaagctggacccaccagcatgtcccttcaagctaaaaactggctgcctggaccttgctacagacagcagcgtctgtcaaagcaggcaaacgacaacaacaacagcaactttccctggactgcggctacaaagtatcatctaaatggtcgggactcgttggttaatccaggaccagctatggccagccacaaagacgatgaagaaaagtttttccccatgcatggaaccctgatatttggtaaacaaggaacaaatgctaacgacgcggatttggaacatgtcatgattacagatgaagaagaaatcaggaccaccaatcccgtggctacagagcagtacggaaacgtgtcaaataatttgcaaaactcaaatactggtccaactacagaaaatgtcaatcaccagggagcgttacctggtatggtgtggcaggatcgagacgtgtacctgcagggacccatttgggccaagattcctcacaccgacggacactttcacccttctccactgatgggaggttttggactcaaacacccgcctcctcaaatcatgatcaaaaacactcctgttccagccaatcctcctacaaacttcagcgcggcaaagtttgcttccttcatcacacagtattccacgggacaggtcagcgtggagatcgagtgggagctgcagaaggagaacagcaaacgctggaaccccgagatccagtacacttccaactacaacaaatctgttaatgtggactttactgtagacactaatggtgtgtattcagagcctcgccccattggcaccagatacctgactcgtaatctgtaa

SEQ ID NO: 3640 - DNA, 2208 bp, Artificial Sequence
  Description of Artificial Sequence: Synthetic polynucleotide
atggctgccgatggttatcttccagattggctcgaggacactctctctgaaggaataagacagtggtggaagctcaaacctggcccaccaccaccaaagcccgcagagcggcatcaggacgacagcaggggtcttgtgcttcccgggcacaagtacctcggacccttcaacggactcgacaaaggagagccggtcaacgaggcagacgctgcggccctcgagcacgacaaggcctacgaccggcagctcgacagcggagacaacccgtacctcaagtacaaccacgccgacgcggagtttcaggagcgtcttaaagaagatacgtcttttgggggcaacctcggacgagcagtcttccaggcgaaaaagagggttcttgaacctctgggcctggttgaggaacctgttaagacggctccgggaaaaaagaggccggtagagcactctcctgcggagccagactcctcctcgggaaccggaaaagcgggccagcagcctgcaagaaagagattgaatttcggtcagactggagacgcagactccgtacctgacccccagcctctcggacagccaccagcagcccccacaagtttgggatctactacaatggctacaggcagtggcgcaccaatggcagacaataacgagggtgccgatggagtgggtaattcctcaggaaattggcattgcgattcccaatggctgggcgacagagtcatcaccaccagcacccgaacctgggccctgcccacctacaacaaccacctctataagcaaatctccagccaatcaggagcatcgaacgacaaccactactttggctacagcaccccttgggggtattttgacttcaacagattccactgtcacttctccccacgtgactggcaaagactcatcaacaacaactggggattccgacccaagagactcaacttcaagctctttaacattcaagtcaaagaggtcacgcagaatgacggtacgacgacgattgccaataaccttaccagcacggttcaggtgtttactgactcggagtaccagctcccgtacgtcctcggctcggcgcatcaaggatgcctcccgccgtttccagcggacgtcttcatggtcccacagtatggatacctcaccctgaacaacgggagtcaggcggtaggacactcttcctcttactgcctggagtactttccttctcagatgctgcgtaccggaaacaactttaccttcagctacacctttgaggacgtgcctttccacagcagctacgctcacagccagagtttggaccggctgatgaatcctctgatcgaccagtatctgtattatctgaacaggacacaatcaaatagtggaactcttcagcagtctaggctactgtttagccaagctggacccaccagcatgtctcttcaagctaaaaactggctgcctggaccttgctacagacagcagcgtctgtcaaagcaggcaaacgacaacaacaacagcaactttccctggactgcggctacaaagtatcatctaaatggtcgggactcgttggttaatccaggaccagctatggccagccacaaagacgatgaagaaaagtttttccccatgcatggaaccctgatatttggtaaacaaggaacaaatgctaacgacgcggatttggaacatgtcatgattacagatgaagaagaaatcaggaccaccaatcccgtggctacagagcagtacggaaacgtgtcaaataatttgcaaaactcaaatactggtccaactacagaaaatgtcaatcaccagggagcgttacctggtatggtgtggcaggatcgagacgtgtacctgcagggacccatttgggccaagattcctcacaccgacggacactttcacccttctccactgatgggaggatttggactgaagcaccctcccccgcagattctcatcaagaataccccggtacctgcgaatccttctaccaccttcagcgcggcaaagtttgcttccttcatcacacagtactccacggggcaggtcagcgtggagatcgagtgggagctgcagaaagagaacagcaaacgctggaaccccgagatccagtatacctccaactacaacaagtctgttaatgtggactttactgtggacactaatggcgtgtattcagagcctcgccccattggcacaagatacctgactcgtaatctgtaa

SEQ ID NO: 3641 - DNA, 2208 bp, Artificial Sequence
  Description of Artificial Sequence: Synthetic polynucleotide
atggctgccgatggttatcttccagattggctcgaggacactctctctgaaggaataagacagtggtggaagctcaaacctggcccaccaccgccaaagcccgcagagcggcataaggacgacagcaggggtcttgtgcttcctgggtacaagtacctcggacccttcaacggactcgacaaaggagagccggtcaacgaggcagacgccgcggccctcgagcacgacaaggcctacgaccggcagctcgacagcggagacaacccgtacctcaagtacaaccacgccgacgcggagtttcaggagcgccttaaagaagatacgtcttttgggggcaacctcgcaagagcagtattccaggcgaaaaagagggttcttgaacctctgggcctggttgaggagcctgttaagacggctccgggaaaaaagaggccggtagagcactctcctgcggagccagattcctcctccggaactggaaagtcgggccaacagcctgcaagaaagagattgaattttggtcagactggagacgcagactccgtacctgacccccagcctctcggacagccaccagcagccccctctggtctgggaactaatacgatggcttcaggcagtggcgcaccaatggcagacaataacgagggcgccgacggagtgggtaattcctcgggaaattggcattgcgattccacatggatgggcgacagagtcatcaccaccagcacccgaacctgggccctgcccacctacaacaaccacctctacaagcaaatctccagccaatcaggagcatcgaacgacaaccactactttggctacagcaccccttgggggtattttgacttcaacagattccactgtcacttctccccacgtgactggcaaagactcatcaacaacaactggggattccgacccaagagactcaacttcaagctctttaacattcaagtcaaagaggtcacgcagaatgacggtacgacgacgattgccaataaccttaccagcacggttcaggtgtttactgactcggagtaccagctcccgtacgtcctcggctcggcgcatcaaggatgcctcccgccgtttccagcggacgtcttcatggtcccacagtatggatacctcaccctgaacaacgggagtcaggcggtaggacgctcttccttttactgcctggagtactttccttctcagatgctgcgtaccggaaacaactttaccttcagctacacctttgaggacgtgcccttccacagcagctacgctcacagccagagtttggaccggctgatgaatcctctgatcgaccagtatctgtattatctgaacaggacacaatcaaatagtggaactcttcagcagtctaggctactgtttagccaagctggacccaccagcatgtcccttcaagctaaaaactggctgcctggaccttgctacagacagcagcgtctgtcaaagcaggcaaacgacaacaacaacagcaactttccctggactgcggctacaaagtatcatctaaatggtcgggactcgttggttaatccaggaccagctatggccagccacaaagacgatgaagaaaagtttttccccatgcatggaaccctgatatttggtaaacaaggaacaaatgctaacgacgcggatttggaacatgtcatgattacagatgaagaagaaatcaggaccaccaatcccgtggctacagagcagtacggaaacgtgtcaaataatttgcaaaactcaaatactggtccaactacagaaaatgtcaatcaccagggagcgttacctggtatggtgtggcaggatcgagacgtgtacctgcagggacccatttgggccaagattcctcacaccgacggacactttcacccttctccactgatgggaggttttggactcaaacacccgcctcctcaaatcatgatcaaaaacactcctgttccagccaatcctcctacaaacttcagcgcggcaaagtttgcttccttcatcacacagtattccacgggacaggtcagcgtggagatcgagtgggagctgcagaaggagaacagcaaacgctggaaccccgagatccagtacacttccaactacaacaaatctgttaatgtggactttactgtggacgctaatggtgtgtattcagagcctcgccccattggcaccagatacctgactcgtaatctgtaa

SEQ ID NO: 3642 - DNA, 2208 bp, Artificial Sequence
  Description of Artificial Sequence: Synthetic polynucleotide
atggctgccgatggttatcttccagattggctcgaggacattctctctgaaggaataagacagtggtggaagctcaaacctggcccaccaccaccaaagcccgcagagcggcataaggacgacagcaggggtcttgtgcttcctgggtacaagtacctcggacccttcaacggactcgacaaaggagagccggtcaacgaggcagacgccgcggccctcgagcacgacaaggcctacgaccggcagctcgacagcggagacaacccgtacctcaagtacaaccacgccgacgcggagtttcaggagcgtcttaaagaagatacgtcttttgggggcaacctcggacgagcagtcttccaggcgaaaaagagggttcttgaacctctgggcctggttgaggaacctgttaagacggctccgggaaaaaagaggccggtagagcaatctcctgcggagccagactcctcctcgggaaccggaaaggcgggcaaccagcctgcaagaaagagattgaattttggtcagactggagacgcagactccgtacctgacccccagcctctcggacagccaccagcagccccctctggtctgggatctactacaatggctacaggcagtggcgcaccaatggcagacaataacgagggtgccgatggagtgggtaattcctcaggaaattggcattgcgattcccaatggttgggcgacagagtcatcaccaccagcacccgaacctgggccctgcccacctacaacaatcacctctacaagcaaatctccagccaatcaggagcagcgaacgacaaccactactttggctacagcaccccctgggggtattttgacttcaacagattccactgccacttttcaccacgtgactggcaaagactcatcaacaacaactggggattccgacccaaragactcaacttcaagctctttaacattcaagtcaaagaggtcacgcagaatgacggtacgacgacgattgccaataaccttaccagcacggttcaggtgtttactgactcggagtaccagctcccgtacgtcctcggctcggcgcatcaaggatgcctcccgccgtttccagcggacgtcttcatggtcccacagtatggatacctcaccctgaacaacgggagtcaggcggtaggacgctcttccttttactgcctggagtactttccttctcagatgctgcgtaccggaaacaactttaccttcagctacacctttgaggacgtgcccttccacagcagctacgctcacagccagagtttggaccggctgatgaatcctctgatcgaccagtatctgtattatctgaacaggacacaatcaaatagtggaactcttcagcagtctaggctactgtttagccaagctggacccaccagcatgtcccttcaagctaaaaactggctgcctggaccttgctacagacagcagcgtctgtcaaagcaggcaaacgacaacaacaacagcaactttccctggactgcggctacaaagtatcatctaaatggtcgggactcgttggttaatccaggaccagctatggccagccacaaagacgatgaagaaaagtttttccccatgcatggaaccctgatatttggtaaacaaggaacaaatgctaacgacgcggatttggaacatgtcatgattacagatgaagaagaaatcaggaccaccaatcccgtggctacagagcagtacggaaacgtgtcaaataatttgcaaaactcaaatactggtccaactacagaaaatgtcaatcaccagggagcgttacctggtatggtgtggcaggatcgagacgtgtacctgcagggacccatttgggccaagattcctcacaccgacggacactttcacccttctccactgatgggaggttttggactcaaacacccgcctcctcaaatcatgatcaaaaacactcctgttccagccaatcctcctacaaacttcagcgcggcaaagtttgcttccttcatcacacagtattccacgggacaggtcagcgtggagatcgagtgggagctgcagaaggagaacagcaaacgctggaaccccgagatccagtacacttccaactacaacaaatctgttaatgtggactttactgtggacgctaatggtgtgtattcagagcctcgccccattggcaccagatacctgactcgtaatctgtaa

SEQ ID NO: 3643 - DNA, 2208 bp, Artificial Sequence
  Description of Artificial Sequence: Synthetic polynucleotide
atggctgccgatggttatcttccagattggctcgaggacactctctctgaaggaataagacagtggtggaagctcaaacctggcccaccaccaccaaggcccgcagagcggcatcaggacgacagcaggggtcttgtgcttcctgggtacaagtacctcggacccttcaacggactcgacaaaggagagccggtcaacgaggcagacgctgcggccctcgagcacgacaaggcctacgaccggcagctcgacagcggagacaacccgtacctcaagtacaaccacgccgacgcggagtttcaggagcgtcttaaagaagatacgtcttttgggggcaacctcggacgagcagtcttccaggcgaaaaagagggttcttgaacctctgggcctggttgaggaacctgttaagacggctccgggaaaaaagaggccggtagagcactctcctgcggagccagactcctcctcgggaaccggaaaagcgggccagcagcctgcaagaaagagattgaatttcggtcagactggagacgcagactccgtacctgacccccagcctctcggacagccaccagcagcccccacaagtttgggatctactacaatggctacaggcagtggcgcaccaatggcagacaataacgagggtgccgatggagtgggtaattcctcaggaaattggcattgcgattcccaatggctgggcgacagagtcatcaccaccagcacccgaacctgggccctgcccacctacaacaaccacctctacaagcaaatctccagccaatcaggagcatcgaacgacaaccactactttggctacagcaccccttgggggtattttgacttcaacagattccactgtcacttctccccacgtgactggcaaagactcatcaacaacaactggggattccgacccaagagactcaacttcaagctctttaacattcaagtcaaagaggtcacgcagaatgacggtacgacgacgattgccaataaccttaccagcacggttcaggtgtttactgactcggagtaccagctcccgtacgtcctcggctcggcgcatcaaggatgcctcccgccgtttccagcggacgtcttcatggtcccacagtatggatacctcaccctgaacaacgggagtcaggcggtaggacgctcttccttttactgcctggagtactttccttctcagatgctgcgtaccggaaacaactttaccttcagctacacctttgaggacgtgcccttccacagcagctacgctcacagccagagtttggaccggctgatgaatcctctgatcgaccagtatctgtattatctgaacaggacacaatcaaatagtggaactcttcagcagtctaggctactgtttagccaagctggacccaccagcatgtcccttcaagctaaaaactggctgcctggaccttgctacagacagcagcgtctgtcaaagcaggcaaacgacaacaacaacagcaactttccctggactgcggctacaaagtatcatctaaatggtcgggactcgttggttaatccaggaccagctatggccagccacaaagacgatgaagaaaagtttttccccatgcatggaaccctgatatttggtaaacaaggaacaaatgctaacgacgcggatttggaacatgtcatgattacagatgaagaagaaatcaggaccaccaatcccgtggctacagagcagtacggaaacgtgtcaaataatttgcaaaactcaaatactggtccaactacagaaaatgtcaatcaccagggagcgttacctggtatggtgtggcaggatcgagacgtgtacctgcagggacccatttgggccaagattcctcacaccgacggacactttcacccttctcctcttatgggaggatttggactgaagcaccctcccccgcagattctcatcaagagtaccccggtacctgcgaatccttctaccaccttcagcgcggcaaagtttgcttccttcatcacacagtactccacggggcaggtcagcgtggagatcgagtgggagctgcagaaagagaacagcaaacgctggaaccccgagatccagtatacctccaactacaacaagtctgttaatgtggactttactgtggacactaatggcgtgtattcagagcctcgccccattggcacaagatacctgactcgtaatctgtaa

SEQ ID NO: 3644 - DNA, 2208 bp, Artificial Sequence
  Description of Artificial Sequence: Synthetic polynucleotide
atggctgccgatggttatcttccagattggctcgaggacactctctctgaaggaataagacagtggtggaagctcaaacctggcccaccaccaccaaggcccgcagagcggcatcaggacgacagcaggggtcttgtgcttcctgggtacaagtacctcggacccttcaacggactcgacaaaggagagccggtcaacgaggcagacgctgcggccctcgagcacgacaaggcctacgaccggcagctcgacagcggagacaacccgtacctcaagtacaaccacgccgacgcggagtttcaggagcgtcttaaagaagatacgtcttttgggggcaacctcggacgagcagtcttccaggcgaaaaagagggttcttgaacctctgggcctggttgaggaacctgttaagacggctccgggaaaaaagaggccggtagagcactctcctgcggagccagactcctcctcgggaaccggaaaagcgggccagcagcctgcaagaaagagattgaatttcggtcagactggagacgcagactccgtacctgacccccagcctctcggacagccaccagcagcccccacaagtttgggatctactacaatggctacaggcagtggcgcaccaatggcagacaataacgagggtgccgatggagtgggtaattcctcaggaaattggcattgcgattcccaatggctgggcgacagagtcatcaccaccagcacccgaacctgggccctgcccacctacaacaaccacctctacaagcaaatctccagccaatcaggagcatcgaacgacaaccactactttggctacagcaccccttgggggtattttgacttcaacagattccactgtcacttctccccacgtgactggcaaagactcaccaacaacaactggggattccgacccaagagactcaacttcaagctctttaacattcaagtcaaagaggtcacgcagaatgacggtacgacgacgattgccaataaccttaccagcacggttcaggtgtttactgactcggagtaccagctcccgtacgtcctcggctcggcgcatcaaggatgcctcccgccgtttccagcggacgtcttcatggtcccacagtatggatacctcaccctgaacaacgggagtcaggcggtaggacgctcttccttttactgcctggagtactttccttctcagatgctgcgtaccggaaacaactttaccttcagctacacctttgaggacgtgcccttccacagcagctacgctcacagccagagtttggaccggctgatgaatcctctgatcgaccagtatctgtattatctgaacaggacacaatcaaatagtggaactcttcagcagtctaggctactgtttagccaagctggacccaccagcatgtcccttcaagctaaaaactggctgcctggaccttgctacagacagcagcgtctgtcaaagcaggcaaacgacaacaacaacagcaactttccctggactgcggctacaaagtatcatctaaatggtcgggactcgttggttaatccaggaccagctatggccagccacaaagacgatgaagaaaagtttttccccatgcatggaaccctgatatttggtaaacaaggaacaaatgctaacgacgcggatttggaacatgtcatgattacagatgaagaagaaatcaggaccaccaatcccgtggctacagagcagtacggaaacgtgtcaaataatttgcaaaactcaaatactggtccaactacagaaaatgtcaatcaccagggagcgttacctggtatggtgtggcaggatcgagacgtgtacctgcagggacccatttgggccaagattcctcacaccgacggacactttcacccttctccactgatgggaggttttggactcaaacacccgcctcctcaaatcatgatcaaaaacactcctgttccagccaatcctcctacaaacttcagcgcggcaaagtttgcttccttcatcacacagtattccacgggacaggtcagcgtggagatcgagtgggagctgcagaaggagaacagcaaacgctggaaccccgagatccagtacacttccaactacaacaaatctgttaatgtggactttactgtggacgctaatggtgtgtattcagagcctcgccccattggcaccagatacctgactcgtaatctgtaa

SEQ ID NO: 3645 - DNA, 2208 bp, Artificial Sequence
  Description of Artificial Sequence: Synthetic polynucleotide
atggctgccgatggttatcttccagattggctcgaggacactctctctgaaggaataagacagtggtggaagctcaaacctggcccaccaccgccaaagcccgcagggcggcataaggacgacagcaggggtcttgtgcttcctgggtacaagtacctcggacccttcaacggactcgacaagggagagccggtcaacgaggcagacgccgcggccctcgagcacgacaaggcctacgaccggcagctcgacagcggagacaacccgtacctcaagtacaaccacgccggcgcggagtttcaggagcgccttaaagaagatacgtcttttgggggcaacctcggacgagcagtattccaggcgaaaaagagggttcttgaacctctgggcctggttgaggagcctgttaagacggccccgggaaaaaagaggccggtagagcactctcctgtggagccagactcctcctcgggaaccggaaaagcgggccagcagcctgcgaggaagagattgaattttggtcagactggagacgcagactccgtacctgacccccagcctctcggacagccaccagcagcccccacaagtttgggatctactacaatggctacaggcagtggcgcaccaatggcagacaataacgagggtgccgatggagtgggtaattcctcagggaattggcattgcgattcccaatggttgggcgacagagtcatcaccaccagcacccgaacctgggccctgcccacctacaacaaccacctctacaagcaaatctccagccaatcaggagccagcaacgacaaccactactttggctacagcaccccctgggggtattttgacttcaacagattccactgccacttttcaccacgtgactggcaaagactcatcaacaacaactggggattccgacccaagagactcaacttcaagctctttaacattcaagtcaaagaggtcacgcagaatgacggtacgacgacgattgccaataaccttaccagcacggttccggtgtttactgactcggagtaccagctcccgtacgtcctcggctcggcgcatcaaggatgcctcccgccgtttccagcggacgtcttcatggtcccacagtatggatacctcaccctgaacaacgggagtcaggcggtaggacgctcttccttttactgcctggagtactttccttctcagatgcttcgtaccggaaacaactttaccttcagttacacctttgaagacgttcctttccacagcagctacgctcacagtcaaagtctggaccggctgatgaatcctcttatcgaccagtacctgtattatctaaacaaaacacaatcaaatagtggaactcttcagcagtctcggctactgtttagtcaagctggacctaccagcatgtctcttcaagctaaaaactggctgcctggaccttgctacagacaacagcgtctgtcaaagcaggcaaacgacaacaacaacagcaactttccctggactgcggctacaaagtatcatctaaatggccgggactcgttggttaatccaggaccagctatggccagccacaaagacgatgaagaaaagtttttccccatgcatggaaccctgatatttggcaaacaagggacaaatgctaacgacgcggatttggacaatgtcatgattacagatgaagaagaaatccgtaccaccaatcccgtggctacggagcagtacgggactgtgtcaaataatttgcaaaactcaaatactggtccaactactggaactgtcaatcaccaaagagcgttacctggtatggtgtggcaggatcgagacgtgtaccttcagggacccatttgggccaagattcctcacaccgatggacactttcacccttctccgctgatgggaggttttggactcaaacacccgcctcctcagatcatgatcaaaaacactcccgttccagccaatcctcccacaaacttcagttctgccaagtttgcttctttcatcacacagtattccacgggacaggttagcgtggagatcgagtgggagctgcagaaggagaacagcaaacgctggaaccccgagatccagtacacttccaactacaacaagtctgttaatgtggactttactgtggacactaatggtgtgtattcagagcctcgccccattggcaccagatacctgactcgtaatctgtaa

SEQ ID NO: 3646 - DNA, 2208 bp, Artificial Sequence
  Description of Artificial Sequence: Synthetic polynucleotide
atggctgccgatggttatcttccagattggctcgaggacactctctctgaaggaataagacagtggtggaagctcaaacctggcccaccaccgccaaagcccgcagggcggcataaggacgacagcaggggtcttgtgcttcctgggtacaagtacctcggacccttcaacggactcgacaagggagagccggtcaacgaggcagacgccgcggccctcgagcacgacaaggcctacgaccggcagctcgacagcggagacaacccgtacctcaagtacaaccacgccggcgcggagtttcaggagcgccttaaagaagatacgtcttttgggggcaacctcggacgagcagtattccaggcgaaaaagagggttcttgaacctctgggcctggttgaggagcctgttaagacggccccgggaaaaaagaggccggtagagcactctcctgtggagccagactcctcctcgggaaccggaaaagcgggccagcagcctgcgaggaagagattgaattttggtcagactggagacgcagactccgtacctgacccccagcctctcggacagccaccagcagcccccacaagtttgggatctactacaatggctacaggcagtggcgcaccaatggcagacaataacgagggtgccgatggagtgggtaattcctcagggaattggcattgcgattcccaatggttgggcgacagagtcatcaccaccagcacccgaacctgggccctgcccacctacaacaaccacctctacaagcaaatctccagccaatcaggagccagcaacgacaaccactactttggctacagcaccccctgggggtattttgacttcaacagattccactgccacttttcaccacgtgactggcaaagactcatcaacaacaactggggattccgacccaagagactcaacttcaagctctttaacattcaagtcaaagaggtcacgcagaatgacggtacgacgacgattgccaataaccttaccagcacggttccggtgtttactgactcggagtaccagctcccgtacgtcctcggctcggcgcatcaaggatgcctcccgccgtttccagcggacgtcttcatggtcccacagtatggatacctcaccctgaacaacgggagtcaggcggtaggacgctcttccttttactgcctggagcactttccttctcagatgcttcgtaccggaaacaactttaccttcagttacacctttgaagacgttcctttccacagcagctacgctcacagtcaaagtctggaccggctgatgaatcctcttatcgaccagtacctgtattatctaaacaaaacacaatcaaatagtggaactcttcagcagtctcggctactgtttagtcaagctggacctaccagcatgtctcttcaagctaaaaactggctgcctggaccttgctacagacaacagcgtctgtcaaagcaggcaaacgacaacaacaacagcaactttccctggactgcggctacaaagtatcatctaaatggccgggactcgttggttaatccaggaccagctatggccagccacaaagacgatgaagaaaagtttttccccatgcatggaaccctgatatttggcaaacaagggacaaatgctaacgacgcggatttggacaatgtcatgattacagatgaagaagaaatccgtaccaccaatcccgtggctacggagcagtacgggactgtgtcaaataatttgcaaaactcaaatactggtccaactactggaactgtcaatcaccaaagagcgttacctggtatggtgtggcaggatcgagacgtgtaccttcagggacccatttgggccaagattcctcacaccgatggacactttcacccttctccgctgatgggaggttttggactcaaacacccgcctcctcagatcatgatcaaaaacactcccgttccagccaatcctcccacaaacttcagttctgccaagtttgcttctttcatcacacagtattccacgggacaggttagcgtggagatcgagtgggagctgcagaaggagaacagcaaacgctggaaccccgagatccagtacacttccaactacaacaagtctgttaatgtggactttactgtggacactaatggtgtgtattcagagcctcgccccattggcaccagatacctgactcgtaatctgtaa

SEQ ID NO: 3647 - DNA, 2208 bp, Artificial Sequence
  Description of Artificial Sequence: Synthetic polynucleotide
atggctgccgatggttatcttccagattggctcgaggacactctctctgaaggaataagacagtggtggaagctcaaacctggcccaccaccgccaaagcccgcagggcggcataaggacgacagcaggggtcttgtgcttcctgggtacaagtacctcggacccttcaacggactcgacaagggagagccggtcaacgaggcagacgccgcggccctcgagcacgacaaggcctacgaccggcagctcgacagcggagacaacccgtacctcaagtacaaccacgccggcgcggagtttcaggagcgccttaaagaagatacgtcttttgggggcaacctcggacgagcagtattccaggcgaaaaagagggttcttgaacctctgggcctggttgaggagcctgttaagacggccccgggaaaaaagaggccggtagagcactctcctgtggagccagactcctcctcgggaaccggaaaagcgggccagcagcctgcgaggaagagattgaattttggtcagactggagacgcagactccgtacctgacccccagcctctcggacagccaccagcagcccccacaagtttgggatctactacaatggctacaggcagtggcgcaccaatggcagacagtaacgagggtgccgatggagtgggtaattcctcagggaattggcattgcgattcccaatggttgggcgacagagtcatcaccaccagcacccgaacctgggccctgcccacctacaacaaccacctctacaagcaaatctccagccaatcaggagccagcaacgacaaccactactttggctacagcaccccctgggggtattttgacttcaacagattccactgccacttttcaccacgtgactggcaaagactcatcaacaacaactggggattccgacccaagagactcaacttcaagctctttaacattcaagtcaaagaggtcacgcagaatgacggtacgacgacgattgccaataaccttaccagcacggttccggtgtttactgactcggagtaccagctcccgtacgtcctcggctcggcgcatcaaggatgcctcccgccgtttccagcggacgtcttcatggtcccacagtatggatacctcaccctgaacaacgggagtcaggcggtaggacgctcttccttttactgcctggagtactttccttctcagatgcttcgtaccggaaacaactttaccttcagttacacctttgaagacgttcctttccacagcagctacgctcacagtcaaagtctggaccggctgatgaatcctcttatcgaccagtacctgtattatctaaacaaaacacaatcaaatagtggaactcttcagcagtctcggctactgtttagtcaagctggacctaccagcatgtctcttcaagctaaaaactggctgcctggaccttgctacagacaacagcgtctgtcaaagcaggcaaacgacaacaacaacagcaactttccctggactgcggctacaaagtatcatctaaatggccgggactcgttggttaatccaggaccagctatggccagccacaaagacgatgaagaaaagtttttccccatgcatggaaccctgatatttggcaaacaagggacaaatgctaacgacgcggatttggacaatgtcatgattacagatgaagaagaaatccgtaccaccaatcccgtggctacggagcagtacgggactgtgtcaaataatttgcaaaactcaaatactggtccaactactggaactgtcaatcaccaaagagcgttacctggtatggtgtggctggatcgagacgtgtaccttcagggacccatttgggccaagattcctcacaccgatggacactttcacccttctccgctgatgggaggttttggactcaaacacccgcctcctcagatcatgatcaaaaacactcccgttccagccaatcctcccacaaacttcagttctgccaagtttgcttctttcatcacacagtattccacgggacaggttagcgtggagatcgagtgggagctgcagaaggagaacagcaaacgctggaaccccgagatccagtacacttccaactacaacaagtctgttaatgtggactttactgtggacactaatggtgtgtattcagagcctcgccccattggcaccagatacctgactcgtaatctgtaa

SEQ ID NO: 3648 - DNA, 2208 bp, Artificial Sequence
  Description of Artificial Sequence: Synthetic polynucleotide
atggctgccgatggttatcttccagattggctcgaggacactctctctgaaggaataagacagtggtggaggctcaaacctggcccaccaccgccaaagcccgcagggcggcataaggacgacagcaggggtcttgtgcttcctgggtacaagtacctcggacccttcaacggactcgacaagggagagccggtcaacgaggcagacgccgcggccctcgagcacgacaaggcctacgaccggcagctcgacagcggagacaacccgtacctcaagtacaaccacgccggcgcggagtttcaggagcgccttaaagaagatacgtcttttgggggcaacctcggacgagcagtattccaggcgaaaaagagggttcttgaacctctgggcctggttgaggagcctgttaagacggccccgggaaaaaagaggccggtagagcactctcctgtggagccagactcctcctcgggaaccggaaaagcgggccagcagcctgcgaggaagagattgaattttggtcagactggagacgcagactccgtacctgacccccagcctctcggacagccaccagcagcccccacaagtttgggatctactacaatggctacaggcagtggcgcaccaatggcagacaataacgagggtgccgatggagtgggtaattcctcagggaattggcattgcgattcccaatggttgggcgacagagtcatcaccaccagcacccgaacctgggccctgcccacctacaacaaccacctctacaagcaaatctccagccaatcaggagccagcaacgacaaccactactttggctacagcaccccctgggggtattttgacttcaacagattccactgccacttttcaccacgtgactggcaaagactcatcaacaacaactggggattccgacccaagagactcaacttcaagctctttaacattcaagtcaaagaggtcacgcagaatgacggtacgacgacgattgccaataaccttaccagcacggttccggtgtttactgactcggagtaccagctcccgtacgtcctcggctcggcgcatcaaggatgcctcccgccgtttccagcggacgtcttcatggtcccacagtatggatacctcaccctgaacaacgggagtcaggcggtaggacgctcttccttttactgcctggagtactttccttctcagatgcttcgtaccggaaacaactttaccttcagttacacctttgaagacgttcctttccacagcagctacgctcacagtcaaagtctggaccggctgatgaatcctcttatcgaccagtacctgtattatctaaacaaaacacaatcaaatagtggaactcttcagcagtctcggctactgtttagtcaagctggacctaccagcatgtctcttcaagctaaaaactggctgcctggaccttgctacagacaacagcgtctgtcaaagcaggcaaacgacaacaacaacagcaactttccctggactgcggctacaaagtatcatctaaatggccgggactcgttggttaatccaggaccagctatggccagccacaaagacgatgaagaaaagtttttccccatgcatggaaccctgatatttggcaaacaagggacaaatgctaacgacgcggatttggacaatgtcatgattacagatgaagaagaaatccgtaccaccaatcccgtggctacggagcagtacgggactgtgtcaaataatttgcaaaactcaaatactggtccaactactggaactgtcaatcaccaaagagcgttacctggtatggtgtggcaggatcgagacgtgtaccttcagggacccatttgggccaagattcctcacaccgatggacactttcacccttctccgctgatgggaggttttggactcaaacacccgcctcctcagatcatgatcaaaaacactcccgttccagccaatcctcccacaaacttcagttctgccaagtttgcttctttcatcacacagtattccacgggacaggttagcgtggagatcgagtgggagctgcagaaggagaacagcaaacgctggaaccccgagatccagtacacttccaactacaacaagtctgttaatgtggactttactgtggacactaatggtgtgtattcagagcctcgccccattggcaccagatacctgactcgtaatctgtaa

SEQ ID NO: 3649 - DNA, 2208 bp, Artificial Sequence
  Description of Artificial Sequence: Synthetic polynucleotide
atggctgccgatggttatcttccagattggctcgaggacactctctctgaaggaataagacagtggtggaagctcaaacctggcccaccaccgccaaagcccgcagggcggcataaggacgacagcaggggtcttgtgcttcctgggtacaagtacctcggacccttcaacggactcgacaagggagagccggtcaacgaggcagacgccgcggccctcgagcacgacaaggcctacgaccggcagctcgacagcggagacaacccgtacctcaagtacaaccacgccggcgcggagtttcaggagcgccttaaagaagatacgtcttttgggggcaacctcggacgagcagtattccaggcgaaaaagagggttcttgaacctctgggcctggttgaggagcctgttaagacggccccgggaaaaaagaggccggtagagcactctcctgtggagccagactcctcctcgggaaccggaaaagcgggccagcagcctgcgaggaagagattgaattttggtcagactggagacgcagactccgtacctgacccccagcctctcggacagccaccagcagcccccacaagtttgggatctactacaatggctacaggcagtggcgcaccaatggcagacaataacgagggtgccgatggagtgggtaattcctcagggaattggcattgcgattcccaatggttgggcgacagagtcatcaccaccagcacccgaacctgggccctgcccacctacaacaaccacctctacaagcaaatctccagccaatcaggagccagcaacgacaaccactactttggctacagcaccccctgggggtattttgacttcaacagattccactgccacttttcaccacgtgactggcaaagactcatcaacaacaactggggattccgacccaagagactcaacttcaagctctttaacattcaagtcaaagaggtcacgcagaatgacggtacgacgacgattgccaataaccttaccagcacggttccggtgtttactgactcggagtaccagctcccgtacgtcctcggctcggcgcatcaaggatgcctcccgccgtttccagcggacgtcttcatggtcccacagtatggatacctcaccctgaacaacgggagtcaggcggtaggacgctcttccttttactgcctggagtactttccttctcagatgcttcgtaccggaaacaactttaccttcagttacacctttgaagacgttcctttccacagcagctacgctcacagtcaaagtctggaccggctgatgaatcctcttatcgaccagtacctgtattatctaaacaaaacacaatcaaatagtggaactcttcagcagtctcggctactgtttagtcaagctggacctaccagcatgtctcttcaagctaaaaactggctgcctggaccttgctacagacaacagcgtctgtcaaagcaggcaaacgacaacaacaacagcaactttccctggactgcggctacaaagtatcatctaaatggccgggactcgttggttaatccaggaccagctatggccagccacaaagacgatgaagaaaagtttttccccatgcatggaaccctgatatttggcaaacaagggacaaatgctaacgacgcggatttggacaatgtcatgattacagatgaagaagaaatccgtaccaccaatcccgtggctacggagcagtacgggactgtgtcaaataatttgcaaaactcaaatactggtccaactactggaactgtcaatcaccaaagagcgttacctggtatggtgtggcaggatcgagacgtgtaccttcagggacccatttgggccaagattcctcacaccgatggacactttcacccttctccgctgatgggaggttttggactcaaacacccgcctcctcagatcatgatcaaaaacactcccgttccagccaatcctcccacaaacttcagttctgccaagtttgcttctttcatcacacagtattccacgggacaggttagcgtggagatcgagtgggagctgcagaaggagaacagcaaacgctggaaccccgagatccagtacacttccaactacaacaagtctgttaatgtggaccttactgtggacactaatggtgtgtattcagagcctcgccccattggcaccagatacctgactcgtaatctgtaa

SEQ ID NO: 3650 - DNA, 2208 bp, Artificial Sequence
  Description of Artificial Sequence: Synthetic polynucleotide
atggctgccgatggttatcttccagattggctcgaggacactctctctgaaggaataagacagtggyggaagctcaaacctggcccaccaccgccaaagcccgcagggcggcataaggacgacagcaggggtcttgtgcttcctgggtacaagtacctcggacccttcaacggactcgacaagggagagccggtcaacgaggcagacgccgcggccctcgagcacgacaaggcctacgaccggcagctcgacagcggagacaacccgtacctcaagtacaaccacgccggcgcggagtttcaggagcgccttaaagaagatacgtcttttgggggcaacctcggacgagcagtattccaggcgaaaaagagggttcttgaacctctgggcctggttgaggagcctgttaagacggccccgggaaaaaagaggccggtagagcactctcctgtggagccagactcctcctcgggaaccggaaaagcgggccagcagcctgcgaggaagagattgaattttggtcagactggagacgcagactccgtacctgacccccagcctctcggacagccaccagcagcccccacaagtttgggatctactacaatggctacaggcagtggcgcaccaatggcagacaataacgagggtgccgatggagtgggtaattcctcagggaattggcattgcgattcccaatggttgggcgacagagtcatcaccaccagcacccgaacctgggccctgcccacctacaacaaccacctctacaagcaaatctccagccaatcaggagccagcaacgacaaccactactttggctacagcaccccctgggggtattttgacttcaacagattccactgccacttttcaccacgtgactggcaaagactcatcaacaacaactggggattccgacccaagagactcaacttcaagctctttaacattcaagtcaaagaggtcacgcagaatgacggtacgacgacgattgccaataaccttaccagcacggttccggtgtttactgactcggagtaccagctcccgtacgtcctcggctcggcgcatcaaggatgcctcccgccgtttccagcggacgtcttcatggtcccacagtatggataccccaccctgaacaacgggagtcaggcggtaggacgctcttccttttactgcctggagtactttccttctcagatgcttcgtaccggaaacaactttaccttcagttacacctttgaagacgttcctttccacagcagctacgctcacagtcaaagtctggaccggctgatgaatcctcttatcgaccagtacctgtattatctaaacaaaacacaatcaaatagtggaactcttcagcagtctcggctactgtttagtcaagctggacctaccagcatgtctcttcaagctaaaaactggctgcctggaccttgctacagacaacagcgtctgtcaaagcaggcaaacgacaacaacaacagcaactttccctgggctgcggctacaaagtatcatctaaatggccgggactcgttggttaatccaggaccagctatggccagccacaaagacgatgaagaaaagtttttccccatgcatggaaccctgatatttggcaaacaagggacaaatgctaacgacgcggatttggacaatgtcatgattacagatgaagaagaaatccgtaccaccaatcccgtggctacggagcagtacgggactgtgtcaaataatttgcaaaactcaaatactggtccaactactggaactgtcaatcaccaaagagcgttacctggtatggtgtggcaggatcgagacgtgtaccttcagggacccatttgggccaagattcctcacaccgatggacactttcacccttctccgctgatgggaggttttggactcaaacacccgcctcctcagatcatgatcaaaaacactcccgttccagccaatcctcccacaaacttcagttctgccaagtttgcttctttcatcacacagtattccacgggacaggttagcgtggagatcgagtgggagctgcagaaggagaacagcaaacgctggaaccccgagatccagtacacttccaactacaacaagtctgttaatgtggactttactgtggacactaatggtgtgtattcagagcctcgccccattggcaccagatacctgactcgtaatctgtaa

SEQ ID NO: 3651 - DNA, 2208 bp, Artificial Sequence
  Description of Artificial Sequence: Synthetic polynucleotide
atggctgccgatggttatcttccagattggctcgaggacactctctctgaaggaataagacagtggtggaagctcaaacctggcccaccaccaccaaagcccgcagagcggcatcaggacgacagcaggggtcttgtgcttcctgggtacaagtacctcggacccttcaacggactcgacaaaggagagccggtcaacgaggcagacgctgcggccctcgagcacgacaaggcctacgaccggcagctcgacagcggagacaacccgtacctcaagtacaaccacgccgacgcggagtttcaggagcgtcttaaagaagatacgtcttttgggggcaacctcggacgagcagtcttccaggcgaaaaagagggttcttgaacctctgggcctggttgaggaacctgttaagacggctccgggaaaaaagaggccggtagagcactctcctgcggagccagactcctcctcgggaaccggaaaagcgggccagcagcctgcaagaaagagattgaatttcggtcagactggagacgcagactccgtacctgacccccagcctctcggacagccaccagcagcccccacaagtttgggatctactacaatggctacaggcagtggcgcaccaatggcagacaataacgagggtgccgatggagtgggtaattcctcaggaaattggcattgcgattcccaatggctgggcgacagagtcatcaccaccagcacccgaacctgggccctgcccacctacaacaaccacctctacaagcaaatctccagccaatcaggagcatcgaacgacaaccactactttggctacagcaccccttgggggtattttgacttcaacagattccactgtcacttctccccacgtgactggcaaagactcatcaacaacaactggggattccgacccaagagactcaacttcaagctctttaacattcaagtcaaagaggtcacgcagaatgacggtacgacgacgattgccaataaccttaccagcacggttcaggtgtttactgactcggagtaccagctcccgtacgtcctcggctcggcgcatcaaggatgcctcccgccgtttccagcggacgtcttcatggtcccacagtatggatacctcaccctgaacaacgggagtcaggcggtaggacgctcttccttttactgcctggagtactttccttctcagatgctgcgtaccggaaacaactttaccttcagctacacctttgaggacgtgcctttccacagcagctacgctcacagccagagtttggaccggctgatgaatcctctgatcgaccagtatctgtattatctgaacaggacacaatcaaatagtggaactcttcagcagtctaggctactgtttagccaagctggacccaccagcatgtctcttcaagctaaaaactggctgcctggaccttgctacagacagcagcgtctgtcaaagcaggcaaacgacaacaacaacagcaactttccctggactgcggctacaaagtatcatctaaatggtcgggactcgttggttaatccaggaccagctatggccagccacaaagacgatgaagaaaagtttttccccatgcatggaaccctgatatttggtaaacaaggaacaaatgctaacgacgcggatttggaacatgtcatgattacagatgaagaagaaatcaggaccaccaatcccgtggctacagagcagtacggaaacgtgtcaaataatttgcaaaactcaaatactggtccaactacagaaaatgtcaatcaccagggagcgttacctggtatggtgtggcaggatcgagacgtgtacctgcagggacccatttgggccaagattcctcacaccgacggacactttcacccttctccactgatgggaggttttggactcaaacacccgcctcctcaaatcatgatcaaaaacactcctgttccagccaatcctcctacaaacttcagcgcggcaaagtttgcttccttcatcacacagtattccacgggacaggtcagcgtggagatcgagtgggagctgcagaaggagaacagcaaacgctggaaccccgagatccagtacacttccaactacaacaaatctgttaatgtggactttactgtggacactaatggtgtgtattcagagcctcgccccattggcaccagatacctgactcgtaatctgtaa

SEQ ID NO: 3652 - DNA, 2205 bp, Artificial Sequence
  Description of Artificial Sequence: Synthetic polynucleotide
atggctgccgatggttatcttccagattggctcgaggacactctctctgaaggaataagacagtggtggaagctcaaacctggcccaccaccaccaaagcccgcagagcggcatcaggacgacagcaggggtcttgtgcttcctgggtacaagtacctcggacccttcaacggactcgacaaaggagagccggtcaacgaggcagacgctgcggccctcgagcacgacaaggcctacgaccggcagctcgacagcggagacaacccgtacctcaagtacaaccacgccgacgcggagtttcaggagcgtcttaaagaagatacgtcttttgggggcaacctcggacgagcagtcttccaggcgaaaaagagggttcttgaacctctgggcctggttgaggaacctgttaagacggctccgggaaaaaagaggccggtagagcactctcctgcggagccagactcctcctcgggaaccggaaaagcgggccagcagcctgcaagaaagagattgaatttcggtcagactggagacgcagactccgtacctgacccccagcctctcggacagccaccagcagcccccacaagtttgggatctactacaatggctacaggcagtggcgcaccaatggcagacaataacgagggtgccgatggagtgggtaattcctcaggaaattggcattgcgattcccaatggctgggcgacagagtcatcaccaccagcacccgaacctgggccctgcccacctacaacaaccacctctacaagcaaatctccagccaatcaggagcatcgaacgacaaccactactttggctacagcaccccttgggggtattttgacttcaacagattccactgtcacttctccccacgtgactggcaaagactcatcaacaacaactggggattccgacccaagagactcaacttcaagctctttaacattcaagtcaaagaggtcacgcagaatgacggtacgacgacgattgccaataaccttaccagcacggttcaggtgtttactgactcggagtaccagctcccgtacgtcctcggctcggcgcatcaaggatgcctcccgccgtttccagcggacgtcttcatggtcccacagtatggatacctcaccctgaacaacgggagtcaggcggtaggacgctcttccttttactgcctggagtactttccttctcagatgctgcgtaccggaaacaactttaccttcagctacacctttgaggacgtgcctttccacagcagctacgctcacagccagagtttggaccggctgatgaatcctctgatcgaccagtatctgtattatctgaacaggacacaatcaaatagtggaactcttcagcagtctaggctactgtttagccaagctggacccaccagcatgtctcttcaagctaaaaactggctgcctggaccttgctacagacagcagcgtctgtcaaagcaggcaaacgacaacaacagcaactttccctggactgcggctacaaagtatcatctaaatggtcgggactcgttggttaatccaggaccagctatggccagccacaaagacgatgaagaaaagtttttccccatgcatggaaccctgatatttggtaaacaaggaacaaatgctaacgacgcggatttggaacatgtcatgattacagatgaagaagaaatcaggaccaccaatcccgtggctacagagcagtacggaaacgtgtcaaataatttgcaaaactcaaatactggtccaactacagaaaatgtcaatcaccagggagcgttacctggtatggtgtggcaggatcgagacgtgtacctgcagggacccatttgggccaagattcctcacaccgacggacactttcacccttctccactgatgggaggttttggactcaaacacccgcctcctcaaatcatgatcaaaaacactcctgttccagccaatcctcctacaaacttcagcgcggcaaagtttgcttccttcatcacacagtattccacgggacaggtcagcgtggagatcgagtgggagctgcagaaggagaacagcaaacgctggaaccccgagatccagtacacttccaactacaacaaatctgttaatgtggactttactgtggacactaatggtgtgtattcagagcctcgccccattggcaccagatacctgactcgtaatctgtaa

SEQ ID NO: 3653 - DNA, 2205 bp, Artificial Sequence
  Description of Artificial Sequence: Synthetic polynucleotide
atggctgccgatggttatcttccagattggctcgaggacactctctctgaaggaataagacagtggtggaagctcaaacctggcccaccaccaaagcccgcagagcggcatcaggacgacagcaggggtcttgtgcttcctgggtacaagtacctcggacccttcaacggactcgacaaaggagagccggtcaacgaggcagacgctgcggccctcgagcacgacaaggcctacgaccggcagctcgacagcggagacaacccgtacctcaagtacaaccacgccgacgcggagtttcaggagcgtcttaaagaagatacgtcttttgggggcaacctcggacgagcagtcttccaggcgaaaaagagggttcttgaacctctgggcctggttgaggaacctgttaagacggctccgggaaaaaagaggccggtagagcactctcctgcggagccagactcctcctcgggaaccggaaaagcgggccagcagcctgcaagaaagagattgaatttcggtcagactggagacgcagactccgtacctgacccccagcctctcggacagccaccagcagcccccacaagtttgggatctactacaatggctacaggcagtggcgcaccaatggcagacaataacgagggtgccgatggagtgggtaattcctcaggaaattggcattgcgattcccaatggctgggcgacagagtcatcaccaccagcacccgaacctgggccctgcccacctacaacaaccacctctacaagcaaatctccagccaatcaggagcatcgaacgacaaccactactttggctacagcaccccttgggggtattttgacttcaacagattccactgtcacttctccccacgtgactggcaaagactcatcaacaacaactggggattccgacccaagagactcaacttcaagctctttaacattcaagtcaaagaggtcacgcagaatgacggtacgacgacgattgccaataaccttaccagcacggttcaggtgtttactgactcggagtaccagctcccgtacgtcctcggctcggcgcatcaaggatgcctcccgccgtttccagcggacgtcttcatggtcccacagtatggatacctcaccctgaacaacgggagtcaggcggtaggacgctcttccttttactgcctggagtactttccttctcagatgctgcgtaccggaaacaactttaccttcagctacacctttgaggacgtgcctttccacagcagctacgctcacagccagagtttggaccggctgatgaatcctctgatcgaccagtatctgtattatctgaacaggacacaatcaaatagtggaactcttcagcagtctaggctactgtttagccaagctggacccaccagcatgtctcttcaagctaaaaactggctgcctggaccttgctacagacagcagcgtctgtcaaagcaggcaaacgacaacaacaacagcaactttccctggactgcggctacaaagtatcatctaaatggtcgggactcgttggttaatccaggaccagctatggccagccacaaagacgatgaagaaaagtttttccccatgcatggaaccctgatatttggtaaacaaggaacaaatgctaacgacgcggatttggaacatgtcatgattacagatgaagaagaaatcaggaccaccaatcccgtggctacagagcagtacggaaacgtgtcaaataatttgcaaaactcaaatactggtccaactacagaaaatgtcaatcaccagggagcgttacctggtatggtgtggcaggatcgagacgtgtacctgcagggacccatttgggccaagattcctcacaccgacggacactttcacccttctccactgatgggaggttttggactcaaacacccgcctcctcaaatcatgatcaaaaacactcctgttccagccaatcctcctacaaacttcagcgcggcaaagtttgcttccttcatcacacagtattccacgggacaggtcagcgtggagatcgagtgggagctgcagaaggagaacagcaaacgctggaaccccgagatccagtacacttccaactacaacaaatctgttaatgtggactttactgtggacactaatggtgtgtattcagagcctcgccccattggcaccagatacctgactcgtaatctgtaa

SEQ ID NO: 3654 - DNA, 2208 bp, Artificial Sequence
  Description of Artificial Sequence: Synthetic polynucleotide
atggctgccgatggttatcttccagattggctcgaggacactctctctgaaggaataagacagtggtggaagctcaaacctggcccaccaccaccaaagcccgcagagcggcatcaggacgacagcaggggtcttgtgcttcctgggtacaagtacctcggacccttcaacggactcgacaaaggagagccggtcaacgaggcagacgctgcggccctcgagcacgacaaggcctacgaccggcagctcgacagcggagacaacccgtacctcaagtacaaccacgccgacgcggagtttcaggagcgtcttaaagaagatacgtcttttgggggcaacctcggacgagcagtcttccaggcgaaaaagagggttcttgaacctctgggcctggttgaggaacctgttaagacggctccgggaaaaaagaggccggtagagcactctcctgcggagccagactcctcctcgggaaccggaaaagcgggccagcagcctgcaagaaagagattgaatttcggtcagactggagacgcagactccgtacctgacccccagcctctcggacagccaccagcagcccccacaagtttgggatctactacaatggctacaggcagtggcgcaccaatggcagacaataacgagggtgccgatggagtgggtaattcctcaggaaattggcattgcgattcccaatggctgggcgacagagtcatcaccaccagcacccgaacctgggccctgcccacctacaacaaccacctctacaagcaaatctccagccaatcaggagcatcgaacgacaaccactactttggctacagcaccccttgggggtattttgacttcaacagattccactgtcacttctccccacgtgactggcaaagactcatcaacaacaactggggattccgacccaagagactcaacttcaagctctttaacattcaagtcaaagaggtcacgcagaatgacggtacgacgacgattgccaataaccttaccagcacggttcaggtgtttactgactcggagtaccagctcccgtacgtcctcggctcggcgcatcaaggatgcctcccgccgtttccagcggacgtcttcatggtcccacagtatggatacctcaccctgaacaacgggagtcaggcggtaggacgctcttccttttactgcctggagtactttccttctcagatgctgcgtaccggaaacaactttaccttcagctacacctttgaggacgtgcctttccacagcagctacgctcacagccagagtttggaccggctgatgaatcctctgatcgaccagtatctgtattatctgaacaggacacaatcaaatagtggaactcttcagcagtctaggctactgtttagccaagctggacccaccagcatgtctcttcaagctaaaaactggctgcctggaccttgctacagacagcagcgtctgtcaaagcaggcaaacgacaacaacaacagcaactttccctggactgcggctacaaagtatcatctaaatggtcgggactcgttggttaatccaggaccagctatggccagccacaaagacgatgaagaaaagtttttccccatgcatggaaccctgatatttggtaaacaaggaacaaatgctaacgacgcggatttggaacatgtcatgattacagatgaagaagaaatcaggaccaccaatcccgtggctacagagcagtacggaaacgtgtcaaataatttgcaaaactcaaatactggtccaactacagaaaatgtcaatcaccagggagcgttacctggtatggtgtggcaggatcgagacgcgtacctgcagggacccatttgggccaagattcctcacaccgacggacactttcacccttctccactgatgggaggttttggactcaaacacccgcctcctcaaatcatgatcaaaaacactcctgttccagccaatcctcctacaaacttcagcgcggcaaagtttgcttccttcatcacacagtattccacgggacaggtcagcgtggagatcgagtgggagctgcagaaggagaacagcaaacgctggaaccccgagatccagtacacttccaactacaacaaatctgttaatgtggactttactgtggacactaatggtgtgtattcagagcctcgccccattggcaccagatacctgactcgtaatctgtaa

SEQ ID NO: 3655 - DNA, 2208 bp, Artificial Sequence
  Description of Artificial Sequence: Synthetic polynucleotide
atggctgccgatggttatcttccagattggctcgaggacactctctctgaaggaataagacagtggtggaagctcaaacctggcccaccaccaccaaagcccgcagagcggcatcaggacgacagcaggggtcttgtgcttcctgggtacaagtacctcggacccttcaacggactcgacaaaggagagccggtcaacgaggcagacgctgcggccctcgagcacgacaaggcctacgaccggcagctcgacagcggagacaacccgtacctcaagtacaaccacgccgacgcggagtttcaggagcgtcttaaagaagatacgtcttttgggggcaacctcggacgagcagtcttccaggcgaaaaagagggttcttgaacctctgggcctggttgaggaacctgctaagacggctccgggaaaaaagaggccggtagagcactctcctgcggagccagactcctcctcgggaaccggaaaagcgggccagcagcctgcaagaaagagattgaatttcggtcagactggagacgcagactccgtacctgacccccagcctctcggacagccaccagcagcccccacaagtttgggatctactacaatggctacaggcagtggcgcaccaatggcagacaataacgagggtgccgatggagtgggtaattcctcaggaaattggcattgcgattcccaatggctgggcgacagagtcatcaccaccagcacccgaacctgggccctgcccacctacaacaaccacctctacaagcaaatctccagccaatcaggagcatcgaacgacaaccactactttggctacagcaccccttgggggtattttgacttcaacagattccactgtcacttctccccacgtgactggcaaagactcatcaacaacaactggggattccgacccaagagactcaacttcaagctctttaacattcaagtcaaagaggtcacgcagaatgacggtacgacgacgattgccaataaccttaccagcacggttcaggtgtttactgactcggagtaccagctcccgtacgtcctcggctcggcgcatcaaggatgcctcccgccgtttccagcggacgtcttcatggtcccacagtatggatacctcaccctgaacaacgggagtcaggcggtaggacgctcttccttttactgcctggagtactttccttctcagatgctgcgtaccggaaacaactttaccttcagctacacctttgaggacgtgcctttccacagcagctacgctcacagccagagtttggaccggctgatgaatcctctgatcgaccagtatctgtattatctgaacaggacacaatcaaatagtggaactcttcagcagtctaggctactgtttagccaagctggacccaccagcatgtctcttcaagctaaaaactggctgcctggaccttgctacagacagcagcgtctgtcaaagcaggcaaacgacaacaacaacagcaactttccctggactgcggctacaaagtatcatctaaatggtcgggactcgttggttaatccaggaccagctatggccagccacaaagacgatgaagaaaagtttttccccatgcatggaaccctgatatttggtaaacaaggaacaaatgctaacgacgcggatttggaacatgtcatgattacagatgaagaagaaatcaggaccaccaatcccgtggctacagagcagtacggaaacgtgtcaaataatttgcaaaactcaaatactggtccaactacagaaaatgtcaatcaccagggagcgttacctggtatggtgtggcaggatcgagacgtgtacctgcagggacccatttgggccaagattcctcacaccgacggacactttcacccttctccactgatgggaggttttggactcaaacacccgcctcctcaaatcatgatcaaaaacactcctgttccagccaatcctcctacaaacttcagcgcggcaaagtttgcttccttcatcacacagtattccacgggacaggtcagcgtggagatcgagtgggagctgcagaaggagaacagcaaacgctggaaccccgagatccagtacacttccaactacaacaaatctgttaatgtggactttactgtggacactaatggtgtgtattcagagcctcgccccattggcaccagatacctgactcgtaatctgtaa

SEQ ID NO: 3656 - DNA, 2208 bp, Artificial Sequence
  Description of Artificial Sequence: Synthetic polynucleotide
atggctgccgatggttatcttccagattggctcgaggacactctctctgaaggaataagacagtggtggaagctcaaacctggcccaccaccaccaaagcccgcagagcggcatcaggacgacagcaggggtcttgtgcttcctgggtacaagtacctcggacccttcaacggactcgacaaaggagagccggtcaacgaggcagacgctgcggccctcgagcacgacaaggcctacgaccggcagctcgacagcggagacaacccgtacctcaagtacaaccacgccgacgcggagtttcaggagcgtcttaaagaagatacgtcttttgggggcaacctcggacgagcagtcttccaggcgaaaaagagggttcttgaacctctgggcctggttgaggaacctgttaagacggctccgggaaaaaagaggccggtagagcactctcctgcggagccagactcctcctcgggaaccggaaaagcgggccagcagcctgcaagaaagagattgaatttcggtcagactggagacgcagactccgtacctgacccccagcctctcggacagccaccagcagcccccacaagtttgggatctactacaatggctacaggcagtggcgcaccaatggcagacaataacgagggtgccgatggagtgggtaattcctcaggaaattggcattgcgattcccaatggctgggcgacagagtcatcaccaccagcacccgaacctgggccctgcccacctacaacaaccacctctacaagcaaatctccagccaatcaggagcatcgaacgacaaccactactttggctacagcaccccttgggggtattttgacttcaacagattccactgtcacttctccccacgtgactggcaaagactcatcaacaacaactggggattccgacccaagagactcaacttcaagctctttaacattcaagtcaaagaggtcacgcagaatgacggtacgacgacgattgccaataaccttaccagcacggttcaggtgtttactgactcggagtaccagctcccgtacgtcctcggctcggcgcatcaaggatgcctcccgccgtttccagcggacgtcttcatggtcccacagtatggatacctcaccctgaacaacgggagtcaggcggtaggacgctcttccttttactgcctggagtactttccttctcagatgctgcgtaccggaaacaactttaccttcagctacacctttgaggacgtgcctttccacagcagctacgctcacagccagagtttggaccggctgatgaatcctctgatcgaccagtatctgtattatctgaacaggacacaatcaaatagtggaactcttcagcagtctaggctactgtttagccaagctggacccaccagcatgtctcttcaagctaaaaactggctgcctggaccttgctacagacagcagcgtctgtcaaagcaggcaaacgacaacaacaacagcaactttccctggactgcggctacaaagtatcatctaaatggtcgggactcgttggttaatccaggaccagctatggccagccacaaagacgatgaagaaaagtttttccccatgcatggaaccctgatatttggtaaacaaggaacaaatgctaacgacgcggatttggaacatgtcatgattacagatgaagaagaaatcaggaccaccaatcccgtggctacagagcagtacggaaacgtgtcaaataatttgcaaaactcaaatactggtccaactacagaaaatgtcaatcaccagggagcgttacctggtatggtgtggcaggatcgagacgtgtacctgcagggacccatttgggccaagattcctcacaccgacggacactttcacccttctccactgatgggaggttttggactcaaacacccgcctcctcaaatcatgatcaaaaacactcctgttccagccaatcctcctacaaacttcagcgcggcaaagtttgcttccttcatcacacagtattccacgggacaggtcagcgtggagatcgagtgggagctgcagaaggagaacagcaaacgctggaaccccgagatccagtacacttccaactacaacaaatctgttaatgtggactttactgtggacactaatggtgcgtattcagagcctcgccccattggcaccagatacctgactcgtaatctgtaa

SEQ ID NO: 3657 - DNA, 2208 bp, Artificial Sequence
  Description of Artificial Sequence: Synthetic polynucleotide
atggctgccgatggttatcttccagattggctcgaggacactctctctgaaggaataagacagtggtggaagctcaaacctggcccaccaccgccaaagcccgcagagcggcataaggacgacagcaggggtcttgtgcttcctgggtacaagtacctcggacccttcaacggactcgacaagggagagccggtcaacgaggcagacgccgcggccctcgagcacgacaaggcctacgaccggcagctcgacagcggagacaacccgtacctcaagtacaaccacgccgacgcggagtttcaggagcgccttaaagaagatacgtcttttgggggcaacctcggacgagcagtattccaggcgaaaaagagggttcttgaacctctgggcctggttgaggagcctgttaagacggctccgggaaaaaagaggccggtagagcactctcctgtggagccagactcctcctcgggaaccggaaaagcgggccagcagcctgcgagaaagagattgaattttggtcagactggagacgcagactccgtacctgacccccagcctctcggacagccaccagcagcccccacaagtttgggatctactacaatggctacaggcagtggcgcaccaatggcagacaataacgagggtgccgatggagtgggtaattcctcaggaaattggcattgcgattcccaatggtcgggcgacagagtcatcaccaccagcacccgaacctgggccctgcccacctacaacaaccacctctacaagcaaatctccagccaatcaggagccagcaacgacaaccactactttggctacagcaccccctgggggtattttgacttcaacagattccactgccacttttcaccacgtgactggcaaagactcatcaacaacaactggggattccgacccaagagactcaacttcaagctctttaacattcaagtcaaagaggtcacgcagaatgacggtacgacgacgattgccaataaccttaccagcacggttcaggtgtttactgactcggagtaccagctcccgtacgtcctcggctcggcgcatcaaggatgcctcccgccgtttccagcggacgtcttcatggtcccacagtatggatacctcaccctgaacaacgggagtcaggcggtaggacgctcttccttttactgcctggagtactttccttctcagatgcttcgtaccggaaacaactttaccttcagttacacctttgaagacgttcctttccacagcagctacgctcacagtcaaagtctggaccggctgatgaatcctcttatcgaccagtacctgtattatctaaacaaaacacaatcaaatagtggaactcttcagcagtctcggctactgtttagtcaagctggacctaccagcatgtctcttcaagctaaaaactggctgcctggaccttgctacagacaacagcgtctgtcaaagcaggcaaacgacaacaacaacagcaactttccctggactgcggctacaaagtatcatctaaatggccgggactcgttggttaatccaggaccagctatggccagccacaaagacgatgaagaaaagtttttccccatgcatggaaccctgatatttggcaaacaaggaacaaatgctaacgacgcggatttggacaatgtcatgattacagatgaagaagaaatccgtaccaccaatcccgtggctacggagcagtacgggactgtgtcaaataatttgcaaaactcaaatactggtccaactactggaactgtcaatcaccaaggagcgttacctggtatggtgtggcaggatcgagacgtgtaccttcagggacccatttgggccaagattcctcacaccgatggacactttcacccttctccgctgatgggaggttttggactcaaacacccgcctcctcagatcatgatcaaaaacactcccgttccagccaatcctcccacaaacttcagttctgccaagtttgcttctttcatcacacagtattccacgggacaggttagcgtggagatcgagtgggagctgcagaaggagaacagcaaacgctggaaccccgagatccagtacacttccaactacaacaagtctgttaatgtggactttactgtggacactaatggtgtgtattcagagcctcgccccattggcaccagatacctgactcgtaatctgtaa

SEQ ID NO: 3658 - DNA, 2208 bp, Artificial Sequence
  Description of Artificial Sequence: Synthetic polynucleotide
atggctgccgatggttatcttccagattggctcgaggacgctctctctgaaggaataagacagtggtggaagctcaaacctggcccaccaccgccaaagcccgcagagcggcataaggacgacagcaggggtcttgtgcttcctgggtacaagtacctcggacccttcaacggactcgacaagggagagccggtcaacgaggcagacgccgcggccctcgagcacgacaaggcctacgaccggcagctcgacagcggagacaacccgtacctcaagtacaaccacgccgacgcggagtttcaggagcgccttaaagaagatacgtcttttgggggcaacctcggacgagcagtattccaggcgaaaaagagggttcttgaacctctgggcctggttgaggagcccgttaagacggctccgggaaaaaagaggccggtagagcactctcctgtggagccagactcctcctcgggaaccggaaaagcgggccagcagcctgcgagaaagagattgaattttggtcagactggagacgcagactccgtacctgacccccagcctctcggacagccaccagcagcccccacaagtttgggatctactacaatggctacaggcagtggcgcaccaatggcagacaataacgagggtgccgatggagtgggtaattcctcaggaaattggcattgcgattcccaatggtcgggcgacagagtcatcaccaccagcacccgaacctgggccctgcccacctacaacaaccacctctacaagcaaatctccagccaatcaggagccagcaacgacaaccactactttggctacagcaccccctgggggtattttgacttcaacagattccactgccacttttcaccacgtgactggcaaagactcatcaacaacaactggggattccgacccaagagactcaacttcaagctctttaacattcaagtcaaagaggtcacgcagaatgacagtacgacgacgattgccaataaccttaccagcacggttcaggtgtttactgactcggagtaccagctcccgtacgtcctcggctcggcgcatcaaggatgcctcccgccgtttccagcggacgtcttcatggtcccacagtatggatacctcaccctgaacaacgggagtcaggcggtaggacgctcttccttttactgcctggagtactttccttctcagatgcttcgtaccggaaacaactttaccttcagttacacctttgaagacgttcctttccacagcagctacgctcacagtcaaagcctggaccggctgatgaatcctcttatcgaccagtacctgtattatctaaacaaaacacaatcaaatagtggaactcttcagcagtctcggctactgtttagtcaagctggacctaccagcatgtctcctcaagctaaaaactggctgcctggaccttgctacagacaacagcgtctgtcaaagcaggcaaacgacaacaacaacagcaactttccctggactgcggctacaaagtatcatctaaatggccgggactcgttggttaatccaggaccagctatggccagccacaaagacgatgaagaaaagtttttccccatgcatggaaccctgatatttggcaaacaaggaacaaatgctaacgacgcggatttggacaatgtcatgattacagatgaagaagaaatccgtaccaccaatcccgtggctacggagcagtacgggactgtgtcaaataatttgcaaaactcaaatactggtccaactactggaactgtcaatcaccaaggagcgttacctggtatggtgtggcaggatcgagacgtgtaccttcagggacccatttgggccaagattcctcacaccgatggacactttcacccttctccgctgatgggaggttttggactcaaacacccgcctcctcagatcatgatcaaaaacactcccgttccagccaatcctcccacaaacttcagttctgccaagtttgcttctttcatcacacagtattccacgggacaggttagcgtggagatcgagtgggagctgcagaaggagaacagcaaacgctggaaccccgagatccagtacacttccaactacaacaagtctgttaatgtggactttactgtggacactaatggtgtgtattcagagcctcgccccattggcaccagatacctgactcgtaatctgtaa

SEQ ID NO: 3659 - DNA, 2208 bp, Artificial Sequence
  Description of Artificial Sequence: Synthetic polynucleotide
atggctgccgatggttatcttccagattggctcgaggacactctctctgaaggaataagacagtggtggaagctcaaacctggcccaccaccgccaaagcccgcagagcggcataaggacgacagcaggggtcttgtgcttcctgggtacaagtacctcggacccttcaacggactcgacaagggagagccggtcaacgaggcaaacgccgcggccctcgagcacgacaaggcctacgaccggcagctcgacagcggagacaacccgtacctcaagtacgaccacgccgacgcggagtttcaggagcgccttaaagaagatacgtcttttgggggcaacctcggacgagcagtattccaggcgaaaaagagggttcttgaacctctgggcctggttgaggagcctgttaagacggctccgggaaaaaagaggtcggtagagcactctcctgtggagccagactcctcctcgggaaccggaaaagcgggccagcagcctgcgagaaagagattgaattttggtcagactggagacgcagactccgtacctgacccccagcctctcggacagccaccagcagcccccacaagtttgggatctactacaatggctacaggcagtggcgcaccaatggcagacaataacgagggtgccgatggagtgggtaattcctcaggaaattggcattgcgattcccaatggtcgggcgacagagtcatcaccaccagcacccgaacctgggccctgcccacctacaacaaccacctctacaagcaaatctccagccaatcaggagccagcaacgacaaccactactttggccacagcaccccctgggggtattttgacttcaacagattccactgccacttttcaccacgtgactggcaaagactcatcaacaacaactggggattccgacccaagagactcaacttcaagctctttaacattcaagtcaaagaggtcacgcagaatgacggtacgacgacgattgccaataaccttaccagcacggttcaggtgtttactgactcggagtaccggctcccgtacgtcctcggctcggcgcatcaaggatgcctcccgccgtttccagcggacgtcttcatggtcccacagtatggatacctcaccctgaacaacgggagtcaggcggtaggacgctcctccttttactgcctggagtactttccttctcagatgcttcgtaccggaaacaactttaccttcagttacacctttgaagacgttcctttccacagcagctacgctcacagtcaaagtctggaccggctgatgaatcctcttatcgaccagtacctgtattatctaaacaaaacacaatcaaatagtggaactcttcagcagtctcggctactgtttagtcaagctggacctaccagcatgtctcttcaagctaaaaactggctgcctggaccttgctacagacaacagcgtctgtcaaagcaggcaaacgacaacaacaacagcaactttccctggactgtggctacaaagtatcatctaaatggccgggactcgttggttaatccaggaccagctatggccagccacaaagacgatgaagaaaagtttttccccatgcatggaaccctgatatttggcaaacaaggaacaaatgctaacgacgcggatttggacaatgtcatgattacagatgaagaagaaatccgtaccaccaatcccgtggctacggagcagtacgggactgtgtcaaataatttgcaaaactcaaatactggtccaactactggaactgtcaatcaccaaggagcgttacctggtatggtgtggcaggatcgagacgtgtaccttcagggacccatttgggccaagattcctcacaccgatggacactttcacccttctccgctgatgggaggttttggactcaaacacccgcctcctcagatcatgatcaaaaacactcccgttccagccaatcctcccacaaacttcagttctgccaagtttgcttctttcatcacacagtattccacgggacaggttagcgtggagatcgagtgggagctgcagaaggagaacagcaaacgctggaaccccgagacccagtacacttccaactacaacaagtctgttaatgtggactttactgtggacactaatggtgtgtattcagagcctcgccccattggcaccagatacctgactcgtaatctgtaa

SEQ ID NO: 3660 - DNA, 2208 bp, Artificial Sequence
  Description of Artificial Sequence: Synthetic polynucleotide
atggctgccgatggttatcttccagattggctcgaggacactctctctgaaggaataagacagtggtggaagctcaaacctggcccaccaccgccaaagcccgcagagcggcataaggacgacagcaggggtcttgtgcttcctgggtacaagtacctcggacccttcaacggactcgacaagggagagccggtcaacgaggcaaacgccgcggccctcgagcacgacaaggcctacgaccggcagctcgacagcggagacaacccgtacctcaagtacaaccacgccgacgcggagtttcaggagcgccttaaagaagatacgtcttttgggggcaacctcggacgagcagtattccaggcgaaaaagagggttcttgaacctctgggcctggttgaggagcctgttaagacggctccgggaaaaaagaggccggtagagcactctcctgtggagccagactcctcctcgggaaccggaaaagcgggccagcagcctgcgagaaagagattgaattttggtcagactggagacgcagactccgtacctgacccccagcctctcggacagccaccagcagcccccacaagtttgggatctactacaatggctacaggcagtggcgcaccaatggcagacaataacgagggtgccgatggagtgggtaattcctcaggaaattggcattgcgattcccaatggtcgggcgacagagtcatcaccaccagcacccgaacctgggccctgcccacctacaacaaccacctctacaagcaaatctccagccaatcaggagccagcaacgacaaccactactttggctacagcaccccctgggggtattttgacttcaacagattccactgccgcttttcaccacgtgactggcaaagactcatcaacaacaactggggattccgacccaagagactcaacttcaagctccttaacattcaagtcaaagaggtcacgcagaatgacggtacgacgacgattgccaataaccttaccagcacggttcaggtgtttactgactcggagtaccagctcccgtacgtcctcggctcggcgcatcaaggatgcctcccgccgtttccagcggacgtcttcatggtcccacagtatggatacctcaccctgaacaacgggagtcaggcggtaggacgctcttccttttactgcctggagtactttccttctcagatgcttcgtaccggaaacaactttaccttcagttacacctttgaagacgttcctttccacagcagctacgctcacagtcaaagtctggaccggctgatgaatcctcttatcgaccagtacctgtattatctaaacaaaacacaatcaaatagtggaactcttcagcagtctcggctactgtttagtcaagctggacctaccagcatgtctcttcaagctaaaaactggctgcctggaccttgctacagacaacagcgtctgtcaaagcaggcaaacgacaacaacaacagcaactttccctggactgcggctacaaagtatcatctaaatggccgggactcgttggttaatccaggaccagctatggccagccacaaagacgatgaagaaaagtttttccccatgcatggaaccctgatatttggcaaacaaggaacaaatgctaacgacgcggatttggacaatgtcatggttacagatgaagaagaaatccgtaccaccaatcccgtggctacggagcagtacgggactgtgtcaaataatttgcaaaactcaaatactggtccaactactggaactgtcaatcaccaaggagcgttacctggtatggtgtggcaggatcgagacgtgtaccttcagggacccatttgggccaagattcctcacaccgatggacactttcacccttctccgctgatgggaggttttggactcaaacacccgcctcctcagatcatgatcaaaaacactcccgttccagccaatcctcccacaaacttcagttctgccaagtttgcttctttcatcacacagtattccacgggacaggttagcgtggagatcgagtgggagctgcagaaggagaacagcaaacgctggaaccccgagacccagtacacttccaactacaacaagtctgttaatgtggactttactgtggacactaatggtgtgtattcagagcctcgccccattggcaccagatacctgactcgtaatctgtaa

SEQ ID NO: 3661 - DNA, 2208 bp, Artificial Sequence
  Description of Artificial Sequence: Synthetic polynucleotide
atggctgccgatggttatcttccagattggctcgaggacactctctctgaaggaataagacagtggtggaagctcaaacctggcccaccaccgccaaagcccgcagagcggcataaggacgacagcaggggccttgtgcttcctgggtacaagtacctcggacccttcaacggactcgacaagggagagccggtcaacgaggcagacgccgcggccctcgagcacgacaaggcctacgaccggcagctcgacagcggagacaacccgtacctcaagtacaaccacgccgacgcggagtttcaggagcgccttaaagaagatacgtcttttgggggcaacctcggacgagcagtattccaggcgaaaaagagggttcttgaacctctgggcctggttgaggagcctgttaagacggctccgggaaaaaagaggccggtagagcactctcctgtggagccagactcctcctcgggaaccggaaaagcgggccagcagcctgcgagaaagggattgaattttggtcagactggagacgcagactccgtacctgacccccggcctctcggacagccaccagcagcccccgcaagtttgggatctactacaatggctacaggcagtggcgcaccaatggcagacaataacgagggtgccgatggagtgggtaattcctcaggaaattggcattgcgattcccaatggttgggcgacagagtcatcaccaccagcacccgaacctgggccctgcccacctacaacaaccacctctacaagcaaatctccagccaatcaggagccagcaacgacaaccactactttggctacagcaccccctgggggtattttgacttcaacagattccactgccacttttcaccacgtgactggcaaagactcatcaacaacaactggggattccgacccaagagactcaacttcaagctctttaacattcaagtcaaagaggtcacgcagaatgacggtacgacgacgattgccaataaccttaccagcacggttccggtgtttactgactcggagtaccagctcccgtacgtcctcggctcggcgcatcaaggatgcctcccgccgtttccagcggacgtcttcatggtcccacagtatggatacctcaccctgaacaacgggagtcaggcggtaggacgctcttccttttactgcctggagtactttccttctcagatgcttcgtaccggaaacaactttaccttcagttacacctttgaagacgttcctttccacagcagctacgctcacagtcaaagtctggaccggctgatgaatcctcttatcgaccagtacctgtattatctaaacaaaacacaatcaaatagtggaactcttcagcagtctcggctactgtttagtcaagctggacctaccagcatgtctctccaagctaaaaactggctgcctggaccttactacagacaacagcgtctgtcaaagcaggcaaacgacaacaacaacagcaactttccctggactgcggctacaaagtatcatccaaatggccgggactcgttggttgatccaggaccagctatggccagccacaaagacgatgaagaaaagtttttccccatgcatggaaccctgatatttggcaaacaagggacaaatgctaacgacgcggatttggacaatgtcatgattacagatgaagaagaaatccgtaccaccaatcccgtggctacggggcagtacgggactgtgtcaaataatttgcaaaactcaaatactggtccaactactggaactgtcaatcaccaaggagcgttacctggtatggtgtggcaggatcgagacgtgtaccttcagggacccatttgggccaagattcctcacaccgatggacactttcacccttctccgctgatgggaggttttggactcaaacacccgcctcctcagatcatggtcaaaaacactcccgttccagccaatcctcccacaaacttcagttctgccaagtttgtttctttcatcacacggtattccacgggacaggttagcgtggagatcgagtgggagctgcagaaggagaacagcaaacgctggaaccccgagatccagtacacttccaactacaacaagtctgttaatgtggactttactgtggacactaatggtgtgtattcagagcctcgccccattggcaccagatacctgactcgtaatctgtaa

SEQ ID NO: 3662 - DNA, 2208 bp, Artificial Sequence
  Description of Artificial Sequence: Synthetic polynucleotide
atggctgccgatggttatcttccagattggctcgaggacactctctctgaaggaataagacagtggtggaagctcaaacctggcccaccaccgccaaagcccgcagagcggcataaggacgacagcaggggtcttgtgcttcctgggtacaagtacctcggacccttcaacggacccgacaagggagagccggtcaacgaggcagacgccgcggccctcgagcacgacaaggcctacgaccggcagctcgacagcggagacaacccgtacctcaagtacaaccacgccgacgcggagtttcaggagcgccttaaagaagatacgtcttttgggggcaacctcggacgagcagtattccaggcgaaaaagagggttcttgaacctctgggcctggttgaggagcctgttaagacggctccgggaaaaaagaggccggtagagcactctcctgtggagccagactcctcctcgggaaccggaaaagcgggccagcagcctgcgagaaagagattgaattttggtcagactggagacgcagactccgtacctgacccccagcctctcggacagccaccagcagcccccacaagtttgggatctactacaatggctacaggcagtggcgcaccaatggcagacaataacgagggtgccgatggagtgggtaattcctcaggaaattggcattgcgattcccaatggtcgggcgacagagtcatcaccaccagcacccgaacctgggccctgcccacctacaacaaccacctctacaagcaaatctccagccaatcaggagccagcaacgacaaccactactttggctacagcaccccctgggggtattttgacttcaacagattccactgccacttttcaccacgtgactggcaaagactcatcaacaacaactggggattccgacccaagagactcaacttcaagctctttaacattcaagtcaaagaggtcacgcagaatgacggtacgacgacgattgccaataaccttaccagcacggttcaggtgtttactgactcggagtaccagctcccgtacgtcctcggctcggcgcatcaaggatgcctcccgccgtttccagcggacgtcttcatggtcccacagtatggatacctcaccctgaacaacgggagtcaggcggtaggacgctcttccttttactgcctggagtactttccttctcagatgcttcgtaccggaaacaactttaccttcagttacacctttgaagacgttcctttccacagcagctacgctcacagtcaaagtctggaccggctgatgaatcctcttatcgaccagtacctgtattatctaaacaaaacacaatcaaatagtggaactcttcagcagtctcggctactgtttagtcaagctggacctaccagcatgtctcttcaagctaaaaactggctgcctggaccttgctacagacaacagcgtctgtcaaagcaggcaaacgacaacaacaacagcaactttccctggactgcggctacaaagtatcatctaaatggccgggactcgttggttaatccaggaccagctatggccagccacaaagacgatgaagaaaagtttttccccatgcatggaaccctgatatttggcaaacaaggaacaaatgctaacgacgcggatttggacaatgtcatgattacagatgaagaagaaatccgtaccaccaatcccgtggctacggagcagtacgggactgtgtcaaataatttgcaaaactcaaatactggtccaactactggaactgtcaatcaccaaggagcgttacctggtatggtgtggcaggatcgagacgtgtaccttcagggacccatttgggccaagattcctcacaccgatggacactttcacccttctccgctgatgggaggttttggactcaaacacccgcctcctcagatcatgatcaaaaacactcccgttccagccaatcctcccacaaacttcagttctgccaagtttgcttctttcatcacacagtattccacgggacaggttagcgtggagatcgagtgggagctgcagaaggagaacagcaaacgctggaaccccgagatccagtacacttccaactacaacaagtctgttaatgtggactttactgtggacactaatggtgtgtattcagagcctcgccccattggcaccagatacctgactcgtaatctgtaa

SEQ ID NO: 3663 - DNA, 2208 bp, Artificial Sequence
  Description of Artificial Sequence: Synthetic polynucleotide
atggctgccgatggttatcttccagattggctcgaggacactctctctgaaggaataagacagtggtggaagctcaaacctggcccaccaccgccaaagcccgcagagcggcataaggacgacagcaggggtcttgtgcttcctgggtacaagtacctcggacccttcaacggactcgacaagggagagccggtcaacgaggcagacgccgcggccctcgagcacgacaaggcctacgaccggcagctcgacagcggagacaacccgtacctcaagtacaaccacgccgacgcggagtttcaggagcgccttaaagaagatacgtcttttgggggcaacctcggacgagcagtattccaggcgaaaaagagggttcttgaacctctgggcctggttgaggagcctgttaagacggctccgggaaaaaagaggccggtagagcactctcctgtggagccagactcctcctcgggaaccggaaaagcgggccagcagcctgcgagaaagagattgaattttggtcagactggagacgcagactccgtacctgacccccagcctctcggacagccaccagcagcccccacaagtttgggatctactacaatggctacaggcagtggcgcaccaatggcagacaataacgagggtgccgatggagtgggtaattcctcaggaaattggcattgcgattcccaatggtcgggcgacagagtcatcaccaccagcacccgaacctgggccctgcccacctacaacaaccacctctacaagcaaatctccagccaatcaggagccagcaacgacaaccactactttggctacagcaccccctgggggtattttgacttcaacagattccactgccacttttcaccacgtgactggcaaagactcatcaacaacaactggggattccgacccaagagactcaacttcaagctctttaacattcaagtcaaagaggtcacgcagaatgacggtacgacgacgattgccaataaccttaccagcacggttcaggtgtttactgactcggagtaccagctcccgtacgtcctcggctcggcgcatcaaggatgcctcccgccgtttccagcggacgtcttcatggtcccacagtatggatacctcaccctgaacaacgggagtcaggcggtaggacgctcttccttttactgcctggagtactttccttctcagatgcttcgtaccggaaacaactttaccttcagttacacctttgaagacgttcctttccacagcagctacgctcacagtcaaagtctggaccggctgatgaatcctcttatcgaccagtacctgtattatctaaacaaaacacaatcaaatagtggaactcttcagcagtctcggctactgtttagtcaagctggacctaccagcatgtctcttcaagctaaaaactggctgcctggaccttgctacagacaacagcgtctgtcaaagcaggcaaacgacaacaacaacagcaactttccctggactgcggctacaaagtatcatctaaatggccgggactcgttggttaatccaggaccagctatggccagccacaaagacgatgaagaaaagtttttccccatgcatggaaccctgatatttggcaaacaaggaacaaatgctaacgacgcggatttggacaatgtcatgattacagatgaagaagaaatccgtaccaccaatcccgtggctacggagcagtacgggactgtgtcaaataatttgcaaaactcaaatactggtccaactactggaactgtcaatcaccaaggagcgttacctggtatggtgtggcaggatcgagacgtgtaccttcagggacccatttgggccaagattcctcacaccgatggacactttcacccttctccgctgatgggaggttttggactcaaacacccgcctcctcagatcatgatcaaaaacactcccgttccagccaatcctcccacaaacttcagttctgccaagtttgcttctttcatcacacagtattccacgggacaggttagcgtggagatcgagtgggagctgcagaaggagaacagcaaacgctggaaccccgagacccagtacacttccaactacaacaagtctgttaatgtggactttactgtggacactaatggtgtgtattcagagcctcgccccattggcaccagatacctgactcgtaatctgtaa

SEQ ID NO: 3664 - DNA, 2208 bp, Artificial Sequence
  Description of Artificial Sequence: Synthetic polynucleotide
atggctgccgatggttatcttccagattggctcgaggacactctctctgaaggaataagacagtggtggaagctcaaacctggcccaccaccgccaaagcccgcagagcggcataaggacgacagcaggggccttgtgcttcctgggtacaagtacctcggacccttcaacggactcgacaagggagagccggtcaacgaggcagacgccgcggccctcgagcacgacaaggcctacgaccggcagctcgacagcggagacaacccgtacctcaagtacaaccacgccgacgcggagtttcaggagcgccttaaagaagatacgtcttttgggggcaacctcggacgagcagtattccaggcgaaaaagagggttcttgaacctctgggcctggttgaggagcctgttaagacggctccgggaaaaaagaggccggtagagcactctcctgtggagccagactcctcctcgggaaccggaaaagcgggccagcagcctgcgagaaagggattgaattttggtcagactggagacgcagactccgtacctgacccccggcctctcggacagccaccagcagcccccgcaagtttgggatctactacaatggctacaggcagtggcgcaccaatggcagacaataacgagggtgccgatggagtgggtaattcctcaggaaattggcattgcgattcccaatggttgggcgacagagtcatcaccaccagcacccgaacctgggccctgcccacctacaacaaccacctctacaagcaaatctccagccaatcaggagccagcaacgacaaccactactttggctacagcaccccctgggggtattttgacttcaacagattccactgccacttttcaccacgtgactggcaaagactcatcaacaacaactggggattccgacccaagagactcaacttcaagctctttaacattcaagtcaaagaggtcacgcagaatgacggtacgacgacgattgccaataaccttaccagcacggttccggtgtttactgactcggagtaccagctcccgtacgtcctcggctcggcgcatcaaggatgcctcccgccgtttccagcggacgtcttcatggtcccacagtatggatacctcaccctgaacaacgggagtcaggcggtaggacgctcttccttttactgcctggagtactttccttctcagatgcttcgtaccggaaacaactttaccttcagttacacctttgaagacgttcctttccacagcagctacgctcacagtcaaagtctggaccggctgatgaatcctcttatcgaccagtacctgtattatctaaacaaaacacaatcaaatagtggaactcttcagcagtctcggctactgtttagtcaagctggacctaccagcatgtctctccaagctaaaaactggctgcctggaccttactacagacaacagcgtctgtcaaagcaggcaaacgacaacaacaacagcaactttccctggactgcggctacaaagtatcatccaaatggccgggactcgttggttgatccaggaccagctatggccagccacaaagacgatgaagaaaagtttttccccatgcatggaaccctgatatttggcaaacaagggacaaatgctaacgacgcggatttggacaatgtcatgattacagatgaagaagaaatccgtaccaccaatcccgtggctacggrgcagtacgggactgtgtcaaataatttgcaaaactcaaatactggtccaactactggaactgtcaatcaccaaggagcgttacctggtatggtgtggcaggatcgagacgtgtaccttcagggacccatttgggccaagattcctcacaccgatggacactttcacccttctccgctgatgggaggttttggactcaaacacccgcctcctcagatcatggtcaaaaacactcccgttccagccaatcctcccacaaacttcagttctgccaagtttgcttctttcatcacacggtattccacgggacaggttagcgtggagatcgagtgggagctgcagaaggagaacagcaaacgctggaaccccgagatccagtacacttccaactacaacaagtctgttaatgtggactttactgtggacactaatggtgtgtattcagagcctcgccccattggcaccagatacctgactcgtaatctgtaa

SEQ ID NO: 3665 - DNA, 2208 bp, Artificial Sequence
  Description of Artificial Sequence: Synthetic polynucleotide
atggctgccgatggttatcttccagattggctcgaggacactctctctgaaggaataagacagtggtggaagctcaaacctggcccaccaccgccaaagcccgcagagcggcataaggacgacagcaggggtcttgtgcttcctgggtacaagtacctcggacccttcaacggactcgacaagggagagccggtcaacgaggcagacgccgcggcccccgagcacgacaaggcctacgaccggcagctcgacagcggagacaacccgtaccccaagtacaaccacgccgacgcggagtttcaggagcgccttaaagaagatacgtcttttgggggcaacctcggacgagcagtattccaggcgaaaaagagggttcttgaacctctgggcctggttgaggagcctgttaagacggctccgggaaaaaagaggccggtagagcactctcctgtggagccagactcctcctcgggaaccggaaaagcgggccagcagcctgcgagaaagagattgaattttggtcagactggagacgcagactccgtacctgacccccagcctctcggacagccaccagcagcccccacaagtttgggatctactacaatggctacaggcagtggcgcaccaatggcagacaataacgagggtgccgatggagtgggtaattcctcaggaaattggcattgcgattcccaatggtcgggcgacagagtcatcaccaccagcacccgaacctgggccctgcccacctacaacaaccacctctacaagcaaatctccagccaatcaggagccagcaacgacaaccactactttggctacagcaccccctgggggtattttgacttcaacagattccactgccacttttcaccacgtgactggcaaagactcatcaacaacaactggggattccgacccaagagactcaacttcaagctctttaacattcaagtcaaagaggtcacgcagaatgacggtacgacgacgattgccaataaccttaccagcacggttcaggtgtttactgactcggagtaccagctcccgtacgtcctcggctcggcgcatcaaggatgcctcccgccgtttccagcggacgtcttcatggtcccacagtatggatacctcaccctgaacaacgggagtcaggcggtaggacgctcttccttttactgcctggagtactttccttctcagatgcttcgtaccggaaacaactttaccttcagttacacctttgaagacgttcctttccacagcagctacgctcacagtcaaagtctggaccggctgatgaatcctcttatcgaccagtacctgtattatctaaacaaaacacaatcaaatagtggaactcttcagcagtctcggctactgtttagtcaagctggacctaccagcatgtctcttcaagctaaaaactggctgcctggaccttgctacagacaacagcgtctgtcaaagcaggcaaacgacaacaacaacagcaactttccctggactgcggctacaaagtatcatctaaatggccgggactcgttggttaatccaggaccagctatggccagccacaaagacgatgaagaaaagtttttccccatgcatggaaccctgatatttggcaaacaaggaacaaatgctaacgacgcggatttggacaatgtcatgattacagatgaagaagaaatccgtaccaccaatcccgtggctacggagcagtacgggactgtgtcaaataatttgcaaaactcaaatactggtccaactactggaactgtcaatcaccaaggagcgttacctggtatggtgtggcaggatcgagacgtgtaccttcagggacccatttgggccaagattcctcacaccgatggacactttcacccttctccgctgatgggaggttttggactcaaacacccgcctcctcagatcatgatcaaaaacactcccgttccagccaatcctcccacaaacttcagttctgccaagtttgcttctttcatcacacagtattccacgggacaggttagcgtggagatcgagtgggagctgcagaaggagaacagcaaacgctggaaccccgagatccagtacacttccaactacaacaagtctgttaatgtggactttactgtggacactaatggtgtgtattcagagcctcgccccattggcaccagatacctgactcgtaatctgtaa

SEQ ID NO: 3666 - DNA, 2208 bp, Artificial Sequence
  Description of Artificial Sequence: Synthetic polynucleotide
atggctgccgatggttatcttccagattggctcgaggacactctctctgaaggaataagacagtggtggaagctcaaacctggcccaccaccgccaaagcccgcagagcggcataaggacgacagcaggggtcttgtgcttcctgggtataagtacctcggacccttcaacggactcgacaagggagagccggtcaacgaggcagacgccgcggccctcgagcacgacaaggcctacgaccggcagctcgacagcggagacaacccgtacctcaagtacaaccacgccgacgcggagtttcaggagcgccttaaagaagatacgtcttttgggggcaacctcggacgagcagtattccaggcgaaaaagagggttcttgaacctctgggcctggttgtggagcctgttaagacggctccgggaaaaaagaggccggtagagcactctcctgtggagccagactcctcctcgggaaccggaaaagcgggccagcagcctgcgagaaagagattgaattttggtcagactggagacgcagactccgtacctgacccccagcctctcggacagccaccagcagcccccacaagtttgggatctactacaatggctacaggcagtggcgcaccaatggcagacaataacgagggtgccgatggagtgggtaattcctcaggaaattggcattgcgattcccaatggtcgggcgacagagtcatcaccaccagcacccgaacctgggccctgcccacctacaacaaccacctctacaagcaaatctccagccgatcaggagccagcaacgacaaccactactttggctacagcaccccctgggggtattttgacttcaacggattccactgccacttttcaccacgtgactggcaaagactcatcaacaacaactggggattccgacccaagagactcaacttcaagctctttaacattcaagtcaaagaggtcacgcagaatgacggtacgacgacgattgccaataaccttaccagcacggttcaggtgtttactgactcggagtaccagctcccgcacgtcctcggctcggcgcatcaaggatgcctcccgccgtttccagcggacgtcttcatggtcccacagtatggatacctcaccctgaacaacgggagtcaggcggtaggacgctcttccttttactgcccggagtactttccttctcagatgcttcgtaccggaaacaactttaccttcagttacacctttgaagacgttcctttccacagcagctacgctcacagtcaaagtctggaccggctgatgaatcctcttatcgaccagtacctgtattatctaaacaaaacacaatcaaatagtggaactcttcagcagtctcggctactgtttagtcaagctggacctaccagcatgtctcttcaagctaaaaactggctgcctggaccttgctacagacaacagcgtctgtcaaagcaggcaaacggcaacaacaacagcaactttccctggactgcggctacaaagtatcatctaaatggccgggactcgttggttaatccaggaccagctatggccagccacaaagacgatgaagaaaagtttttccccatgcatggaaccctgatatttggcaaacaaggaacaaatgctaacgacgcggatttggacaatgtcatgattacagatgaagaagaaatccgtaccaccaatcccgtggctacggagcagtacgggactgtgtcaaataatttgcaaaactcaaatactggtccaactactggaactgtcaatcaccaaggagcgttacctggtatggtgtggcaggatcgagacgtgtaccttcagggacccatttgggccaagattcctcacaccgatggacactttcacccttctccgctgatgggaggttttggactcaaacacccgcctcctcagatcatgatcaaaaacactcccgttccagccaatcctcccacaaacttcagttctgccaagtttgcttctttcatcacacagtattccacgggacaggttagcgtggagatcgagtgggagctgcagaaggagaacagcaaacgctggaaccccgagatccagtacacttccaactacaacaagtctgttaatgtggactttactgtggacactaatggtgtgtattcagagcctcgccccattggcaccagatacctgactcgtaatctgtaa

SEQ ID NO: 3667 - DNA, 2208 bp, Artificial Sequence
  Description of Artificial Sequence: Synthetic polynucleotide
atggctgccgatggttatcttccagattggctcgaggacactctctctgaaggaataagacagtggtggaagctcaaacctggcccaccgccgccaaagcccgcagagcggcataaggacgacagcaggggtcttgtgcttcctgggtacaagtacctcggacccttcaacggactcgacaagggagagccggtcaacgaggcagacgccgcggccctcgagcacgacaaggcctacgaccggcagctcgacagcggagacaacccgtacctcaagtacaaccacgccgacgcggagtttcaggagcgccttaaagaagatacgtcttttgggggcaacctcggacgagcagtattccaggcgaaaaagagggttcttgaacctctgggcctggttgaggagcctgttaagacggttccgggaaaaaagaggccggtagagcactctcctgtggagccagactcctcctcgggaaccggaaaagcgggccagcagcctgcgagaaagagattgaattttggtcagactggagacgcagactccgtacctgacccccagcctctcggacagccaccagcagcccccacaagtttgggatctactacaatggctacaggcagtggcgcaccaatggcagacaataacgagggtgccgatggagtgggtaattcctcaggaaattggcattgcgattcccaatggtcgggcgacagagtcatcaccaccagcacccgaacctgggccctgcccacctacaacaaccacccctacaagcaaatctccagccaatcaggagccagcaacgacaaccactactttggctacagcaccccctgggggtattttgacttcaacagattccactgccacttttcaccacgtgactggcaaagactcatcaacaacaactggggattccgacccaagagactcaacttcaagctctttaacattcaagtcaaagaggtcacgcagaatgacggtacgacgacgattgccaataaccttaccagcacggttcaggtgtttactgactcggagtaccagctcccgtacgtcctcggctcggcgcatcaaggacgcctcccgccgtttccagcggacgtcttcatggtcccacagtatggatacctcaccctgaacaacgggagtcaggcggtaggacgctcttccttttactgcctggagtactttccttctcagatgcttcgtaccggaaacaactttaccttcagttacacctttgaagacgttcctttccacagcagctacgctcacagtcaaagtctggaccggctgatgaatcctcttatcgaccagtacctgtattatctaaacaaaacacaatcaaatagtggaactcttcagcagtctcggctactgtttagtcaagctggacctactagcatgtctcttcaagctaaaaactggctgcctggaccttgctacagacaacagcgtctgtcaaagcaggcagacgacaacaacaacagcaactttccctggactgcggctacaaagtatcatctaaatggccgggactcgttggttaatccaggaccagctatggccagccacaaagacgatgaagaaaagtttttccccatgcatggaaccctgatatttggcaaacaaggaacaaatgctaacgacgcggatttggacaatgtcatgattacagatgaagaagaaatccgtaccaccaatcccgtggctacggagcagtacgggactgtgtcaaataatttgcaaaactcaaatactggtccaactactggaactgtcaatcaccaaggagcgttacctggtatggtgtggcaggatcgagacgtgtaccttcagggacccatttgggccaagattcctcacaccgatggacactttcacccttctccgctgatgggaggttttggactcaaacacccgcctcctcagatcatgatcaaaaacactcccgttccagccaatccccccacaaacttcagttctgccaagtttgcttctttcatcacacagtattccacgggacaggttagcgtggagatcgagtgggagctgcagaaggagaacagcaaacgctggaaccccgagatccagtacacttccaactacaacaagtctgttaatgtggactttactgtggacgctaatggtgtgtattcagagcctcgccccattggcaccagatacctgactcgtaatctgtaa

SEQ ID NO: 3668 - DNA, 2208 bp, Artificial Sequence
  Description of Artificial Sequence: Synthetic polynucleotide
atggctgccgatggttatcttccagattggctcgaggacactctctctgaaggaataagacagtggtggaagctcaaacctggcccaccaccgccaaagcccgcagagcggcataaggacgacagcaggggtcttgtgctttctgggtacaagtacctcggacccttcaacggactcgacaagggagagccggtcaacgaggcagacgccgcggccctcgagcacgacaaggcctacgaccggcagctcgacagcggagacaacccgtacctcaagtacaaccacgccgacgcggagtttcaggagcgccttaaagaagatacgtcttttgggggcaacctcggacgagcagtattccaggcgaaaaagagggttcttgaacctctgggcctggttgaggagcctgttaagacggctccgggaaaaaagaggccggtagagcactctcctgtggagccagactcctcctcgggaaccggaaaagcgggccagcagcctgcgagaaagagattgaattttggtcagactggagacgcagactccgtacctgacccccagcctctcggacagccaccagcagcccccacaagtttgggatctactacaatggctacaggcagtggcgcaccaatggcagacaataacgagggtgccgatggagtgggtaattcctcaggaaattggcattgcgattcccaatggtcgggcgacagagtcatcaccaccagcacccgaacctgggccctgcccacctacaacaaccacctctacaagcaaatctccagccaatcaggagccagcaacgacaaccactactttggctacagcaccccctgggggtattttgacttcaacagattccactgccacttttcaccacgtgactggcaaagactcatcaacaacaactggggattccgacccaagagactcaacttcaagctctttaacattcaagtcaaagaggtcacgcagaatgacggtacgacgacgattgccaataaccttaccagcacggttcaggtgtttactgactcggagtaccagctcccgtacgtcctcggctcggcgcatcaaggatgcctcccgccgtttccagcggacgtcttcatggtcccacagtatggatacctcaccctgaacaacgggagtcaggcggtaggacgctcttccttttactgcctggagtactttccttctcagatgcttcgtaccggaaacaactttaccttcagttacacctttgaagacgttcctttccacagcagctacgctcacagtcaaagtctggaccggctgatgaatcctcttatcgaccagtacctgtattatctaaacaaaacacaatcaaatagtggaactcttcagcagtctcggctactgtttagtcaagctggacctaccagcatgtctcttcaagctaaaaactggctgcctggaccttgctacagacaacagcgtctgtcaaagcaggcaaacgacaacaacaacagcaactttccctggactgcggctacaaagtatcatctaaatggccgggactcgttggttaatccaggaccagctatggccagccacaaagacgatgaagaaaagtttttccccatgcatggaaccctgatatttggcaaacaaggaacaaatgctaacgacgcggatttggacaatgtcatgattacagatgaagaagaaatccgtaccaccaatcccgtggctacggagcagtacgggactgtgtcaaataatttgcaaaactcaaatactggtccaactactggaactgtcaatcaccaaggagcgttacctggtatggtgtggcaggatcgagacgtgtaccttcagggacccatttgggccaagattcctcacaccgatggacactttcacccttctccgctgatgggaggttttggactcaaacacccgcctcctcagatcatgatcaaaaacactcccgttccagccaatccccccacaaacttcagttctgccaagtttgcttctttcatcacacagtattccacgggacaggttagcgtggagatcgagtgggagctgcagaaggagaacagcaaacgctggaaccccgagatccagtacacttccaactacaacaagtctgttaatgtggactttactgtggacactaatggtgtgtattcagagcctcgccccattggcaccagatacctgactcgtaatctgtaa

SEQ ID NO: 3669 - DNA, 2208 bp, Artificial Sequence
  Description of Artificial Sequence: Synthetic polynucleotide
atggctgccgatggttatcttccagattggctcgaggacactctctctgaaggaataagacagtggtggaagctcaaacctggcccaccaccgccaaagcccgcagagcggcataaggacgacagcaggggtcttgtgcttcctgggtacaagtacctcggacccttcaacggactcgacaagggagagccggtcaacgaggcagacgccgcggccctcgagcacgacaaggcctacgaccggcagctcgacagcggagacaacccgtacctcaagtacaaccacgccgacgcggagtttcaggagcgccttaaagaagatacgtcttttgggggcaacctcggacgagcagtattccaggcgaaaaagagggttcttgaacctctgggcctggttgaggagcctgttaagacggctccgggaaaaaagaggccggtagagcactctcctgtggagccagactcctcctcgggaaccggaaaagcgggccagcagcctgcgagaaagagattgaattttggtcagactggagacgcagactccgtacctgacccccagcctctcggacagccaccagcagcccccacaagtttgggatctactacaatggctacaggcagtggcgcaccaatggcagacaataacgagggtgccgatggagtgggtaattcctcaggaaattggcattgcgattcccaatggtcgggcgacagagtcatcaccaccagcacccgaacctgggccctgcccacctacaacaaccacctctacaagcaaatctccagccaatcaggagccagcaacgacaaccactactttggctacagcaccccctgggggtattttgacttcaacagattccactgccacttttcaccacgtgactggcaaagactcatcaacaacaactggggattccgacccaagagactcaacttcaagctctttaacattcaagtcaaagaggtcacgcagaatgacggtacgacgacgattgccaataaccttaccagcacggttcaggtgtttactgactcggagtaccagctcccgtacgtcctcggctcggcgcatcaaggatgcctcccgccgtttccagcggacgtcttcatggtcccacagtatggatacctcaccctgaacaacgggagtcaggcggtaggacgctcctccttttactgcctggagtactttccttctcagatgcttcgtaccggaaacaactttaccttcagttacacctttgaagacgttcctttccacagcagctgcgctcacagtcaaagtctggaccggctgatgaatcctcttatcgaccagtacctgtattatctaaacaaaacacaatcaaatagtggaactcttcagcagtctcggctactgtttagtcaagctggacctaccagcatgtctcttcaagctaaaaactggctgcctggaccttgctacagacaacagcgtctgtcaaagcaggcaaacgacaacaacaacagcaactttccctggactgcggctacaaagtatcatctaaatggccgggactcgttggttaatccaggaccagctatggccagccacaaagacgatgaagaaaagtttttccccatgcatggaaccctgatatttggcaaacaaggaacaaatgctaacgacgcggatttggacaatgtcatgattacagatgaagaagaaatccgtaccaccaatcccgtggctacggagcagtacgggactgtgtcaaataatttgcaaaactcaaatactggtccaactactggaactgtcaatcaccaaggagcgttacctggtatggtgtggcaggatcgagacgtgtaccttcagggacccatttgggccaagattcctcacaccgatggacactttcacccttctccgctgatgggaggttttggactcaaacacccgcctcctcagatcatgatcaaaaacactcccgttccagccaatcctcccacaaacttcagttctgccaagtttgcttctttcatcacacagtattccacgggacaggttagcgtggagatcgagtgggagctgcagaaggagaacagcaaacgctggaaccccgagatccagtacacttccaactacaacaagtctgttaatgtggactttactgtggacactaatggtgtgtattcagagcctcgccccattggcaccagatacctgactcgtaatctgtaa

SEQ ID NO: 3670 - DNA, 2208 bp, Artificial Sequence
  Description of Artificial Sequence: Synthetic polynucleotide
atggctgccgatggttatcttccagattggctcgaggacactctctctgaaggaataagacagtggtggaagctcaaacctggcccaccaccgccaaagcccgcagagcggcataaggacgacagcaggggtcttgtgcttcctgggtacaagtacctcggacccttcaacggactcgacaagggagagccggtcaacgaggcagacgccgcggccctcgagcacgacaaggcctacgaccggcagctcgacagcggagacaacccgtacctcaagtacaaccacgccgacgcggagtttcaggagcgccttaaagaagatacgtcttttgggggcaacctcggacgagcagtattccaggcgaaaaagagggttcttgaacctctgggcctggttgaggagcctgttaagacggctccgggaaaaaagaggccggtagagcactctcctgtggagccagactcctcctcgggaaccggaaaagcgggccagcagcctgcgagaaagagattgaattttggtcagactggagacgcagactccgtacctgacccccagcctctcggacagccaccagcagcccccacaagtttgggatctactacaatggctacaggcagtggcgcaccaatggcagacaataacgagggtgccgatggagtgggtaattcctcaggaaattggcattgcgattcccaatggtcgggcgacagagtcatcaccaccagcacccgaacctgggccctgcccacctacaacaaccacctctacaagcaaatctccagccaatcaggagccagcaacgacaaccactactttggctacagcaccccctgggggtattttgacttcaacagattccactgccacttttcaccacgtgactggcaaagactcatcaacaacaactggggattccgacccaagagactcaacttcaagctctttaacattcaagtcaaagaggtcacgcagaatgacggtacgacgacgattgccaataaccttaccagcacggttccggtgtttactgactcggagtaccagctcccgtacgtcctcggctcggcgcatcaaggatgcctcccgccgtttccagcggacgtcttcatggtcccacagtatggatacctcaccctgaacaacgggagtcaggcggtaggacgctcttccttttactgcctggagtactttccttctcagatgcttcgtaccggaaacaactttaccttcagttacacctttgaagacgttcctttccacagcagctacgctcacagtcaaagtctggaccggctgatgaatcctcttatcgaccagtacctgtattatctaaacaaaacacaatcaaatagtggaactcttcagcagtctcggctactgtttagtcaagctggacctaccagcatgtctctccaagctaaaaactggctgcctggaccttactacagacaacagcgtctgtcaaagcaggcaaacgacaacaacaacagcaactttccctggactgcggctacaaagtatcatccaaatggccgggactcgttggttgatccaggaccagctatggccagccacaaagacgatgaagaaaagtttttccccatgcatggaaccctgatatttggcaaacaagggacaaatgctaacgacgcggatttggacaatgtcatgattacagatgaagaagaaatccgtaccaccaatcccgtggctacggggcagtacgggactgtgtcaaataatttgcaaaactcaaatactggtccaactactggaactgtcaatcaccaaggagcgttacctggtatggtgtggcaggatcgagacgtgtaccttcagggacccatttgggccaagattcctcacaccgatggacactttcacccttctccgctgatgggaggttttggactcaaacacccgcctcctcagatcatggtcaaaaacactcccgttccagccaatcctcccacaaacttcagttctgccaagtttgcttctttcatcacacggtattccacgggacaggttagcgtggagatcgagtgggagctgcagaaggagaacagcaaacgctggaaccccgagatccagtacacttccaactacaacaagtctgttaatgtggactttactgtggacactaatggtgtgtattcagagcctcgccccattggcaccagatacctgactcgtaatctgtaa

SEQ ID NO: 3671 - DNA, 2208 bp, Artificial Sequence
  Description of Artificial Sequence: Synthetic polynucleotide
atggctgccgatggttatcttccagattggctcgaggacactctctctgaaggaataagacagtggtggaagctcaaacctggcccaccaccgccaaagcccgcagagcggcataaggacgacagcaggggtcttgtgcttcctgggtacaagtacctcggacccttcaacggacccgacaagggagagccggtcaacgaggcagacgccgcggccctcgagcacgacaaggcctacgaccggcagctcgacagcggagacaacccgtacctcaagtacaaccacgccgacgcggagtttcaggagcgccttaaagaagatacgtcttttgggggcaacctcggacgagcagtattccaggcgaaaaagagggttcttgaacctctgggcctggttgaggagcctgttaagacggctccgggaaaaaagaggccggtagagcactctcctgtggagccagactcctcctcgggaaccggaaaagcgggccagcagcctgcgagaaagagattgaattttggtcagactggagacgcagactccgtacctgacccccagcctctcggacagccaccagcagcccccacaagtttgggatctactacaatggctacaggcagtggcgcaccaatggcagacaataacgagggtgccgatggagtgggtaattcctcaggaaattggcattgcgattcccaatggtcgggcgacagagtcatcaccaccagcacccgaacctgggccctgcccacctacaacaaccacctctacaagcaaatctccagccaatcaggagccagcaacgacaaccactactttggctacagcaccccctgggggtattttgacttcaacagattccactgccacttttcaccacgtgactggcaaagactcatcaacaacaactggggattccgacccaagagactcaacttcaggctctttaacattcaagtcaaagaggtcacgcagaatgacggtacgacgacgattgccaataaccttaccagcacggttcaggtgtttactgactcggagtaccagctcccgtacgtcctcggctcggcgcatcaaggatgcctcccgccgtttccagcggacgtcttcatggtcccacagtatggatacctcaccctgaacaacgggagtcaggcggtaggacgctcttccttttactgcctggagtactttccttctcagatgcttcgtaccggaaacaactttaccttcagttacacctttgaagacgttcctttccacagcagctacgctcacagtcaaagtctggaccggctgatgaatcctcttatcgaccagtacctgtattatctaaacaaaacacaatcaaatagtggaactcttcagcagtctcggctactgtttagtcaagctggacctaccagcatgtctcttcaagctaaaaactggctgcctggaccttgctacagacaacagcgtctgtcaaagcaggcaaacgacaacaacaacagcaactttccctggactgcggctacaaagtatcatctaaatggccgggactcgttggttaatccaggaccagctatggccagccacaaagacgatgaagaaaagtttttccccatgcatggaaccctgatatttggcaaacaaggaacaaatgctaacgacgcggatttggacaatgtcatgattacagatgaagaagaaatccgtaccaccaatcccgtggctacggagcagtacgggactgtgtcaaataatttgcaaaactcaaatactggtccaactactggaactgtcaatcaccaaggagcgttacctggtatggtgtggcaggatcgagacgtgtaccttcagggacccatttgggccaagattcctcacaccgatggacactttcacccttctccgctgatgggaggttttggactcaaacacccgcctcctcagatcatgatcaaaaacactcccgttccagccaatccccccacaaacttcagttctgccaagtttgcttctttcatcacacagtattccacgggacaggttagcgtggagatcgagtgggagctgcagaaggagaacagcaaacgctggaaccccgagatccagtacacttccaactacaacaagtctgttaatgtggactttactgtggacactaatggtgtgtattcagagcctcgccccattggcaccagatacctgactcgtaatctgtaa

SEQ ID NO: 3672 - DNA, 2208 bp, Artificial Sequence
  Description of Artificial Sequence: Synthetic polynucleotide
atggctgccgatggttatcttccagattggctcgaggacactctctctgaaggaataagacagtggtggaagctcaaacctggcccaccaccgccaaagcccgcagagcggcataaggacgacagcaggggtcttgtgcttcctgggtacaagtacctcggacccttcaacggacccgacaagggagagccggtcaacgaggcagacgccgcggccctcgagcacgacaaggcctacgaccggcagctcgacagcggagacaacccgtacctcaagtacaaccacgccgacgcggagtttcaggagcgccttaaagaagatacgtcttttgggggcaacctcggacgagcagtattccaggcgaaaaagagggttcttgaacctctgggcctggttgaggagcctgttaagacggctccgggaaaaaagaggccggtagagcactctcctgtggagccagactcctcctcgggaaccggaaaagcgggccagcagcctgcgagaaagagattgaattttggtcagactggagacgcagactccgtacctgacccccagcctctcggacagccaccagcagcccccacaagtttgggatctactacaatggctacaggcagtggcgcaccaatggcagacaataacgagggtgccgatggagtgggtaattcctcaggaaattggcattgcgattcccaatggtcgggcgacagagtcatcaccaccagcacccgaacctgggccctgcccacctacaacaaccacctctacaagcaaatctccagccaatcaggagccagcaacgacaaccactactttggctacagcaccccctgggggtattttgacttcaacagattccactgccacttttcaccacgtgactggcaaagactcatcaacaacaactggggattccgacccaagagactcaacttcaggctctttaacattcaagtcaaagaggtcacgcagaatgacggtacgacgacgattgccaataaccttaccagcacggttcaggtgtttactgactcggagtaccagctcccgtacgtcctcggctcggcgcatcaaggatgcctcccgccgtttccagcggacgtcttcatggtcccacagtatggatacctcaccctgaacaacgggggtcaggcggtaggacgctcttccttttactgcctggagtactttccttctcagatgcttcgtaccggagacaactttaccttcagttacacctttgaagacgttcctttccacagcagctacgctcacagtcaaagtctggaccggctgatgaatcctcttatcgaccagtacctgtattatctaaacaaaacacaatcaaatagtggaactcttcagcagtctcggctactgtttagtcaagctggacctaccagcatgtctcttcaagctaaaaactggctgcctggaccttgctacagacaacagcgtctgtcaaagcaggcaaacgacaacaacaacagcaactttccctggactgcggctacaaagtatcatctaaatggccgggactcgttggttaatccaggaccagctatggccagccacaaagacgatgaagaaaagtttttccccatgcatggaaccctgatatttggcaaacaaggaacaaatgctaacgacgcggatttggacaatgtcatgattacagatgaagaagaaatccgtaccaccaatcccgtggctacggagcagtacgggactgtgtcaaataatttgcaaaactcaaatactggtccaactactggaactgtcaatcaccaaggagcgttacctggtatggtgtggcaggatcgagacgtgtaccttcagggacccatttgggccaagattcctcacaccgatggacactttcacccttctccgctgatgggaggttttggactcaaacacccgcctcctcagatcatgatcaaaaacactcccgttccagccaatcctcccacaaacttcagttctgccaagtttgcttctttcatcacacagtattccacgggacaggttagcgtggagatcgagtgggagctgcagaaggagaacagcaaacgctggaaccccgagatccagtacacttccaactacaacaagtctgttaatgtggactttactgtggacactaatggtgtgtattcagagcctcgccccattggcaccagatacctgactcgtaatctgtaa

SEQ ID NO: 3673 - DNA, 2208 bp, Artificial Sequence
  Description of Artificial Sequence: Synthetic polynucleotide
atggctgccgatggttatcttccagattggctcgaggacactctctctgaaggaataagacagtggtggaagctcaaacctggcccaccaccgccaaagcccgcagagcggcataaggacgacagcaggggtcttgtgcttcctgggtacaagtacctcggacccttcaacggactcgacaagggagagccggtcaacgaggcagacgccgcggccctcgagcacgacaaggcctacgaccggcagctcgacagcggagacaacccgtacctcaagtacaaccacgccgacgcggagtttcaggagcgccttaaagaagatacgtcttttgggggcaacctcggacgagcagtattccaggcgaaaaagagggttcttgaacctctgggcctggttgaggagcctgttaagacggctccgggaaaaaagaggccggtagagcactctcctgtggagccagactcctcctcgggaaccggaaaagcgggccagcagcctgcgagaaagagattgaattttggtcagactggagacgcagactccgtacctgacccccagcctctcggacagccaccagcagcccccacaagtttgggatctactacaatggctacaggcagtggcgcaccaatggcagacaataacgagggtgccgatggagtgggtaattcctcaggaaattggcattgcgattcccaatggtcgggcgacagagtcatcaccaccagcacccgaacctgggccctgcccacctacaacaaccacctctacaagcaaatctccagccaatcaggagccagcaacgacaaccactactttggctacagcaccccctgggggtattttgacttcaacagattccactgccacttttcaccacgtgactggcaaagactcatcaacaacaactggggattccgacccaagagactcaacttcaagctctttaacattcaagtcaaagaggtcacgcagaatgacggtacgacgacgattgccaataaccttaccagcacggttcaggtgtttactgactcggagtaccagctcccgtacgtcctcggctcggcgcatcaaggatgcctcccgccgtttccagcggacgtcttcatggtcccacagtatggatacctcaccctgaacaacgggagtcaggcggtaggacgctcttccttttactgcctggagtactttccttctcagatgcttcgtaccggaaacaactttaccttcagttacacctttgaagacgttcctttccacagcagttacgctcacagtcaaagtctggaccggctgatgaatcctcttatcgaccagtacctgtattatctaaacaaaacacaatcaaatagtggaactcttcagcagtctcggctactgtttagtcaagctggacctaccagcatgtctcttcaagctaaaaactggctgcctggaccttgctacagacaacagcgtctgtcaaagcaggcaaacgacaacaacaacagcaactttccctggactgcggctacaaagtatcatctaaatggccgggactcgttggttaatccaggaccagctatggccagccacaaagacgatgaagaaaagtttttccccatgcatggaaccctgatatttggcaaacaaggaacaaatgctaacgacgcggatttggacaatgccatgattacagatgaagaagaaatccgtaccaccaatcccgtggctacggagcagtacgggactgtgtcaaataatttgcaaaactcaaatactggtccaactactggaactgtcaatcaccaaggagcgttacctggtatggtgtggcaggatcgagacgtgtaccttcagggacccatttgggccaagattcctcacaccgatggacactttcacccttctccgctgatgggaggttttggactcaaacacccgcctcctcagatcatgatcaaaaacactcccgttccagccaatcctcccacaaacttcagttctgccaagtttgcttctttcatcacacagtattccacgggacaggttagcgtggagatcgagtgggagctgcagaaggagaacagcaaacgctggaaccccgagatccagtacacttccaactacaacaagtctgttaatgtggactttactgtggacactaatggtgtgtattcagagcctcgccccattggcaccagatacctgactcgtaatctgtaa

SEQ ID NO: 3674 - DNA, 2208 bp, Artificial Sequence
  Description of Artificial Sequence: Synthetic polynucleotide
atggctgccgatggttatcttccagattggctcgaggacactctctctgaaggaataagacagtggtggaagctcaaacctggcccaccaccgccaaagcccgcagagcggcataaggacgacagcaggggtcttgtgcttcctgggtacaagtacctcggacccttcaacggactcgacaagggagagccggtcaacgaggcaaacgccgcggccctcgagcacgacaaggcctacgaccggcagctcgacagcggagacaacccgtacctcaagtacaaccacgccgacgcggagtttcaggagcgccttaaagaagatacgtcttttgggggcaacctcggacgagcagtattccaggcgaaaaagagggttcttgaacctctgggcctggttgaggagcctgttaagacggctccgggaaaaaagaggccggtagagcactctcctgtggagccagactcctcctcgggaaccggaaaagcgggccagcagcctgcgagaaagagattgaattttggtcagactggagacgcagactccgtacctgacccccagcctctcggacagccaccagcagcccccacaagtttgggatctactacaatggctacaggcagtggcgcaccaatggcagacaataacgagggtgccgatggagtgggtaattcctcaggaaattggcattgcgattcccaatggtcgggcgacagagtcatcaccaccagcacccgaacctgggccctgcccacctacaacaaccacctctacaagcaaatctccagccaatcaggagccagcaacgacaaccactactttggctacagcaccccctgggggtattttgacttcaacagattccactgccacttttcaccacgtgactggcaaagactcatcaacaacaactggggattccgacccaagagactcaacttcaagctctttaacattcaagtcaaagaggtcacgcagaatgacggtacgacgacgattgccaataaccttaccagcacggttcaggtgtttactgactcggagtaccagctcccgtacgtcctcggctcggcgcatcaaggatgcctcccgccgtttccagcggacgtcttcatggtcccacagtatggatacctcaccctgaacaacgggagtcaggcggtaggacgctcttccttttactgcctggagtactttccttctcagatgcttcgtaccggaaacaactttaccttcagttacacctttgaagacgttcctttccacagcagctacgctcacagtcaaagtctggaccggctgatgaatcctcttatcgaccagtacctgtattatctaaacaaaacacaatcaaatagtggaactcttcagcagtctcggctactgtttagtcaagctggacctaccagcatgtctcttcaagctaaaaactggctgcctggaccttgctacagacaacagcgtctgtcaaagcaggcaaacgacaacaacaacagcaactttccctggactgcggctacaaagtatcatctaaatggccgggactcgttggttaatccaggaccagctatggccagccacaaagacgatgaagaaaagtttttccccatgcatggaaccctgatatttggcaaacaaggaacaaatgctaacgacgcggatttggacaatgtcatgattacagatgaagaagaaatccgtaccaccaatcccgtggctacggagcagtacgggactgtgtcaaataatttgcaaaactcaaatactggtccaactactggaactgtcaatcaccaaggagcgttacctggtatggtgtggcaggatcgagacgtgtaccttcagggacccatttgggccaagattcctcacaccgatggacactttcacccttctccgctgatgggaggttttggactcaaacacccgcctcctcagatcatgatcaaaaacactcccgttccagccaatcctcccacaaacttcagttctgccaagtttgcttctttcatcacacagtattccacgggacaggttagcgtggagatcgagtgggagctgcagaaggagaacagcaaacgctggaaccccgagacccagtacacttccaactacaacaagtctgttaatgtggactttactgtggacactaatggtgtgtattcagagcctcgccccattggcaccagatacctgactcgtaatctgtaa

SEQ ID NO: 3675 - DNA, 2208 bp, Artificial Sequence
  Description of Artificial Sequence: Synthetic polynucleotide
atggctgccgatggttatcttccagattggctcgaggacactctctctgaaggaataagacagtggtggaagctcaaacctggcccaccaccgccaaagcccgcagagcggcataaggacgacagcaggggtcttgtgcttcctgggtacaagtacctcggacccttcaacggacccgacaagggagagccggtcaacgaggcagacgccgcggccctcgagcacgacaaggcctacgaccggcagctcgacagcggagacaacccgtacctcaagtacaaccacgccgacgcggagtttcaggagcgccttaaagaagatacgtcttttgggggcaacctcggacgagcagtattccaggcgaaaaagagggttcttgaacctctgggcctggttgaggagcctgttaagacggctccgggaaaaaagaggccggtagagcactctcctgtggagccagactcctcctcgggaaccggaaaagcgggccagcagcctgcgagaaagagattgaattttggtcagactggagacgcagactccgtacctgacccccagcctctcggacagccaccagcagcccccacaagtttgggatctactacaatggctacaggcagtggcgcaccaatggcagacaataacgagggtgccgatggagtgggtaattcctcaggaaattggcattgcgattcccaatggtcgggcgacagagtcatcaccaccagcacccgaacctgggccctgcccacctacaacaaccacctctacaagcaaatctccagccaatcaggagccagcaacgacaaccactactttggctacagcaccccctgggggtattttgacttcaacagattccactgccacttttcaccacgtgactggcaaagactcatcaacaacaactggggattccgacccaagagactcaacttcaggctctttaacattcaagtcaaagaggtcacgcagaatgacggtacgacgacgattgccaataaccttaccagcacggttcaggtgtttactgactcggagtaccagctcccgtacgtcctcggctcggcgcatcaaggatgcctcccgccgtttccagcggacgtcttcatggtcccacagtatggatacctcaccctgaacaacgggagtcaggcggtaggacgctcttccttttactgcctggagtactttccttctcagatgcttcgtaccggagacaactttaccttcagttacacctttgaagacgttcctttccacagcagctacgctcacagtcaaagtctggaccggctgatgaatcctcttatcgaccagtacctgtattatctaaacaaaacacaatcaaatagtggaactcttcagcagtctcggctactgtttagtcaagctggacctaccagcatgtctcttcaagctaaaaactggctgcctggaccttgctacagacaacagcgtctgtcaaagcaggcaaacgacaacaacaacagcaactttccctggactgcggctacaaagtatcatctaaatggccgggactcgttggttaatccaggaccagctatggccagccacaaagacgatgaagaaaagtttttccccatgcatggaaccctgatatttggcaaacaaggaacaaatgctaacgacgcggatttggacaatgtcatgattacagatgaagaagaaatccgtaccaccaatcccgtggctacggagcagtacgggactgtgtcaaataatttgcaaaactcaaatactggtccaactactggaactgtcaatcaccaaggagcgttacctggtatggtgtggcaggatcgagacgtgtaccttcagggacccatttgggccaagattcctcacaccgatggacactttcacccttctccgctgatgggaggttttggactcaaacacccgcctcctcagatcatgatcaaaaacactcccgttccagccaatcctcccacaaacttcagttctgccaagtttgcttctttcatcacacagtattccacgggacaggttagcgtggagatcgagtgggagctgcagaaggagaacagcaaacgctggaaccccgagatccagtacacttccaactacaacaagtctgttaatgtggactttactgtggacactaatggtgtgtattcagagcctcgccccattggcaccagatacctgactcgtaatctgtaa

SEQ ID NO: 3676 - DNA, 2208 bp, Artificial Sequence
  Description of Artificial Sequence: Synthetic polynucleotide
atggctgccgatggttatcttccagattggctcgaggacactctctctgaaggaataagacagtggtggaagctcaaacctggcccaccaccgccaaagcccgcagagcggcataaggacgacagcaggggccttgtgcttcctgggtacaagtacctcggacccttcaacggactcgacaagggagagccggtcaacgaggcagacgccgcggccctcgagcacgacaaggcctacgaccggcagctcgacagcggagacaacccgtacctcaagtacaaccacgccgacgcggagtttcaggagcgccttaaagaagatacgtcttttgggggcaacctcggacgagcagtattccaggcgaaaaagagggttcttgaacctctgggcctggttgaggagcctgttaagacggctccgggaaaaaagaggccggtagagcactctcctgtggagccagactcctcctcgggaaccggaaaagcgggccagcagcctgcgagaaagggattgaattttggtcagactggagacgcagactccgtacctgacccccggcctctcggacagccaccagcagcccccgcaagtttgggatctactacaatggctacaggcagtggcgcaccaatggcagacaataacgagggtgccgatggagtgggtaattcctcaggaaattggcattgcgattcccaatggttgggcgacagagtcatcaccaccagcacccgaacctgggccctgcccacctacaacaaccacctctacaagcaaatctccagccaatcaggagccagcaacgacaaccactactttggctacagcaccccctgggggtattttgacttcaacagattccactgccacttttcaccacgtgactggcaaagactcatcaacaacaactggggattccgacccaagagactcaacttcaagctctttaacattcaagtcaaagaggtcacgcagaatgacggtacgacgacgattgccaataaccttaccagcacggttccggtgtttactgactcggagtaccagctcccgtacgtcctcggctcggcgcatcaaggatgcctcccgccgtttccagcggacgtcttcatggtcccacagtatggatacctcaccctgaacaacgggagtcaggcggtaggacgctcttccttttactgcctggagtactttccttctcagatgcttcgtaccggaaacaactttaccttcagttacacctttgaagacgttcctttccacagcagctacgctcacagtcaaagtctggaccggctgatgaatcctcttatcgaccagtacctgtattatctaaacaaaacacaatcaaatagtggaactcttcagcagtctcggctactgtttagtcaagctggacctaccagcatgtctctccaagctaaaaactggctgcctggaccttactacagacaacagcgtctgtcaaagcaggcaaacgacaacaacaacagcaactttccctggactgcggctacaaagtatcatccaaatggccgggactcgttggttgatccaggaccagctatggccagccacaaagacgatgaagaaaagtttttccccatgcatggaaccctgatatttggcaaacaagggacaaatgctaacgacgcggatttggacaatgtcatgattacagatgaagaagaaatccgtaccaccaatcccgtggctacggggcagtacgggactgtgtcaaataatttgcaaaactcaaatactggtccaactactggaactgtcaatcaccaaggagcgttacctggtatggtgtggcaggatcgagacgtgtaccttcagggacccatttgggccaagattcctcacaccgatggacactttcacccttctccgctgatgggaggttttggactcaaacacccgcctcctcagatcatggtcaaaaacactcccgttccagccaatcctcccacaaacttcagttctgccaagtttgcttctttcatcacacggtattccacgggacaggttagcgtggagatcgagtgggagctgcagaaggagaacagcaaacgctggaaccccgagatccagtacacttccaactacaacaagtctgttaatgtggactttactgtggacactaatggtgtgtattcagagcctcgccccattggcaccagatacctgactcgtaatctgtaa

SEQ ID NO: 3677 - DNA, 2208 bp, Artificial Sequence
  Description of Artificial Sequence: Synthetic polynucleotide
atggctgccgatggttatcttccagattggctcgaggacactctctctgaaggaataagacagtggtggaagctcaaacctggcccaccgccgccaaagcccgcagagcggcataaggacgacagcaggggtcttgtgcttcctgggtacaagtacctcggacccttcaacggactcgacaagggagagccggtcaacgaggcagacgccgcggccctcgagcacgacaaggcctacgaccggcagctcgacagcggagacaacccgtacctcaagtacaaccacgccgacgcggagtttcaggagcgccttaaagaagatacgtcttttgggggcaacctcggacgagcagtattccaggcgaaaaagagggttcttgaacctctgggcctggttgaggagcctgttaagacggttccgggaaaaaagaggccggtagagcactctcctgtggagccagactcctcctcgggaaccggaaaagcgggccagcagcctgcgagaaagagattgaattttggtcagactggagacgcagactccgtacctgacccccagcctctcggacagccaccagcagcccccacaagtttgggatctactacaatggctacaggcagtggcgcaccaatggcagacaataacgagggtgccgatggagtgggtaattcctcaggaaattggcattgcgattcccaatggtcgggcgacagagtcatcaccaccagcacccgaacctgggccctgcccacctacaacaaccacccctacaagcaaatctccagccaatcaggagccagcaacgacaaccactactttggctacagcaccccctgggggtattttgacttcaacagattccactgccacttttcaccacgtgactggcaaagactcatcaacaacaactggggattccgacccaagagactcaacttcaagctctttaacattcaagtcaaagaggtcacgcagaatgacggtacgacgacgattgccaataaccttaccagcacggttcaggtgtttactgactcggagtaccagctcccgtacgtcctcggctcggcgcatcaaggacgcctcccgccgtttccagcggacgtcttcatggtcccacagtatggatacctcaccctgaacaacgggagtcaggcggtaggacgctcttccttttactgcctggagtactttccttctcagatgcttcgtaccggaaacaactttaccttcagttacacctttgaagacgttcctttccacagcagctacgctcacagtcaaagtctggaccggctgatgaatcctcttatcgaccagtacctgtattatctaaacaaaacacaatcaaatagtggaactcttcagcagtctcggctactgtttagtcaagctggacctaccagcatgtctcttcaagctaaaaactggctgcctggaccttgctacagacaacagcgtctgtcaaagcaggcagacgacaacaacaacagcaactttccctggactgcggctacaaagtatcatctaaatggccgggactcgttggttaatccaggaccagctatggccagccacaaagacgatgaagaaaagtttttccccatgcatggaaccctgatatttggcaaacaaggaacaaatgctaacgacgcggatttggacaatgtcatgattacagatgaagaagaaatccgtaccaccaatcccgtggctacggagcagtacgggactgtgtcaaataatttgcaaaactcaaatactggtccaactactggaactgtcaatcaccaaggagcgttacctggtatggtgtggcaggatcgagacgtgtaccttcagggacccatttgggccaagattcctcacaccgatggacactttcacccttctccgctgatgggaggttttggactcaaacacccgcctcctcagatcatgatcaaaaacactcccgttccagccaatccccccacaaacttcagttctgccaagtttgcttctttcatcacacagtattccacgggacaggttagcgtggagatcgagtgggagctgcagaaggagaacagcaaacgctggaaccccgagatccagtacacttccaactacaacaagtctgttaatgtggactttactgtggacactaatggtgtgtattcagagcctcgccccattggcaccagatacctgactcgtaatctgtaa

SEQ ID NO: 3678 - DNA, 2208 bp, Artificial Sequence
  Description of Artificial Sequence: Synthetic polynucleotide
atggctgccgatggttatcttccagattggctcgaggacactctctctgaaggaataagacagtggtggaagctcaaacctggcccaccaccaccaaagcccgcagagcggcataaggacgacagcaggggtcttgtgcttcctgggtacaagtacctcggacccttcaacggactcgacaaaggagagccggtcaacgaggcagacgccgcggccctcgagcacgacaaggcctacgaccggcagctcgacagcggagacaacccgtacctcaagtacaaccacgccgacgcggagtttcaggagcgtcttaaagaagatacgtcttttgggggcaacctcggacgagcagtcttccaggcaaaaaagagggttcttgaacctctgggcctggttgaggaacctgttaagacggctccgggaaaaaagaggccggtagagcaatctcctgcggagccagactcctcctcgggaaccggaaaggcgggcaaccagcctgcaagaaagagattgaattttggtcagactggagacgcagactccgtacctgacccccagcctctcggacagccaccagcagccccctctggtctgggatctactacaatggctacaggcagtggcgcaccaatggcagacaataacgagggtgccgatggagtgggtaattcctcaggaaattggcattgcgattcccaatggttgggcgacagagtcatcaccaccagcacccgaacctgggccctgcccacctacaacaatcacctctacaagcaaatctccagccaatcaggagccagcaacgacaaccactactttggctacagcaccccctgggggtattttgacttcaacagattccactgccacttttcaccacgtgactggcaaagactcatcaacaacaactggggattccgacccaaaagactcaacttcaagctctttaacattcaagtcaaagaggtcacgcagaatgacggtacgacgacgattgccaataaccttaccagcacggttcaggtgtttactgactcggagtaccagctcccgtacgtcctcggctcggcgcatcaaggatgcctcccgccgtttccagcggacgtcttcatggtcccacagtatggatacctcaccctgaacaacgggagtcaggcggtaggacgctcttccttttactgcctggagtactttccttctcagatgcttcgtaccggaaacaactttaccttcagttacacctttgaagacgttcctttccacagcagctacgctcacagtcaaagtctggaccggctgatgaatcctctgatagaccagtacctgtattatctaaacaaaacacaatcaaatagtggaactcttcagcagtctcggctactgtttagtcaagctggacccaccagcatgtctcttcaagctaaaaactggctgcctggaccttgctacagacaacagcgtctgtcaaagcaggcaaacgacaacaacaacagcaactttccctggactgcggctacaaagtatcatctaaatggccgggactcgttggttaatccaggaccagctatggccagccacaaagacgatgaagaaaagtttttccccatgcatggaaccctgatatttggtaaacaaggaacaaatgctaacgacgcggatttggacaatgtcatgattacagatgaagaagaaatccgcaccaccaatcccgtggctacggagcagtacgggactgtgtcaaataatttgcaaaactcaaatactggtccaactactggaactgtcaatcaccaaggagcgttacctggtatggtgtggcaggatcgagacgtgtaccttcagggacccatttgggccaagattcctcacaccgatggacactttcatccttctccactgatgggaggttttggactcaaacacccgcctcctcagatcatgatcaaaaacactcccgttccagccaatcctcctacaaacttcagttctgccaagtttgcttctttcatcacacagtattccacggggcaggtcagcgtggagatagagtgggagctgcagaaggagaacagcaaacgctggaaccccgagatccagtatacttccaactacaacaagtctgttaatgtggactttactgtggacactaatggtgtgtattcagagcctcgccccattggcaccagatacctgactcgtaatctgtaa

SEQ ID NO: 3679 - DNA, 2205 bp, Artificial Sequence
  Description of Artificial Sequence: Synthetic polynucleotide
atggctgccgatggttatcttccagattggctcgaggacactctctctgaaggaataagacagtggtggaagctcaaacctggcccaccaccaaagcccgcagagcggcataaggacgacagcaggggtcttgtgcttcctgggtacaagtacctcggacccttcaacggactcgacaaaggagagccggtcaacgaggcagacgccgcggccctcgagcacgacaaggcctacgaccggcagctcgacagcggagacaacccgtacctcaagtacaaccacgccgacgcggagtttcaggagcgtcttaaagaagatacgtcttttgggggcaacctcggacgagcagtcttccaggcaaaaaagagggttcttgaacctctgggcctggttgaggaacctgttaagacggctccgggaaaaaagaggccggtagagcaatctcctgcggagccagactcctcctcgggaaccggaaaggcgggcaaccagcctgcaagaaagagattgaattttggtcagactggagacgcagactccgtacctgacccccagcctctcggacagccaccagcagccccctctggtctgggatctactacaatggctacaggcagtggcgcaccaatggcagacaataacgagggtgccgatggagtgggtaattcctcaggaaattggcattgcgattcccaatggttgggcgacagagtcatcaccaccagcacccgaacctgggccctgcccacctacaacaatcacctctacaagcaaatctccagccaatcaggagccagcaacgacaaccactactttggctacagcaccccctgggggtattttgacttcaacagattccactgccacttttcaccacgtgactggcaaagactcatcaacaacaactggggattccgacccaaaagactcaacttcaagctctttaacattcaagtcaaagaggtcacgcagaatgacggtacgacgacgattgccaataaccttaccagcacggttcaggtgtttactgactcggagtaccagctcccgtacgtcctcggctcggcgcatcaaggatgcctcccgccgtttccagcggacgtcttcatggtcccacagtatggatacctcaccctgaacaacgggagtcaggcggtaggacgctcttccttttactgcctggagtactttccttctcagatgcttcgtaccggaaacaactttaccttcagttacacctttgaagacgttcctttccacagcagctacgctcacagtcaaagtctggaccggctgatgaatcctctgatagaccagtacctgtattatctaaacaaaacacaatcaaatagtggaactcttcagcagtctcggctactgtttagtcaagctggacccaccagcatgtctcttcaagctaaaaactggctgcctggaccttgctacagacaacagcgtctgtcaaagcaggcaaacgacaacaacaacagcaactttccctggactgcggctacaaagtatcatctaaatggccgggactcgttggttaatccaggaccagctatggccagccacaaagacgatgaagaaaagtttttccccatgcatggaaccctgatatttggtaaacaaggaacaaatgctaacgacgcggatttggacaatgtcatgattacagatgaagaagaaatccgcaccaccaatcccgtggctacggagcagtacgggactgtgtcaaataatttgcaaaactcaaatactggtccaactactggaactgtcaatcaccaaggagcgttacctggtatggtgtggcaggatcgagacgtgtaccttcagggacccatttgggccaagattcctcacaccgatggacactttcatccttctccactgatgggaggttttggactcaaacacccgcctcctcagatcatgatcaaaaacactcccgttccagccaatcctcctacaaacttcagttctgccaagtttgcttctttcatcacacagtattccacggggcaggtcagcgtggagatagagtgggagctgcagaaggagaacagcaaacgctggaaccccgagatccagtatacttccaactacaacaagtctgttaatgtggactttactgtggacactaatggtgtgtattcagagcctcgccccattggcaccagatacctgactcgtaatctgtaa

SEQ ID NO: 3680 - DNA, 2208 bp, Artificial Sequence
  Description of Artificial Sequence: Synthetic polynucleotide
atggctgccgatggttatcttccagattggctcgaggacactctctctgaaggaataagacagtggtggaagctcaaacctggcccaccaccaccaaagcccgcagagcggcataaggacgacagcaggggtcttgtgcttcctgggtacaagtacctcggacccttcaacggactcgacaaaggagagccggtcaacgaggcagacgccgcggccctcgagcacgacaaggcctacgaccggcagctcgacagcggagacaacccgtacctcaagtacaaccacgccgacgcggagtttcaggagcgtcttaaagaagatacgtcttttgggggcaacctcggacgagcagtcttccaggcaaaaaagagggttcttgaacctctgggcctggttgaggaacctgttaagacggctccgggaaaaaagaggccggtagagcaatctcctgcggagccagactcctcctcgggaaccggaaaggcgggcaaccagcctgcaagaaagagattgaattttggtcagactggagacgcagactccgtacctgacccccagcctctcggacagccaccagcagccccctctggtctgggatctactacaatggctacaggcagtggcgcaccaatggcagacaataacgagggtgccgatggagtgggtaattcctcaggaaattggcattgcgattcccaatggttgggcgacagagtcatcaccaccagcacccgaacctgggccctgcccacctacaacaatcacctctacaagcaaatctccagccaatcaggagccagcaacgacaaccactactttggctacagcaccccctgggggtattttgacttcaacagattccaccgccacttttcaccacgtgactggcaaagactcatcaacaacaactggggattccgacccaaaagactcaacttcaagctctttaacattcaagtcaaagaggtcacgcagaatgacggtacgacgacgattgccaataaccttaccagcacggttcaggtgtttactgactcggagtaccagctcccgtacgtcctcggctcggcgcatcaaggatgcctcccgccgtttccagcggacgtcttcatggtcccacagtatggatacctcaccctgaacaacgggagtcaggcggtaggacgctcttccttttactgcctggagtactttccttctcagatgcttcgtaccggaaacaactttaccttcagttacacctttgaagacgttcctttccacagcagctacgctcacagtcaaagtctggaccggctgatgaatcctctgatagaccagtacctgtattatctaaacaaaacacaatcaaatagtggaactcttcagcagtctcggctactgtttagtcaagctggacccaccagcatgtctcttcaagctaaaaactggctgcctggaccttgctacagacaacagcgtctgtcaaagcaggcaaacgacaacaacaacagcaactttccctggactgcggctacaaagtatcatctaaatggccgggactcgttggttaatccaggaccagctatggccagccacaaagacgatgaagaaaagtttttccccatgcatggaaccctgatatttggtaaacaaggaacaaatgctaacgacgcggatttggacaatgtcatgattacagatgaagaagaaatccgcaccaccaatcccgtggctacggagcagtacgggactgtgtcaaataatttgcaaaactcaaatactggtccaactactggaactgtcaatcaccaaggagcgttacctggtatggtgtggcaggatcgagacgtgtaccttcagggacccatttgggccaagattcctcacaccgatggacactttcatccttctccactgatgggaggttttggactcaaacacccgcctcctcagatcatgatcaaaaacactcccgttccagccaatcctcctacaaacttcagttctgccaagtttgcttctttcatcacacagtattccacggggcaggtcagcgtggagatagagtgggagctgcagaaggagaacagcaaacgctggaaccccgagatccagtatacttccaactacaacaagtctgttaatgtggactttactgtggacactaatggtgtgtattcagagcctcgccccattggcaccagatacctgactcgtaatctgtaa

SEQ ID NO: 3681 - DNA, 2205 bp, Artificial Sequence
  Description of Artificial Sequence: Synthetic polynucleotide
atggctgccgatggttatcttccagattggctcgaggacactctctctgaaggaataagacagtggtggaagctcaaacctggcccaccaccaccaaagcccgcagagcggcataaggacgacagcaggggtcttgtgcttcctgggtacaagtacctcggacccttcaacggactcgacaaaggagagccggtcaacgaggcagacgccgcggccctcgagcacgacaaggcctacgaccggcagctcgacagcggagacaacccgtacctcaagtacaaccacgccgacgcggagtttcaggagcgtcttaaagaagatacgtcttttgggggcaacctcggacgagcagtcttccaggcaaaaaagagggttcttgaacctctgggcctggttgaggaacctgttaagacggctccgggaaaaaagaggccggtagagcaatctcctgcggagccagactcctcctcgggaaccggaaaggcgggcaaccagcctgcaagaaagagattgaattttggtcagactggagacgcagactccgtacctgacccccagcctctcggacagccaccagcagccccctctggtctgggatctactacaatggctacaggcagtggcgcaccaatggcagacaataacgagggtgccgatggagtgggtaattcctcaggaaattggcattgcgattcccaatggttgggcgacagagtcatcaccaccagcacccgaacctgggccctgcccacctacaacaatcacctctacaagcaaatctccagccaatcaggagccagcaacgacaaccactactttggctacagcaccccctgggggtattttgacttcaacagattccactgccacttttcaccacgtgactggcaaagactcatcaacaacaactggggattccgacccaaaagactcaacttcaagctctttaacattcaagtcaaagaggtcacgcagaatgacggtacgacgacgattgccaataaccttaccagcacggttcaggtgtttactgactcggagtaccagctcccgtacgtcctcggctcggcgcatcaaggatgcctcccgccgtttccagcggacgtcttcatggtcccacagtatggatacctcaccctgaacaacgggagtcaggcggtaggacgctcttccttttactgcctggagtactttccttctcagatgcttcgtaccggaaacaactttaccttcagttacacctttgaagacgttcctttccacagcagctacgctcacagtcaaagtctggaccggctgatgaatcctctgatagaccagtacctgtattatctaaacaaaacacaatcaaatagtggaactcttcagcagtctcggctactgtttagtcaagctggacccaccagcatgtctcttcaagctaaaaactggctgcctggaccttgctacagacaacagcgtctgtcaaagcaggcaaacgacaacaacagcaactttccctggactgcggctacaaagtatcatctaaatggccgggactcgttggttaatccaggaccagctatggccagccacaaagacgatgaagaaaagtttttccccatgcatggaaccctgatatttggtaaacaaggaacaaatgctaacgacgcggatttggacaatgtcatgattacagatgaagaagaaatccgcaccaccaatcccgtggctacggagcagtacgggactgtgtcaaataatttgcaaaactcaaatactggtccaactactggaactgtcaatcaccaaggagcgttacctggtatggtgtggcaggatcgagacgtgtaccttcagggacccatttgggccaagattcctcacaccgatggacactttcatccttctccactgatgggaggttttggactcaaacacccgcctcctcagatcatgatcaaaaacactcccgttccagccaatcctcctacaaacttcagttctgccaagtttgcttctttcatcacacagtattccacggggcaggtcagcgtggagatagagtgggagctgcagaaggagaacagcaaacgctggaaccccgagatccagtatacttccaactacaacaagtctgttaatgtggactttactgtggacactaatggtgtgtattcagagcctcgccccattggcaccagatacctgactcgtaatctgtaa

SEQ ID NO: 3682 - DNA, 2208 bp, Artificial Sequence
  Description of Artificial Sequence: Synthetic polynucleotide
atggctgccgatggttatcttccagattggctcgaggacactctctctgaaggaataagacagtggtggaagctcaaacctggcccaccaccaccaaggcccgcagagcggcatcaggacgacagcaggggtcttgtgcttcctgggtacaagtacctcggacccttcaacggactcgacaaaggagagccggtcaacgaggcagacgctgcggccctcgagcacgacaaggcctacgaccggcagctcgacagcggagacaacccgtacctcaagtacaaccacgccgacgcggagtttcaggagcgtcttaaagaagatacgtcttttgggggcaacctcggacgagcagtcttccaggcgaaaaagagggttcttgaacctctgggcctggttgaggaacctgttaagacggctccgggaaaaaagaggccggtagagcactctcctgcggagccagactcctcctcgggaaccggaaaagcgggccagcagcctgcaagaaagagattgaatttcggtcagactggagacgcagactccgtacctgacccccagcctctcgggcagccaccagcagcccccacaagtttgggatctactacaatggctacaggcagtggcgcaccaatggcagacaataacgagggtgccgatggagtgggtaattcctcaggaaattggcattgcgattcccaatggctgggcgacagagtcatcaccaccagcacccgaacctgggccctgcccacctacaacaaccacctctacaagcaaatctccagccaatcaggagcatcgaacgacaaccactactttggctacagcaccccttgggggtattttgacttcaacagattccactgtcacttctccccacgtgaccggcaaagactcatcaacaacaactggggattccgacccaagagactcaacttcaagctctttaacattcaagtcaaagaggtcacgcagaatgacggtacgacgacgattgccaataaccttaccagcacggttcaggtgtttactgactcggagtaccagctcccgtacgtcctcggctcggcgcatcaaggatgcctcccgccgtttccagcggacgtcttcatggtcccacagtatggatacctcaccctgaacaacgggagtcaggcggtaggacgctcttccttttactgcctggagtactttccttctcagatgctgcgtaccggaaacaactttaccttcagctacacctttgaggacgtgcccttccacagcagctacgctcacagccagagtttggaccggctgatgaatcctctgatcgaccagtatctgtattatctgaacaggacacaatcaaatagtggaactcttcagcagtctaggctactgtttagccaagctggacctaccagcatgtcccttcaagctaaaaactggctgcctggaccttgctacagacagcagcgtctgtcaaagcaggcaaacgacaacaacaacagcaactttccctggactgcggctacaaagtatcatctaaatggtcgggactcgttggttaatccaggaccagctatggccagccacaaagacgatgaagaaaagtttttccccatgcatggaaccctgatatttggtaaacaaggaacaaatgctaacgacgcggatttggaacatgtcatgattacagatgaagaagaaatcaggaccaccaatcccgtggctacagagcagtacggaaacgtgtcaaataatttgcaaaactcaaatactggtccaactacagaaaatgtcaatcaccagggagcgttacctggtatggtgtggcaggatcgagacgtgtacctgcagggacccatttgggccaagattcctcacaccgacggacactttcacccttctccactgatgggaggttttggactcaaacacccgcctcctcaaatcatgatcaaaaacactcctgttccagccaatcctcctacaaacttcagcgcggcaaagtttgcttccttcatcacacagtattccacgggacaggtcagcgtggagatcgagtgggagctgcagaaggagaacagcaaacgctggaaccccgagatccagtacacttccaactacaacaaatctgttaatgtggactttactgtggacgctaatggtgtgtattcagagcctcgccccattggcaccagatacctgactcgtaatctgtaa

SEQ ID NO: 3683 - DNA, 2208 bp, Artificial Sequence
  Description of Artificial Sequence: Synthetic polynucleotide
atggctgccgatggttatcttccagattggctcgaggacactctctctgaaggaataagacagtggtggaagctcaaacctggcccaccaccaccaaggcccgcagagcggcatcaggacgacagcaggggtcttgtgcttcctgggtacaagtacctcggacccttcaacggactcgacaaaggagagccggtcaacgaggcagacgctgcggccctcgagcacgacaaggcctacgaccggcagctcgacagcggagacaacccgtacctcaagtacaaccacgccgacgcggagtttcaggagcgtcttaaagaagatacgtcttttgggggcaacctcggacgagcagtcttccaggcgaaaaagagggttcttgaacctctgggcctggttgaggaacctgttaagacggctccgggaaaaaagaggccggtagagcactctcctgcggagccagactcctcctcgggaaccggaaaagcgggccagcagcctgcaagaaagagattgaatttcggtcagactggagacgcagactccgtacctgacccccagcctctcggacagccaccagcagcccccacaagtttgggatctactacaatggctacaggcagtggcgcaccaatggcagacaataacgagggtgccgatggagtgggtaattcctcaggaaattggcattgcgattcccaatggctgggcgacagagtcatcaccaccagcacccgaacctgggccctgcccacctacaacaaccacctctacaagcaaatctccagccaatcaggagcatcgaacgacaaccactactttggctacagcaccccttgggggtattttgacttcaacagattccactgtcacttctccccacgtgactggcaaagactcatcaacaacaactggggattccgacccaagagactcaacttcaagctctttaacattcaagtcaaagaggtcacgcagaatgacggtacgacgacgattgccaataaccttaccagcacggttcaggtgtttactgactcggagtaccagctcccgtacgtcctcggctcggcgcatcaaggatgcctcccgccgtttccagcggacgtcttcatggtcccacagtatggatacctcaccctgaacaacgggagtcaggcggtaggacgctcttccttttactgcctggagtactttccttctcagatgctgcgtaccggaaacaactttaccttcagctacacctttgaggacgtgcccttccacagcagctacgctcacagccagagtttggaccggctgatgaatcctctgatcgaccagtatctgtattatctgaacaggacacaatcaaatagtggaactcttcagcagtctaggctactgtttagccaagctggacccaccagcatgtcccttcaagctaaaaactggctgcctggaccttgctacagacagcagcgtctgtcaaagcaggcaaacgacaacaacaacagcaactttccctggactgcggctacaaagtatcgtctaaatggtcgggactcgttggttaatccaggaccagctatggccagccacaaagacgatgaagaaaagtttttccccatgcatggaaccctgatatttggtaaacaaggaacaaatgctaacgacgcggatttggaacatgtcatgattacagatgaagaagaaatcaggaccaccaatcccgtggctacagagcagtacggaaacgtgtcaaataatttgcaaaactcaaatactggtccaactacagaaaatgtcaatcaccagggagcgttacctggtatggtgtggcaggatcgagacgtgtacctgcagggacccatttgggccaagattcctcacaccgacggacactttcacccttctccactgatgggaggttttggactcaaacacccgcctcctcaaatcatgatcaaaaacactcctgttccagccaatcctcctacaaacttcagcgcggcaaagtttgcttccttcatcacacagtattccacgggacaggtcagcgtggagatcgagtgggagctgcagaaggagaacagcaaacgctggaaccccgagatccagtacacttccaactacaacaaatctgttaatgtggactttactgtggacgctaatggtgtgtattcagagcctcgccccattggcaccagatacctgactcgtaatctgtaa

SEQ ID NO: 3684 - DNA, 2208 bp, Artificial Sequence
  Description of Artificial Sequence: Synthetic polynucleotide
atggctgccgatggttatcttccagattggctcgaggacactctctctgaaggaataagacagtggtggaagctcaaacctggcccaccaccaccaaggcccgcagagcggcatcaggacgacagcaggggtcttgtgcttcctgggtacaagtacctcggacccttcaacggactcgacaaaggagagccggtcaacgaggcagacgctgcggccctcgagcacgacaaggcctacgaccggcagctcgacagcggagacaacccgtacctcaagtacaaccacgccgacgcggagtttcaggagcgtcttaaagaagatacgtcttttgggggcaacctcggacgagcagtcttccaggcgaaaaagagggttcttgaacctctgggcctggttgaggaacctgttaagacggctccgggaaaaaagaggccggtagagcactctcctgcggagccagactcctcctcgggaaccggaaaagcgggccagcagcctgcaagaaagagattgaatttcggtcagactggagacgcagactccgtacctgacccccagcctctcgggcagccaccagcagcccccacaagtttgggatctactacaatggctacaggcagtggcgcaccaatggcagacaataacgagggtgccgatggagtgggtaattcctcaggaaattggcattgcgattcccaatggctgggcgtcagagtcatcaccaccagcacccgaacctgggccctgcccacctacaacaaccacctctacaagcaaatctccagccaatcaggagcatcgaacgacaatcactactttggctacagcaccccttgggggtattttgacttcaacagattccactgtcacttctccccacgtgaccggcaaagactcatcaacaacaactggggattccgacccaagagactcaacttcaagctctttaacattcaagtcaaagaggtcacgcagaatgacggtacgacgacgattgccaataaccttaccagcacggttcaggtgtttactgactcggagtaccagctcccgtacgtcctcggctcggcgcatcaaggatgcctcccgccgtttccagcggacgtcttcatggtcccacagtatggatacctcaccctgaacaacgggagtcaggcggtaggacgctcttccttttactgcctggagtactttccttctcagatgctgcgtaccggaaacaactttaccttcagctacacctttgaggacgtgcccttccacagcagctacgctcacagccagagtttggaccggctgatgaatcctctgatcgaccagtatctgtattatctgaacaggacacaatcaaatagtggaactcttcagcagtctaggctactgtttagccaagctggacctaccagcatgtcccttcaagctaaaaactggctgcctggaccttgctacagacagcagcgtctgtcaaagcaggcaaacgacaacaacaacagcaactttccctggactgcggctacaaagtatcatctaaatggtcgggactcgttggttaatccaggaccagctatggccagccacaaagacgatgaagaaaagtttttccccatgcatggaaccctgatatttggtaaacaaggaacaaatgctaacgacgcggatttggaacatgtcatgattacagatgaagaagaaatcaggaccaccaatcccgtggctacagagcagtacggaaacgtgtcaaataatttgcaaaactcaaatactggtccaactacagaaaatgtcaatcaccagggagcgttacctggtatggtgtggcaggatcgagacgtgtacctgcagggacccatttgggccaagattcctcacaccgacggacactttcacccttctccactgatgggaggttttggactcaaacacccgcctcctcaaatcatgatcaaaaacactcctgttccagccaatcctcctacaaacttcagcgcggcaaagtttgcttccttcatcacacagtattccacgggacaggtcagcgtggagatcgagtgggagctgcagaaggagaacagcaaacgctggaaccccgagatccagtacacttccaactacaacaaatctgttaatgtggactttactgtggacgctaatggtgtgtattcagagcctcgccccattggcaccagatacctgactcgtaatctgtaa

SEQ ID NO: 3685 - DNA, 2208 bp, Artificial Sequence
  Description of Artificial Sequence: Synthetic polynucleotide
atggctgccgatggttatcttccagattggctcgaggacactctctctgaaggaataagacagtggtggaagctcaaacctggcccaccaccaccaaggcccgcagagcggcatcaggacgacagcaggggtcttgtgcttcctgggtacaagtacctcggacccttcaacggactcgacaaaggagagccggtcaacgaggcagacgctgcggccctcgagcacgacaaggcctacgaccggcagctcgacagcggagacaacccgtacctcaagtacaaccacgccgacgcggagtttcaggagcgtcttaaagaagatacgtcttttgggggcaacctcggacgagcagtcttccaggcgaaaaagagggttcttgaacctctgggcctggttgaggaacctgttaagacggctccgggaaaaaagaggccggtagagcactctcctgcggagccagactcctcctcgggaaccggaaaagcgggccagcagcctgcaagaaagagattgaatttcggtcagactggagacgcagactccgtacctgacccccagcctctcggacagccaccagcagcccccacaagtttgggatctactacaatggctataggcagtggcgcaccaatggcagacaataacgagggtgccgatggagtgggtaattcctcaggaaattggcattgcgattcccaatggctgggcgacagagtcatcaccaccagcacccgaacctgggccctgcccacctacaacaaccacctctacaagcaaatctccagccaatcaggagcatcgaacgacaaccactactttggctacagcaccccttgggggtattttgacttcaacagattccactgtcacttctccccacgtgactggcaaagactcatcaacaacaactggggattccgacccaagagactcaacttcaagctctttaacattcaagtcaaagaggtcacgcagaatgacggtacgacgacgattgccaataaccttaccagcacggttcaggtgtttactgactcggagtaccagctcccgtacgtcctcggctcggcgcatcaaggatgcctcccgccgtttccagcggacgtcttcatggtcccacagtatggatacctcaccctgaacaacgggagtcaggcggtaggacgctcttccttttactgcctggagtactttccttctcagatgctgcgtaccggaaacaactttaccttcagctacacctttgaggacgtgcccttccacagcagctacgctcacagccagagtttggaccggctgatgaatcctctgatcgaccagtatctgtattatctgaacaggacacaatcaaatagtggaactcttcagcagtctaggctactgtttagccaagctggacccaccagcatgtcccttcaagctaaaaactggctgcctggaccttgctacagacagcagcgtctgtcaaagcaggcaaacgacaacaacaacagcaactttccctggactgctgctacaaagtatcatctaaatggtcgggactcgttggttaatccaggaccagctatggccagccacaaagacgatgaagaaaagtttttccccatgcatggaaccctgatatttggtaaacaaggaacaaatgctaacgacgcggatttggaacatgtcatgattacagatgaagaagaaatcaggaccaccaatcccgtggctacagagcagtacggaaacgtgtcaaataatttgcaaaactcaaatactggtccaactacagaaaatgtcaatcaccagggagcgttacctggtatggtgtggcaggatcgagacgtgtacctgcagggacccatttgggccaagattcctcacaccgacggacactttcacccttctccactgatgggaggttttggactcaaacacccgcctcctcaaatcatgatcaaaaacactcctgttccagccaatcctcctacaaacttcagcgcggcaaagtttgcttccttcatcacacagtattccacgggacaggtcagcgtggagatcgagtgggagctgcagaaggagaacagcaaacgctggaaccccgagatccagtacacttccaactacaacaaatctgttaatgtggactttactgtggacgctaatggtgtgtattcagagcctcgccccattggcaccagatacctgactcgtaatctgtaa

SEQ ID NO: 3686 - DNA, 2208 bp, Artificial Sequence
  Description of Artificial Sequence: Synthetic polynucleotide
atggctgccgatggttatcttccagattggctcgaggacactctctctgaaggaataagacagtggtggaagctcaaacctggcccaccaccaccaaggcccgcagagcggcatcaggacgacagcaggggtcttgtgcttcctgggtacaagtacctcggacccttcaacggactcgacaaaggagagccggtcaacgaggcagacgctgcggccctcgagcacgacaaggcctacgaccggcagctcgacagcggagacaacccgtacctcaagtacaaccacgccgacgcggagtttcaggagcgtcttaaagaagatacgtcttttgggggcaacctcggacgagcagtcttccaggcgaaaaagagggttcttgaacctctgggcctggttgaggaacctgttaagacggctccgggaaaaaagaggccggtagagcactctcctgcggagccagactcctcctcgggaaccggaaaagcgggccagcagcctgcaagaaagagattgaatttcggtcagactggagacgcagactccgtacctgacccccagcctctcggacagccaccagcagcccccacaagtttgggatctactacaatggctacaggcagtggcgcaccaatggcagacaataacgagggtgccgatggagtgggtaattcctcaggaaattggcattgcgattcccaatggctgggcgacagagtcatcaccaccagcacccgaacctgggccctgcctacctacaacaaccacctctacaagcaaatctccagccaatcaggagcatcgaacgacaaccactactttggctacagcaccccttgggggtatcttgacttcaacagattccactgtcacttctccccacgtgactggcaaagactcatcaacaacaactggggattccgacccaagagactcaacttcaagctctttaacattcaagtcaaagaggtcacgcagaatgacggtacgacgacgattgccaacaaccttaccagcacggttcaggtgtttactgactcggagtaccagctcccgtacgtcctcggctcggcgcatcaaggatgcctcccgccgtttccagcggacgtcttcatggtcccacagtatggatacctcaccctgaacaacgggagtcaggcggtaggacgctcttccttttactgcctggagtactttccttctcagatgctgcgtaccggaaacaactttaccttcagctacacctttgaggacgtgcccttccacagcagctacgctcacagccagagtttggaccggctgatgaatcctctgatcgaccagtatctgtattatctgaacaggacacaatcaaatagtggaactcttcagcagtctaggctactgtttagccaagctggacccaccagcatgtcccttcaagctaaaaactggctgcctggaccttgctacagacagcagcgtctgtcaaagcaggcaaacgacaacaacaacagcaactttccctggactgcggctacaaagtatcatctaaatggtcgggactcgttggttaatccaggaccagctatggccagccacaaagacgatgaagaaaagtttttccccatgcatggaaccctgatatttggtaaacaaggaacaaatgctaacgacgcggatttggaacatgtcatgattacagatgaagaagaaatcaggaccaccaatcccgtggctacagagcagtacggaaacgtgtcaaataatttgcaaaactcaaatactggtccaactacagaaaatgtcaatcaccagggagcgttacctggtatggtgtggcaggatcgagacgtgtacctgcagggacccatttgggccaagattcctcacaccgacggacactttcacccttctccactgatgggaggttttggactcaaacacccgcctcctcaaatcatgatcaaaaacactcctgttccagccaatcctcctacaaacttcagcgcggcaaagtttgcttccttcatcacacagtattccacgggacaggtcagcgtggagatcgagtgggagctgcagaaggagaacagcaaacgctggaaccccgagatccagtacacttccaactacaacaaatctgttaatgtggactttactgtggacgctaatggtgtgtattcagagcctcgccccattggcaccagatacctgactcgtaatctgtaa

SEQ ID NO: 3687 - DNA, 2208 bp, Artificial Sequence
  Description of Artificial Sequence: Synthetic polynucleotide
atggctgccgatggttatcttccagattggctcgaggacactctctctgaaggaataagacagtggtggaagctcaaacctggcccaccaccgccaaagcccgcagagcggcataaggacgacagcaggggtcttgtgcttcctgggtacaagtacctcggacccttcaacggactcgacaagggagagccggtcaacgaggcagacgccgcggccctcgagcacgacaaggcctacgaccggcagctcgacagcggagacaacccgtacctcaagtacaaccacgccgacgcggagtttcaggagcgccttaaagaagatacgtcttttgggggcaacctcggacgagcagtattccaggcgaaaaagagggttcttgaacctctgggcctggttgaggagcctgttaagacggctccgggaaaaaagaggccggtagagcactctcctgtggagccagactcctcctcgggaaccggaaaagcgggccagcagcctgcgagaaagagattgaattttggtcagactggagacgcagactccgtacctgacccccagcctctcggacagccaccagcagcccccacaagtttgggatctactacaatggctacaggcagtggcgcaccaatggcagacaataacgagggtgccgatggagtgggtaattcctcaggaaattggcattgcgattcccaatggttgggcgacagagtcatcaccaccagcacccgaacctgggccctgcccacctacaacaaccacctctacaagcaaatctccagccaatcaggagcagcgaacgacaaccactactttggctacagcaccccctgggggtattttgacttcaacagattccactgccacttttcaccacgtgactggcaaagactcatcaacaacaactggggattccgacccaagagactcaacttcaagctctttaacattcaagtcaaagaggtcacgcagaatgacggtacgacgacgattgccaataaccttaccagcacggttcaggtgtttactgactcggagtaccagctcccgtacgtcctcggctcggcgcatcaaggatgcctcccgccgtttccagcggacgtcttcatggtcccacagtatggatacctcaccctgaacaacgggagtcaggcggtaggacgctcttccttttactgcctggagtactttccttctcagatgcttcgtaccggaaacaactttaccttcagttacacctttgaagacgttcctttccacagcagctacgctcacagtcaaagtctggaccggctgatgaatcctcttatcgaccagtacctgtattatctaaacaaaacacaatcaaatagtggaactcttcagcagtctcggctactgtttagtcaagctggacctaccagcatgtctcttcaagctaaaaactggctgcctggaccttgctacagacaacagcgtctgtcaaagcaggcaaacgacaacaacaacagcaactttccctggactgcggctacaaagtatcatctaaatggccgggactcgttggttaatccaggaccagctatggccagccacaaagacgatgaagaaaagtttttccccatgcatggaaccctgatatttggcaaacaaggaacaaatgctaacgacgcggatttggacaatgtcatgattacagatgaagaagaaatccgtaccaccaatcccgtggctacggagcagtacgggactgtgtcaaataatttgcaaaactcaaatactggtccaactactggaactgtcaatcaccaaggagcgttacctggtatggtgtggcaggatcgagacgtgtaccttcagggacccatttgggccaagattcctcacaccgatggacactttcacccttctccgctgatgggaggttttggactcaaacacccgcctcctcagatcatgatcaaaaacactcccgttccagccaatcctcccacaaacttcagttctgccaagtttgcttctttcatcacacagtattccacgggacaggttagcgtggagatcgagtgggagctgcagaaggagaacagcaaacgctggaaccccgagatccagtacacttccaactacaacaagtctgttaatgtggactttactgtggacactaatggtgtgtattcagagcctcgccccattggcaccagatacctgactcgtaatctgtaa

SEQ ID NO: 3688 - DNA, 2208 bp, Artificial Sequence
  Description of Artificial Sequence: Synthetic polynucleotide
atggctgccgatggttatcttccagattggctcgaggacactctctctgaaggaataagacagtggtggaagctcaaacctggcccaccaccaccaaggcccgcagagcggcatcaggacgacagcaggggtcttgtgcttcctgggtacaagtacctcggacccttcaacggactcgacaaaggagagccggtcaacgaggcagacgctgcggccctcgagcacgacaaggcctacgaccggcagctcgacagcggagacaacccgtacctcaagtacaaccacgccgacgcggagtttcaggagcgtcttaaagaagatacgtcttttgggggcaacctcggacgagcagtcttccaggcgaaaaagagggttcttgaacctctgggcctggttgaggaacctgttaagacggctccgggaaaaaagaggccggtagagcactctcctgcggagccagactcctcctcgggaaccggaaaagcgggccagcagcctgcaagaaagagattgaatttcggtcagactggagacgcagactccgtacctgacccccagcctctcggacagccaccagcagcccccacaagtttgggatctactacaatggctacaggcagtggcgcaccaatggcagacaataacgagggtgccgatggagtgggtaattcctcaggaaattggcattgcgattcccaatggctgggcgacagagtcatcaccaccagcacccgaacctgggccctgcccacctacaacaaccacctctacaagcaaatctccagccaatcaggagcatcgaacgacaaccactactttggctacagcaccccttgggggtattttgacttcaacagattccactgtcacttctccccacgtgactggcaaagactcatcaacaacaactggggattccgacccaagagactcaacttcaagctctttaacattcaagtcaaagaggtcacgcagaatgacggtacgacgacgattgccaataaccttaccagcacggttcaggtgtttactgactcggagtaccagctcccgtacgtcctcggctcggcgcatcaaggatgcctcccgccgtttccagcggacgtcttcatggtcccacagtatgggtacctcaccctgaacaacgggagtcaggcggtaggacgctcttccttttactgcctggagtactttccttctcagatgctgcgtaccggaaacaactttaccttcagctacacctttgaggacgtgcccttccacagcagctacgctcacagccagagtttggaccggctgatgaatcctctgatcgaccagtatctgtattatctgaacaggacacaatcaaatagtggaactcttcagcagtctaggctactgtttagccaagctggacccaccagcatgtcccttcaagctaaagactggctgcctggaccttgctacagacagcagcgtctgtcaaagcaggcaaacgacaacaacaacagcaactttccctggactgcggctacaaagtatcatctaaatggtcgggactcgttggttaatccaggaccagctatggccagccacaaagacgatgaagaaaagtttttccccatgcatggaaccctgatatttggtaaacaaggaacaaatgctaacgacgcggatttggaacatgtcatgattacagatgaagaagaaatcaggaccaccaatcccgtggctacagagcagtacggaaacgtgtcaaataatttgcaaaactcaaatactggtccaactacagaaaatgtcaatcaccagggagcgttacctggtatggtgtggcaggatcgagacgtgtacctgcagggacccatttgggccaagattcctcacaccgacggacactttcacccttctccaccgatgggaggttttggactcaaacacccgcctcctcaaatcatgatcaaaaacactcctgttccagccaatcctcctacaaacttcagcgcggcaaagtttgcttccttcatcacacagtattccacgggactggtcagcgtggagatcgagtgggagctgcagaaggagaacagcaaacgctggaaccccgagatccagtacacttccaactacaacaaatctgttaatgtggactttactgtggacgctaatggtgtgtattcagagcctcgccccattggcaccagatacctgactcgtaatctgtaa

SEQ ID NO: 3689 - DNA, 2208 bp, Artificial Sequence
  Description of Artificial Sequence: Synthetic polynucleotide
atggctgccgatggttatcttccagattggctcgaggacactctctctgaaggaataagacagtggtggaagctcaaacctggcccaccaccgccaaagcccgcagagcggcataaggacgacagcaggggtcttgtgcttcctgggtacaagtacctcggacccttcaacggactcgacaagggggagccggtcaacgaggcagacgccgcggccctcgagcacgacaaggcctacgaccggcagctcgacagcggagacaacccgtacctcaagtacaaccacgccgacgcggagtttcaggagcgtcttaaagaagatacgtcttttgggggcaacctcggacgagcagtcttccaggcgaaaaagagggttcttgaacctctgggcctggttgaggaacctgttaagacggctccgggaaaaaagaggccggtagagcactctcctgtggagccagactcctcctcgggaaccggaaaggcgggccagcagcctgcaagaaaaagattgaatttcggtcagactggagacgcagactccgtacctgacccccagcctctcggacagccaccagcagccccctctggtctgggaactaatacgatggctacaggcagtggcgcaccaatggcagacaataacgagggcgccgacggagtgggtaattcctcgggaaattggcattgcgattccacatggatgggcgacagagtcatcaccaccagcacccgcacctgggctctgcccacctacaacaaccatctgtacaagcaaatttccagccaatcaggagcatcgaacgacaaccactactttggctacagcaccccctgggggtattttgacttcaacagattccactgccacttttcgccacgtgactggcaaagactcatcaacaacaactggggattccggcccaagagactcagcttcaagctctttaacattcaagtcaaggaggtcacgcagaatgacggtacgacgacgattgccaataaccttaccagcacggttcaggtctttactgactcggagtaccagctcccgtacgtcctcggctcggcgcatcaaggatgcctcccgccgttcccagcagacgtcttcatggtgccacagtatggatacctcaccctgaacaacgggagtcaggcggtaggacgctcttcattttactgcctggagtacttcccttctcagatgcttcgcacgggaaacaactttaccttcagctacacctttgaggacgtgccttttcacagcagctacgctcacagccaaagtctggaccgtctcatgaatcctctcatcgaccaatacctgtattacttgagcaaaacaaacgctccaagcggaactcaccagatgtccaggcttcagttttctcaggccggagcgagtgacatgtcgggaccagctagaaactggcttcctggaccctgttaccgccagcagcgagtatcaaagcaggctgcggacaacaacaacagtgacttaccgtggactggagctaccaagtaccacctcaatggaagagactctctggtgaacccgggcccagctatggccagccacaaggatgatgaagaaaaatttttcctcatgagcggggttctcatcttcgggaaacaaggctcaaatgaaaacaatgtggacattgaaaaggttatgattacagacgaagaggaaatcaggaccaccaatcccgtggctacggagcagtatggttctgtatctaccaaccttcaaagcgcaaacacaagtccagctacctcagatgtcaatcaccaaggcgttcttcctggcatggtctggcaggacagagatgtgtacctgcaggggcccatctgggcaaagattcctcacacggacggacactttcacccttctcccctcatgggcggatttggattgaagcaccctcccccacagattctcatcaagaataccccggtacctgcgaatccttcgaccaccttcagtgcggcaaagtttgcttccttcatcacacagtattccacgggacaggtcagcgtggagatagagtgggagctgcagaaggagaacagcaaacgctggaaccccgagatccagtatacttccaactacaacaaatctgttaatgtggactttactgtggacactaatggtgtgtattcagagcctcgccccattggcaccagatacctgactcgtaatctgtaa

SEQ ID NO: 3690 - DNA, 2208 bp, Artificial Sequence
  Description of Artificial Sequence: Synthetic polynucleotide
atggctgccgatggttatcttccagattggctcgaggacactctctctgaaggaataagacagtggtggaagctcaaacctggcccaccaccaccaaggcccgcagagcggcatcaggacgacagcaggggtcttgtgcttcctgggtacaagtacctcggacccttcaacggactcgacaaaggagagccggtcaacgaggcagacgctgcggccctcgagcacgacaaggcctacgaccggcagctcgacagcggagacaacccgtacctcaagtacaaccacgccgacgcggagtttcaggagcgtcttaaagaagatacgtcttttgggggcaacctcggacgagcagtcttccaggcgaaaaagagggttcttgaacctctgggcctggttgaggaacctgttaagacggctccgggaaaaaagaggccggtagagcactctcctgcggagccagactcctcctcgggaaccggaaaagcgggccagcagcctgcaagaaagagattgaatttcggtcagactggagacgcagactccgtacctgacccccagcctctcggacagccaccagcagcccccacaagtttgggatctactacaatggctacaggcagtggcgcaccaatggcagacaataacgagggtgccgatggagtgggtaattcctcaggaaattggcattgcgattcccaatggctgggcgacagagtcatcaccaccagcacccgaacctgggccctgcccacctacaacaaccacctctacaagcaaatctccagccaatcaggagcatcgaacgacaaccactactttggctacagcaccccttgggggtattttgacttcaacagattccactgtcacttctccccacgtgactggcaaagactcatcaacaacaactggggattccgacccaagagactcaacttcaagctctttaacattcaagtcaaagaggtcacgcagaatgacggtacgacgacgattgccaataaccttaccagcacggttcaggtgtttactgactcggagtaccagctcccgtacgtcctcggctcggcgcatcaaggatgcctcccgccgtttccagcggacgtcttcatggtcccacagtatgggtacctcaccctgaacaacgggagtcaggcggtaggacgctcttccttttactgcctggagtactttccttctcagatgctgcgtaccggaaacaactttaccttcagctacacctttgaggacgtgtccttccacagcagctacgctcacagccagagtttggaccggctgatgaatcctctgatcgaccagtatctgtattatctgaacaggacacaatcaaatagtggaactcttcagcagtctaggctactgtttagccaagctggacccaccagcatgtcccttcaagctaaaaactggctgcctggaccttgctacagacagcagcgtctgtcaaagcaggcaaacgacaacaacaacagcaactttccctggactgcggctacaaagtatcatctaaatggtcgggactcgttggttaatccaggaccagctatggccagccacaaagacgatgaagaaaagtttttccccatgcatggaaccctgatatttggtaaacaaggaacaaatgctaacgacgcggatttggaacatgtcatgattacagatgaagaagaaatcaggaccaccaatcccgtggctacagagcagtacggaaacgtgtcaaataatttgcaaaactcaaatactggtccaactacagaaaatgtcaatcaccagggagcgttacctggtatggtgtggcaggatcgagacgtgtacctgcagggacccatttgggccaagattcctcacaccgacggacactttcacccttctccactgatgggaggttttggactcaaacacccgcctcctcaaatcatgatcaaaaacactcctgttccagccaatcctcctacaaacttcagcgcggcaaagtttgcttccttcatcacacagtattccacgggacaggtcagcgtggagatcgagtgggagctgcagaaggagaacagcaaacgctggaaccccgagatccagtacacttccaactacaacaaatctgttaatgtggactttactgtggacgctaatggtgtgtattcagagcctcgccccattggcaccagatacctgactcgtaatctgtaa

SEQ ID NO: 3691 - DNA, 2208 bp, Artificial Sequence
  Description of Artificial Sequence: Synthetic polynucleotide
atggctgccgatggttatcttccagattggctcgaggacactctctctgaaggaataagacagtggtggaagctcaaacctggcccaccaccaccaaggcccgcagagcggcatcaggacgacagcaggggtcttgtgcttcctgggtacaagtacctcggacccttcaacggactcgacaaaggagagccggtcaacgaggcagacgctgcggccctcgagcacgacaaggcctacgaccggcagctcgacagcggagacaacccgtacctcaagtacaaccacgccgacgcggagtttcaggagcgtcttaaagaagatacgtcttttgggggcaacctcggacgagcagtcttccaggcgaaaaagagggttcttgaacctctgggcctggttgaggaacctgttaagacggctccgggaaaaaagaggccggtagagcactctcctgcggagccagactcctcctcgggaaccggaaaagcgggccagcagcctgcaagaaagagattgaatttcggtcagactggagacgcagactccgtacctgacccccagcctctcggacagccaccagcagcccccacaagtttgggatctactacaatggctacaggcagtggcgcaccaatggcagacaataacgagggtgccgatggagtgggtaattcctcaggaaattggcattgcgattcccaatggctgggcgacagagtcatcaccaccagcacccgaacctgggccctgcccacctacaacaaccacctctacaagcaaatctccagccaatcaggagcatcgaacgacaaccactactttggctacagcaccccttgggggtattttgacttcaacagattccactgtcacttctccccacgtgactggcaaagactcatcaacaacaactggggattccgacccaagagactcaacttcaagctctttaacattcaagtcaaagaggtcacgcagaatgacggtacgacgacgattgccaataaccttaccagcacggttcaggtgtttactgactcggagtaccagctcccgtacgtcctcggctcggcgcatcaaggatgcctcccgccgtttccagcggacgtcttcatggtcccacagtatggatacctcaccctgaacaacgggagtcaggcggtaggacgctcttccttttactgcctggagtactttccttctcagatgctgcgtaccggaaacaactttaccttcagctacacctttgaggacgtgcccttccacagcagctacgctcacagccagagtttggaccggctgatgaatcctctgatcgaccagtatctgtattatctgaacaggacacaatcaaatagtggaactcttcagcagtctaggctactgtttagccaagctggacccaccagcatgtcccttcaagctaaaaactggctgcctggaccttgctacagacagcagcgtctgtcaaagcaggcaaacgacaacaacaacagcaactttccctggactgcggctacaaagtatcatctaaatggtcgggactcgttggttaatccaggaccagctatggccagccacaaagacgatgaagaaaagtttttccccatgcatggaaccctgatatttggtaaacaaggaacaaatgctaacgacgcggatttggaacatgtcatgattacagatgaagaagaaatcaggaccaccaatcccgtggctacagagcagtacggaaacgtgtcaaataatttgcaaaactcaaatactggcccaactacagaaaatgtcaatcaccagggagcgttacttggtatggtgtggcaggatcgagacgtgtacctgcagggacccatttgggccaagattcctcacaccgacggacactttcacccttctccactgatgggaggttttggactcaaacacccgcctcctcaaatcatgatcaaaaacactcctgttccagccaatcctcctacaaacttcagcgcggcaaagtttgcttccttcatcacacagtattccacgggacaggtcagcgtggagatcgagtgggagctgcagaaggagaacagcaaacgctggaaccccgagatccagtacacttccaactacaacaaatctgttaatgtggactttactgtggacgctaatggtgtgtattcagagcctcgccccattggcaccagatacctgactcgtaatctgtaa

SEQ ID NO: 3692 - DNA, 2208 bp, Artificial Sequence
  Description of Artificial Sequence: Synthetic polynucleotide
atggctgccgatggttatcttccagattggctcgaggacactctctctgaaggaataagacagtggtggaagctcaaacctggcccaccaccaccaaggcccgcagagcggcatcaggacgacagcaggggtcttgtgcttcctgggtacaagtacctcggacccttcaacggactcgacaaaggagagccggtcaacgaggcagacgctgcggccctcgagcacgacaaggcctacgaccggcagctcgacagcggagacaacccgtacctcaagtacaaccacgccgacgcggagtttcaggagcgtcttaaagaagatacgtcttttgggggcaacctcggacgagcagtcttccaggcgaaaaagagggttcttgaacctctgggcctggttgaggaacctgttaagacggctccgggaaaaaagaggccggtagagcactctcctgcggagccagactcctcctcgggaaccggaaaagcgggccagcagcctgcaagaaagagattgaatttcggtcagactggagacgcagactccgtacctgacccccagcctctcggacagccaccagcagcccccacaagtttgggatctactacaatggctacaggcagtggcgcaccaatggcagacaataacgagggtgccgatggagtgggtaattcctcaggaaattggcattgcgattcccaatggctgggcgacagagtcatcaccaccagcacccgaacctgggccctgcccacctacaacaaccacctctacaagcaaatctccagccaatcaggagcatcgaacgacaaccactactttggctacagcaccccttgggggtattttgacttcaacagattccactgtcacttctccccacgtgactggcaaagactcatcaacaacaactggggattccgacccaagagactcaacttcaagctctttaacattcaagtcaaagaggtcacgcagaatgacggtacggcgacgattgccaataaccttaccagcacggttcaggtgtttactgactcggagtaccagctcccgtacgtcctcggctcggcgcatcaaggatgcctcccgccgtttccagcggacgtcttcatggtcccacagtatggatacctcaccctgaacaacgggagtcaggcggtaggacgctcttccttttactgcctggagtactttccttctcagatgctgcgtaccggaaacaactttaccttcagctacacctttgaggacgtgcccttccacagcagctacgctcacagccagagtttggaccggctgatgaatcctctgatcgaccagtatctgtattatctgaacaggacacaatcaaatagtggaactcttcagcagtctaggctactgtttagccaagctggacccaccagcatgtcccttcaagctaaaaactggctgcctggaccttgctacagacagcagcgtctgtcaaagcaggcaaacgacaacaacaacagcaactttccctggactgcggctacaaagtatcatctaaatggtcgggactcgttggttaatccaggaccagctatggccagccacaaagacgatgaagaaaagtttttccccatgcatggaaccctgatatttggtaaacaaggaacaaatgctaacgacgcggatttggaacatgtcatgattacagatgaagaagaaatcaggaccaccaatcccgtggctacagagcagtacggaaacgtgtcaaataatttgcaaaactcaaatactggtccaactacagaaaatgtcaatcaccagggagcgttacctggtatggtgtggcaggatcgagacgtgtacctgcagggacccatttgggccaagattcctcacaccgacggacactttcacccttctccactgatgggaggttttggactcaaacacccgcctcctcaaatcatgatcaaaaacactcctgttccagccaatcctcctacaaacttcagcgcggcaaagtttgcttccttcatcacacagtattccacgggacaggtcagcgtggagatcgagtgggagctgcagaaggagaacagcaaacgctggaaccccgagatccagtacacttccaactacaacaaatctgttaatgtggactttactgtggacgctaatggtgtgtattcagagcctcgccccattggcaccagatacctgactcgtaatctgtaa

SEQ ID NO: 3693 - DNA, 2208 bp, Artificial Sequence
  Description of Artificial Sequence: Synthetic polynucleotide
atggctgccgatggttatcttccagattggctcgaggacactctctctgaaggaataagacagtggtggaagctcaaacctggcccaccaccgccaaagcccgcagagcggcataaggacgacagcaggggtcttgtgcttcctgggtacaagtacctcggacccttcaacggactcgacaagggagagccggtcaacgaggcagacgccgcggccctcgagcacgacaaggcctacgaccggcagctcgacagcggagacaacccgtacctcaagtacaaccacgccgacgcggagtttcaggagcgccttaaagaagatacgtcttttgggggcaacctcggacgagcagtattccaggcgaaaaagagggttcttgaacctctgggcctggttgaggagcctgttaagacggctccgggaaaaaagaggccggtagagcactctcctgtggagccagactcctcctcgggaaccggaaaagcgggccagcagcctgcgagaaagagattgaattttggtcagactggagacgcagactccgtacctgacccccagcctctcggacagccaccagcagcccccacaagtttgggatctactacaatggctacaggcagtggcgcaccaatggcagacaataacgagggtgccgatggagtgggtaattcctcaggaaattggcattgcgattcccaatggttgggcgacagagtcatcaccaccagcacccgaacctgggccctgcccacctacaacaaccacctctacaagcaaatctccagccaatcaggagccagcaacgacaaccactactttggctacagcaccccctgggggtattttgacttcaacagattccactgccacttttcaccacgtgactggcaaagactcatcaacaacaactggggattccgacccaagagactcaacttcaagctctttaacattcaagtcaaagaggtcacgcagaatgacggtacgacgacgattgccaataaccttaccagcacggttcaggtgtttactgactcggagtaccagctcccgtacgtcctcggctcggcgcatcaaggatgcctcccgccgtttccagcggacgtcttcatggtcccacagtatggatacctcaccctgaacaacgggagtcaggcggtaggacgctcttccttttactgcctggagtactttccttctcagatgcttcgtaccggaaacaactttaccttcagttacacctttgaagacgttcctttccacagcagctacgctcacagtcaaagtctggaccggctgatgaatcctcttatcgaccagtacctgtattatctaaacaaaacacaatcaaatagtggaactcttcagcagtctcggctactgtttagtcaagctggacctaccagcatgtctcttcaagctaaaaactggctgcctggaccttgctacagacaacagcgtctgtcaaagcaggcaaacgacaacaacaacagcaactttccctggactgcggctacaaagtatcatctaaatggccgggactcgttggttaatccaggaccagctatggccagccacaaagacgatgaagaaaagtttttccccatgcatggaaccctgatatttggcaaacaaggaacaaatgctaacgacgcggatttggacaatgtcatgattacagatgaagaagaaatccgtaccaccaatcccgtggctacggagcagtacgggactgtgtcaaataatttgcaaaactcaaatactggtccaactactggaactgtcaatcaccaaggagcgttacctggtatggtgtggcaggatcgagacgtgtaccttcagggacccatttgggccaagattcctcacaccgatggacactttcacccttctccgctgatgggaggttttggactcaaacacccgcctcctcagatcatgatcaaaaacactcccgttccagccaatcctcccacaaacttcagttctgccaagtttgcttctttcatcacacagtattccacgggacaggttagcgtggagatcgagtgggagctgcagaaggagaacagcaaacgctggaaccccgagatccagtacacttccaactacaacaagtctgttaatgtggactttactgtggacactaatggtgtgtattcagagcctcgccccattggcaccagatacctgactcgtaatctgtaa

SEQ ID NO: 3694 - DNA, 2208 bp, Artificial Sequence
  Description of Artificial Sequence: Synthetic polynucleotide
atggctgccgatggttatcttccagattggctcgaggacactctctctgaaggaataagacagtggtggaagctcaaacctggcccaccaccgccaaagcccgcagagcggcataaggacgacagcaggggtcttgtgcttcctgggtacaagtacctcggacccttcaacggactcgacaagggagagccggtcaacgaggcagacgccgcggccctcgagcacgacaaggcctacgaccggcagctcgacagcggagacaacccgtacctcaagtacaaccacgccgacgcggagtttcaggagcgccttaaagaagatacgtcttttgggggcaacctcggacgagcagtattccaggcgaaaaagagggttcttgaacctctgggcctggttgaggagcctgttaagacggctccgggaaaaaagaggccggtagagcactctcctgtggagccagactcctcctcgggaaccggaaaagcgggccagcagcctgcgagaaagagattgaattttggtcagactggagacgcagactccgtacctgacccccagcctctcggacagccaccagcagcccccacaagtttgggatctactacaatggctacaggcagtggcgcaccaatggcagacaataacgagggtgccgatggagtgggtaattcctcaggaaattggcattgcgattcccaatggttgggcgacagagtcatcaccaccagcacccgaacctgggccctgcccacctacaacaaccacctctacaagcaaatctccagccaatcaggagccagcaacgacaaccactactttggctacagcaccccctgggggtattttgacttcaacagattccactgccacttttcaccacgtgactggcaaagactcatcaacaacaactggggattccgacccaagagactcaacttcaagctctttaacattcaagtcaaagaggtcacgcagaatgacggtacgacgacgattgccaataaccttaccagcacggttcaggtgtttactgactcggagtaccagctcccgtacgtcctcggctcggcgcatcaaggatgcctcccgccgtttccagcggacgtcttcatggtcccacagtatggatacctcaccctgaacaacgggagtcaggcggtaggacgctcttccttttactgcctggagtactttccttctcagatgcttcgtaccggaaacaactttaccttcagttacacctttgaagacgttcctttccacagcagctacgctcacagtcaaagtctggaccggctgatgaatcctcttatcgaccagtacctgtattatctaaacaaaacacaatcaaatagtggaactcttcagcagtctcggctactgtttagtcaagctggacctaccagcatgtctcttcaagctaaaaactggctgcctggaccttgctacagacaacagcgtctgtcaaagcaggcaaacgacaacaacaacagcaactttccctgggctgcggctacaaagtatcatctaaatggccgggactcgttggttaatccaggaccagctatggccagccacaaagacgatgaagaaaagtttttccccatgcatggaaccctgatatttggcaaacaaggaacaaatgctaacgacgcggatttggacaatgtcatgattacagatgaagaagaaatccgtaccaccaatcccgtggctacggagcagtacgggactgtgtcaaataatttgcaaaactcaaatactggtccaactactggaactgtcaatcaccaaggagcgttacctggtatggtgtggcaggatcgagacgtgtaccttcagggacccatttgggccaagattcctcacaccgatggacactttcacccttctccgctgatgggaggttttggactcaaacacccgcctcctcagatcatgatcaaaaacactcccgttccagccaatcctcccacaaacttcagttctgccaagtttgcttctttcatcacacagtattccacgggacaggttagcgtggagatcgagtgggagctgcagaaggagaacagcaaacgctggaaccccgagatccagtacacttccaactacaacaagtctgttaatgtggactttactgtggacactaatggtgtgtattcagagcctcgccccattggcaccagatacctgactcgtaatctgtaa

SEQ ID NO: 3695 - DNA, 2208 bp, Artificial Sequence
  Description of Artificial Sequence: Synthetic polynucleotide
atggctgccgatggttatcttccagattggctcgaggacactctctctgaaggaataagacagtggtggaagctcaaacctggcccaccaccgccaaagcccgcagagcggcataaggacgacagcaggggtcttgtgcttcctgggtacaagtacctcggacccttcaacggactcgacaagggagagccggtcaacgaggcagacgccgcggccctcgagcacgacaaggcctacgaccggcagctcgacagcggagacaacccgtacctcaagtacaaccacgccgacgcggagtttcaggagcgccttaaagaagatacgtcttttgggggcaacctcggacgagcagtattccaggcgaaaaagagggttcttgaacctctgggcctggttgaggagcctgttaagacggctccgggaaaaaagaggccggtagagcactctcctgtggagccagactcctcctcgggaaccggaaaagcgggccagcagcctgcgagaaagagattgaattttggtcagactggagacgcagactccgtacctgacccccagcctctcggacagccaccagcagcccccacaagtttgggatctactacaatggctacaggcagtggcgcaccaatggcagacaataacgagggtgccgatggagtgggtaattcctcaggaaattggcattgcgattcccaatggttgggcgacagagtcatcaccaccagcacccgaacctgggccctgcccacctacaacaaccacctctacaagcaaatctccagccaatcaggagccagcaacgacaaccactactttggctacagcaccccctgggggtattttgacttcaacagattccactgccacttttcaccacgtgactggcaaagactcatcaacaacaactggggattccgacccaagagactcaacttcaagctctttaacattcaagtcaaagaggtcacgcagaatgacggtacgacgacgattgccaataaccttaccagcacggttcaggtgtttactgactcggagtaccagctcccgtacgtcctcggctcggcgcatcaaggatgcctcccgccgtttccagcggacgtcttcatggtcccacagtatggatacctcaccctgaacaacgggagtcaggcggtaggacgctcttccttttactgcctggagtactttccttctcagatgcttcgtaccggaaacaactttaccctcagttacacctttgaagacgttcctttccacagcagctacgctcacagtcaaagtctggaccggctgatgaatcctcttatcgaccagtacctgtattatctaaacaaaacacaatcaaatagtggaactcttcagcagtctcggctactgtttagtcaagctggacctaccagcatgtctcttcaagctaaaaactggctgcctggaccttgctacagacaacagcgtctgtcaaagcaggcaaacgacaacaacaacagcaactttccctggactgcggctacaaagtatcatctaaatggccgggactcgttggttaatccaggaccagctatggccagccacaaagacgatgaagaaaagtttttccccatgcatggaaccctgatatttggcaaacaaggaacaaatgctaacgacgcggatttggacaatgtcatgattacagatgaagaagaaatccgtaccaccaatcccgtggctacggagcagtacgggactgtgtcaaataatttgcaaaactcaaatactggtccaactactggaactgtcaatcaccaaggagcgttacctggtatggtgtggcaggatcgagacgtgtaccttcagggacccatttgggccaagattcctcacaccgatggacactttcacccttctccgctgatgggaggttttggactcaaacacccgcctcctcagatcatgatcaaaaacactcccgttccagccaatcctcccacaaacttcagttctgccaagtttgcttctttcatcacacagtattccacgggacaggttagcgtggagatcgagtgggagctgcagaaggagaacagcaaacgctggaaccccgagatccagtacacttccaactacaacaagtctgttaatgtggactttactgtggacactaatggtgtgtattcagagcctcgccccattggcaccagatacctgactcgtaatctgtaa

SEQ ID NO: 3696 - DNA, 2208 bp, Artificial Sequence
  Description of Artificial Sequence: Synthetic polynucleotide
atggctgccgatggttatcttccagattggctcgaggacactctctctgaaggaataagacagtggtggaagctcaaacctggcccaccaccgccaaagcccgcagagcggcataaggacgacagcaggggtcttgtgcttcctgggtacaagtacctcggacccttcaacggactcgacaagggagagccggtcaacgaggcagacgccgcggccctcgagcacgacaaggcctacgaccggcagctcgacagcggagacaacccgtacctcaagtacaaccacgccgacgcggagtttcaggagcgccttaaagaagatacgtcttttgggggcaacctcggacgagcagtattccaggcgaaaaggagggttcttgaacctctgggcctggttgaggagcctgttaagacggctccgggaaaaaagaggccggtagagcactctcctgtggagccagactcctcctcgggaaccggaaaagcgggccagcagcctgcgagaaagagattgaattttggtcagactggagacgcagactccgtacctgacccccagcctctcggacagccaccagcagcccccacaagtttgggatctactacaatggctacaggcagtggcgcaccaatggcagacaataacgagggtgccgatggagtgggtaattcctcaggaaattggcattgcgattcccaatggttgggcgacagagtcatcaccaccagcacccgaacctgggccctgcccacctacaacaaccacctctacaagcaaatctccagccaatcaggagccagcaacgacaaccactactttggctacagcaccccctgggggtattttgacttcaacagattccactgccacttttcaccacgtgactggcaaagactcatcaacaacaactggggattccgacccaagagactcaacttcaagctctttaacattcaagtcaaagaggtcacgcagaatgacggtacgacgacgattgccaataaccttaccagcacggttcaggtgtttactgactcggagtaccagctcccgtacgtcctcggctcggcgcatcaaggatgcctcccgccgtttccagcggacgtcttcatggtcccacagtatggatacctcaccctgaacaacgggagtcaggcggtaggacgctcttccttttactgcctggagtactttccttctcagatgcttcgtaccggaaacaactttaccttcagttacacctttgaagacgttcctttccacagcagctacgctcacagtcaaagtctggaccggctgatgaatcctcttatcgaccagtacctgtattatctaaacaaaacacaatcaaatagtggaactcttcagcagtctcggctactgtttagtcaagctggacctaccagcatgtctcttcaagctaaaaactggctgcctggaccttgctacagacaacagcgtctgtcaaagcaggcaaacgacaacaacaacagcaactttccctggactgcggctacaaagtatcatctaaatggccgggactcgttggttaatccaggaccagctatggccagccacaaagacgatgaagaaaagtttttccccatgcatggaaccctgatatttggcaaacaaggaacaaatgctaacgacgcggatttggacaatgtcatgattacagatgaagaagaaatccgtaccaccaatcccgtggctacggagcagtacgggactgtgtcaaataatttgcaaaactcaaatactggtccaactactggaactgtcaatcaccaaggagcgttacctggtatggtgtggcaggatcgagacgtgtaccttcagggacccatttgggccaagattcctcacaccgatggacactttcacccttctccgctgatgggaggttttggactcaaacacccgcctcctcagatcatgatcaaaaacactcccgttccagccaatcctcccacaaacttcagttctgccaagtttgcttctttcatcacacagtattccacgggacaggttagcgtggagatcgagtgggagctgcagaaggagaacagcaaacgctggaaccccgagatccagtacacttccaactacaacaagtctgttaatgtggactttactgtggacactaatggtgtgtattcagagcctcgccccattggcaccagatacctgactcgtaatctgtaa

SEQ ID NO: 3697 - DNA, 2208 bp, Artificial Sequence
  Description of Artificial Sequence: Synthetic polynucleotide
atggctgccgatggttatcttccagattggctcgaggacactctctctgaaggaataagacagtggtggaagctcaaacctggcccaccaccgccaaagcccgcagagcggcataaggacgacagcaggggtcttgtgcttcctgggtacaagtacctcggacccttcaacggactcgacaagggagagccggtcaacgaggcagacgccgcggccctcgagcacgacaaggcctacgaccggcagctcgacagcggagacaacccgtacctcaagtacaaccacgccgacgcggagtttcaggagcgccttaaagaagatacgtcttttgggggcaacctcggacgagcagtattccaggcgaaaaagagggttcttgaacctctgggcctggttgaggagcctgttaagacggctccgggaaaaaagaggccggtagagcactctcctgtggagccagactcctcctcgggaaccggaaaagcgggccagcagcctgcgagaaagagattgaattttggtcagactggagacgcagactccgtacctgacccccagcctctcggacagccaccagcagcccccacaagtttgggatctactacaatggctacaggcagtggcgcaccaatggcagacaataacgagggtgccgatggagtgggtaattcctcaggaaattggcattgcgattcccaatggttgggcggcagagtcatcaccaccagcacccgaacctgggccctgcccacctacaacaaccacctctacaagcaaatctccagccaatcaggagccagcaacgacaaccactactttggctacagcaccccctgggggtattttgacttcaacagattccactgccacttttcaccacgtgactggcaaagactcatcaacaacaactggggattccgacccaagagactcaacttcaagctctttaacattcaagtcaaagaggtcacgcagaatgacggtacgacgacgattgccaataaccttaccagcacggttcaggtgtttactgactcggagtaccagctcccgtacgtcctcggctcggcgcatcaaggatgcctcccgccgtttccagcggacgtcttcatggtcccacagtatggatacctcaccctgaacaacgggagtcaggcggtaggacgctcttccttttactgcctggagtactttccttctcagatgcttcgtaccggaaacaactttaccttcagttacacctttgaagacgttcctttccacagcagctacgctcacagtcaaagtctggaccggctgatgaatcctcttatcgaccagtacctgtattatctaaacaaaacacaatcaaatagtggaactcttcagcagtctcggctactgtttagtcaagctggacctaccagcatgtctcttcaagctaaaaactggctgcctggaccttgctacagacaacagcgtctgtcaaagcaggcaaacgacaacaacaacagcaactttccctggactgcggctacaaagtatcatctaaatggccgggactcgttggttaatccaggaccagctatggccagccacaaagacgatgaagaaaagtttttccccatgcatggaaccctgatatttggcaaacaaggaacaaatgctaacgacgcggatttggacaatgtcatgattacagatgaagaagaaatccgtaccaccaatcccgtggctacggagcagtacgggactgtgtcaaataatttgcaaaactcaaatactggtccaactactggaactgtcaatcaccaaggagcgttacctggtatggtgtggcaggatcgagacgtgtaccttcagggacccatttgggccaagattcctcacaccgatggacactttcacccttctccgctgatgggaggttttggactcaaacacccgcctcctcagatcatgatcaaaaacactcccgttccagccaatcctcccacaaacttcagttctgccaagtttgcttctttcatcacacagtattccacgggacaggttagcgtggagatcgagtgggagctgcagaaggagaacagcaaacgctggaaccccgagatccagtacacttccaactacaacaagtctgttaatgtggactttactgtggacactaatggtgtgtattcagagcctcgccccattggcaccagatacctgactcgtaatctgtaa

SEQ ID NO: 3698 - DNA, 2205 bp, Artificial Sequence
  Description of Artificial Sequence: Synthetic polynucleotide
atggctgccgatggttatcttccagattggctcgaggacactctctctgaaggaataagacagtggtggaagctcaaacctggcccaccaccgccaaagcccgcagagcggcataaggacgacagcaggggtcttgtgcttcctgggtacaagtacctcggacccttcaacggactcgacaagggagagccggtcaacgaggcagacgccgcggccctcgagcacgacaaggcctacgaccggcagctcgacagcggagacaacccgtacctcaagtacaaccacgccgacgcggagtttcaggagcgccttaaagaagatacgtcttttgggggcaacctcggacgagcagtattccaggcgaaaaagagggttcttgaacctctgggcctggttgaggagcctgttaagacggctccgggaaaaaagaggccggtagagcactctcctgtggagccagactcctcctcgggaaccggaaaagcgggccagcagcctgcgagaaagagattgaattttggtcagactggagacgcagactccgtacctgacccccagcctctcggacagccaccagcagcccccacaagtttgggatctactacaatggctacaggcagtggcgcaccaatggcagacaataacgagggtgccgatggagtgggtaattcctcaggaaattggcattgcgattcccaatggttgggcgacagagtcatcaccaccagcacccgaacctgggccctgcccacctacaacaaccacctctacaagcaaatctccagccaatcaggagccagcaacgacaaccactactttggctacagcaccccctgggggtattttgacttcaacagattccactgccacttttcaccacgtgactggcaaagactcatcaacaacaactggggattccgacccaagagactcaacttcaagctctttaacattcaagtcaaagaggtcacgcagaatgacggtacgacgacgattgccaataaccttaccagcacggttcaggtgtttactgactcggagtaccagctcccgtacgtcctcggctcggcgcatcaaggatgcctcccgccgtttccagcggacgtcttcatggtcccacagtatggatacctcaccctgaacaacgggagtcaggcggtaggacgctcttccttttactgcctggagtactttccttctcagatgcttcgtaccggaaacaactttaccttcagttacacctttgaagacgttcctttccacagcagctacgctcacagtcaaagtctggaccggctgatgaatcctcttatcgaccagtacctgtattatctaaacaaaacacaatcaaatagtggaactcttcagcagtctcggctactgtttagtcaagctggacctaccagcatgtctcttcaagctaaaaactggctgcctggaccttgctacagacaacagcgtctgtcaaagcaggcaaacgacaacaacagcaactttccctggactgcggctacaaagtatcatctaaatggccgggactcgttggttaatccaggaccagctatggccagccacaaagacgatgaagaaaagtttttccccatgcatggaaccctgatatttggcaaacaaggaacaaatgctaacgacgcggatttggacaatgtcatgattacagatgaagaagaaatccgtaccaccaatcccgtggctacggagcagtacgggactgtgtcaaataatttgcaaaactcaaatactggtccaactactggaactgtcaatcaccaaggagcgttacctggtatggtgtggcaggatcgagacgtgtaccttcagggacccatttgggccaagattcctcacaccgatggacactttcacccttctccgctgatgggaggttttggactcaaacacccgcctcctcagatcatgatcaaaaacactcccgttccagccaatcctcccacaaacttcagttctgccaagtttgcttctttcatcacacagtattccacgggacaggttagcgtggagatcgagtgggagctgcagaaggagaacagcaaacgctggaaccccgagatccagtacacttccaactacaacaagtctgttaatgtggactttactgtggacactaatggtgtgtattcagagcctcgccccattggcaccagatacctgactcgtaatctgtaa

SEQ ID NO: 3699 - DNA, 2208 bp, Artificial Sequence
  Description of Artificial Sequence: Synthetic polynucleotide
atggctgccgatggttatcttccagattggctcgaggacactctctctgaaggaataagacagtggtggaagctcaaacctggcccaccaccgccaaagcccgcagagcggcataaggacgacagcaggggtcttgtgcttcctgggtacaagtacctcggacccttcaacggactcgacaagggagagccggtcaacgaggcagacgccgcggccctcgagcacgacaaggcctacgaccggcagctcgacagcggagacaacccgtacctcaagtacaaccacgccgacgcggagtttcaggagcgccttaaagaagatacgtcttttgggggcaacctcggacgagcagtattccaggcgaaaaagagggttcttgaacctctgggcctggttgaggagcctgttaagacggctccgggaaaaaagaggccggtagagcactctcctgtggagccagactcctcctcgggaaccggaaaagcgggccagcagcctgcgagaaagagattgaattttggtcagactggagacgcagactccgtacctgacccccagcctctcggacagccaccagcagcccccacaagtttgggatctactacaatggctacaggcagtggcgcaccaatggcagacaataacgagggtgccgatggagtgggtaattcctcaggaaattggcattgcgattcccaatggttgggcgacagagtcatcaccaccagcacccgaacctgggccctgcccacctacaacaaccacctctacaagcaaatctccagccaatcaggagccagcaacgacaaccactactttggctacagcaccccctgggggtattttgacttcaacagattccactgccacttttcaccacgtgactggcaaagactcatcaacaacaactggggattccgacccaagagactcaacttcaagctctttaacattcaagtcaaagaggtcacgcagaatgacggtacgacgacgattgccaataaccttaccagcacggttcaggtgtttactgactcggagtaccagctcccgtacgtcctcggctcggcgcatcaaggatgcctcccgccgtttccagcggacgtcttcatggtcccacagtatggatacctcaccctgaacaacgggagtcaggcggtaggacgctcttccttttactgcctggagtactttccttctcagatgcttcgtaccggaaacaactttaccttcagttacacctttgaagacgttcctttccacagcagctacgctcacagtcaaagtctggaccggctgatgaatcctcttatcgaccagtacctgtattatctaaacaaaacacaatcaaatagtggaactcttcagcagcctcggctactgtttagtcaagctggacctaccagcatgtctcttcaagctaaaaactggctgcctggaccttgctacagacaacagcgtctgtcaaagcaggcaaacgacaacaacaacagcaactttccctggactgcggctacaaagtatcatctaaatggccgggactcgttggttaatccaggaccagctatggccagccacaaagacgatgaagaaaagtttttccccatgcatggaaccctgatatttggcaaacaaggaacaaatgctaacgacgcggatttggacaatgtcatgattacagatgaagaagaaatccgtaccaccaatcccgtggctacggagcagtacgggactgtgtcaaataatttgcaaaactcaaatactggtccaactactggaactgtcaatcaccaaggagcgttacctggtatggtgtggcaggatcgagacgtgtaccttcagggacccatttgggccaagattcctcacaccgatggacactttcacccttctccgctgatgggaggttttggactcaaacacccgcctcctcagatcatgatcaaaaacactcccgttccagccaatcctcccacaaacttcagttctgccaagtttgcttctttcatcacacagtattccacgggacaggttagcgtggagatcgagtgggagctgcagaaggagaacagcaaacgctggaaccccgagatccagtacacttccaactacaacaagtctgttaatgtggactttactgtggacactaatggtgtgtattcagagcctcgccccattggcaccagatacctgactcgtaatctgtaa

SEQ ID NO: 3700 - DNA, 2205 bp, Artificial Sequence
  Description of Artificial Sequence: Synthetic polynucleotide
atggctgccgatggttatcttccagattggctcgaggacactctctctgaaggaataagacagtggtggaagctcaaacctggcccaccaccgccaaagcccgcagagcggcataaggacgacagcaggggtcttgtgcttcctgggtacaagtacctcggacccttcaacggactcgacaagggagagccggtcaacgaggcagacgccgcggccctcgagcacgacaaggcctacgaccggcagctcgacagcggagacaacccgtacctcaagtacaaccacgccgacgcggagtttcaggagcgccttaaagaagatacgtcttttgggggcaacctcggacgagcagtattccaggcgaaaaagagggttcttgaacctctgggcctggttgaggagcctgttaagacggctccgggaaaaaagaggccggtagagcactctcctgtggagccagactcctcctcgggaaccggaaaagcgggccagcagcctgcgagaaagagattgaattttggtcagactggagacgcagactccgtacctgacccccagcctctcggacagccaccagcagcccccacaagtttgggatctactacaatggctacaggcagtggcgcaccaatggcagacaataacgagggtgccgatggagtgggtaattcctcaggaaattggcattgcgattcccaatggttgggcgacagagtcatcaccaccagcacccgaacctgggccctgcccacctacaacaaccacctctacaagcaaatctccagccaatcaggagccagcaacgacaaccactactttggctacagcaccccctgggggtattttgacttcaacagattccactgccacttttcaccacgtgactggcaaagactcatcaacaacaactggggattccgacccaagagactcaacttcaagctctttaacattcaagtcaaagaggtcacgcagaatgacggtacgacgacgattgccaataaccttaccagcacggttcaggtgtttactgactcggagtaccagctcccgtacgtcctcggctcggcgcatcaaggatgcctcccgccgtttccagcggacgtcttcatggtcccacagtatggatacctcaccctgaacaacgggagtcaggcggtaggacgctcttccttttactgcctggagtactttccttctcagatgcttcgtaccggaaacaactttaccttcagttgcacctttgaagacgttcctttccacagcagctacgctcacagtcaaagtctggaccggctgatgaatcctcttatcgaccagtacctgtattatctaaacaaaacacaatcaaatagtggaactcttcagcagtctcggctactgtttagtcaagctggacctaccagcatgtctcttcaagctaaaaactggctgcctggaccttgctacagacaacagcgtctgtcaaagcaggcaaacgacaacaacagcaactttccctggactgcggctacaaagtatcatctaaatggccgggactcgttggttaatccaggaccagctatggccagccacaaagacgatgaagaaaagtttttccccatgcatggaaccctgatatttggcaaacaaggaacaaatgctaacgacgcggatttggacaatgtcatgattacagatgaagaagaaatccgtaccaccaatcccgtggctacggagcagtacgggactgtgtcaaataatttgcaaaactcaaatactggtccaactactggaactgtcaatcaccaaggagcgttacctggtatggtgtggcaggatcgagacgtgtaccttcagggacccatttgggccaagattcctcacaccgatggacactttcacccttctccgctgatgggaggttttggactcaaacacccgcctcctcagatcatgatcaaaaacactcccgttccagccaatcctcccacaaacttcagttctgccaagtttgcttctttcatcacacagtattccacgggacaggttagcgtggagatcgagtgggagctgcagaaggagaacagcaaacgctggaaccccgagatccagtacacttccaactacaacaagtctgttaatgtggactttactgtggacactaatggtgtgtattcagagcctcgccccattggcaccagatacctgactcgtaatctgtaa

SEQ ID NO: 3701 - DNA, 2208 bp, Artificial Sequence
  Description of Artificial Sequence: Synthetic polynucleotide
atggctgccgatggttatcttccagattggctcgaggacactctctctgaaggaataagacagtggtggaagctcaaacctggcccaccaccgccaaagcccgcagagcggcataaggacgacagcaggggtcttgtgcttcctgggtacaagtacctcggacccttcaacggactcgacaagggagagccggtcaacgaggcagacgccgcggccctcgagcacgacaaggcctacgaccggcagctcgacagcggagacaacccgtacctcaagtacaaccacgccgacgcggagtttcaggagcgccttaaagaagatacgtcttttgggggcaacctcggacgagcagtattccaggcgaaaaagagggttcttgaacctctgggcctggttgaggagcctgttaagacggctccgggaaaaaagaggccggtagagcactctcctgtggagccagactcctcctcgggaaccggaaaagcgggccagcagcctgcgagaaagagattgaattttggtcagactggagacgcagactccgtacctgacccccagcctctcggacagccaccagcagcccccacaagtttgggatctactacaatggctacaggcagtggcgcaccaatggcagacaataacgagggtgccgatggagtgggtaattcctcaggaaattggcattgcgattcccaatggttgggcgacagagtcatcaccaccagcacccgaacctgggccctgcccacctacaacaaccacctctacaagcaaatctccagccaatcaggagccagcaacgacaaccactactttggctacagcaccccctgggggtattttgacttcaacagattccactgccacttttcaccacgtgactggcaaagactcatcaacaacaactggggattccgacccaagagactcaacttcaagctctttaacattcaagtcaaagaggtcacgcagaatgacggtacgacgacgattgccaataaccttaccagcacggttcaggtgtttactgactcggagtaccagctcccgtacgtcctcggctcggcgcatcaaggatgcctcccgccgtttccagcggacgtcttcatggtcccacagtatggatacctcaccctgaacaacgggagtcaggcggtaggacgctcttccttttactgcctggagtactttccttctcagatgcttcgtaccggaaacaactttaccttcagttgcacctttgaagacgttcctttccacagcagctacgctcacagtcaaagtctggaccggctgatgaatcctcttatcgaccagtacctgtattatctaaacaaaacacaatcaaatagtggaactcttcagcagtctcggctactgtttagtcaagctggacctaccagcatgtctcttcaagctaaaaactggctgcctggaccttgctacagacaacagcgtctgtcaaagcaggcaaacgacaacaacaacagcaactttccctggactgcggctacaaagtatcatctaaatggccgggactcgttggttaatccaggaccagctatggccagccacaaagacgatgaagaaaagtttttccccatgcatggaaccctgatatttggcaaacaaggaacaaatgctaacgacgcggatttggacaatgtcatgattacagatgaagaagaaatccgtaccaccaatcccgtggctacggagcagtacgggactgtgtcaaataatttgcaaaactcaaatactggtccaactactggaactgtcaatcaccaaggagcgttacctggtatggtgtggcaggatcgagacgtgtaccttcagggacccatttgggccaagattcctcacaccgatggacactttcacccttctccgctgatgggaggttttggactcaaacacccgcctcctcagatcatgatcaaaaacactcccgttccagccaatcctcccacaaacttcagttctgccaagtttgcttctttcatcacacagtattccacgggacaggttagcgtggagatcgagtgggagctgcagaaggagaacagcaaacgctggaaccccgagatccagtacacttccaactacaacaagtctgttaatgtggactttagtgtggacactaatggtgtgtattcagagcctcgccccattggcaccagatacctgactcgtaatctgtaa

SEQ ID NO: 3702 - DNA, 2208 bp, Artificial Sequence
  Description of Artificial Sequence: Synthetic polynucleotide
atggctgccgatggttatcttccagattggctcgaggacactctctctgaaggaataagacagtggtggaagctcaaacctggcccaccaccgccaaagcccgcagagcggcataaggacgacagcaggggtcttgtgcttcctgggtacaagtacctcggacccttcaacggactcgacaagggagagccggtcaacgaggcagacgccgcggccctcgagcacgacaaggcctacgaccggcagctcgacagcggagacaacccgtacctcaagtacaaccacgccgacgcggagtttcaggagcgccttaaagaagatacgtcttttgggggcaacctcggacgagcagtattccaggcgaaaaagagggttcttgaacctctgggcctggttgaggagcctgttaagacggctccgggaaaaaagaggccggtagagcactctcctgtggagccagactcctcctcgggaaccggaaaagcgggccagcagcctgcgagaaagagattgaattttggtcagactggagacgcagactccgtacctgacccccagcctctcggacagccaccagcagcccccacaagtttgggatctactacaatggctacaggcagtggcgcaccaatggcagacaataacgagggtgccgatggagtgggtaattcctcaggaaattggcattgcgattcccaatggttgggcgacagagtcatcaccaccagcacccgaacctgggccctgcccacctacaacaaccacctctacaagcaaatctccagccaatcaggagccagcaacgacaaccactactttggctacagcaccccctgggggtattttgacttcaacagattccactgccacttttcaccacgtgactggcaaagactcatcaacaacaactggggattccgacccaagagactcaacttcaagctctttaacattcaagtcaaagaggtcacgcagaatgacggtacgacgacgattgccaataaccttaccagcacggttcaggtgtttactgactcggagtaccagctcccgtacgtcctcggctcggcgcatcaaggatgcctcccgccgtttccagcggacgtcttcatggtcccacagtatggatacctcaccctgaacaacgggagtcaggcggtaggacgctcttccttttactgcctggagtactttccttctcagatgcttcgtaccggaaacaactttaccttcagttgcacctttgaagacgttcctttccacagcagctacgctcacagtcaaagtctggaccggctgatgaatcctcttatcgaccagtacctgtattatctaaacaaaacacaatcaaatagtggaactcttcagcagtctcggctactgtttagtcaagctggacctaccagcatgtctcttcaagctaaaaactggctgcctggaccttgctacagacaacagcgtctgtcaaagcaggcaaacgacaacaacaacagcaactttccctggactgcggctacaaagtatcatctaaatggccgggactcgttggttaatccaggaccagctatggccagccacaaagacgatgaagaaaagtttttccccatgcatggaaccctgatatttggcaaacaaggaacaaatgctaacgacgcggatttggacaatgtcatgattacagatgaagaagaaatccgtaccaccaatcccgtggctacggagcagtacgggactgtgtcaaataatttgcaaaactcaaatactggtccaactactggaactgtcaatcaccaaggagcgttacctggtatggtgtggcaggatcgagacgtgtaccttcagggacccatttgggccaagattcctcacaccgatggacactttcacccttctccgctgatgggaggttttggactcaaacacccgcctcctcagatcatgatcaaaaacactcccgttccagccaatcctcccacaaacttcagttctgccaagtttgcttctttcatcacacagtattccacgggacaggttagcgtggagatcgagtgggagctgcagaaggagaacagcaaacgctggaaccccgagatccagtacacttccaactacaacaagtctgttaatgtggactttactgtggacactaatggtgtgtattcagagcctcgccccattggcaccagatacctgactcgtaatctgtaa

SEQ ID NO: 3703 - DNA, 2208 bp, Artificial Sequence
  Description of Artificial Sequence: Synthetic polynucleotide
atggctgccgatggttatcttccagattggctcgaggacactctctctgaaggaataagacagtggtggaagctcaaacctggcccaccaccgccaaagcccgcagagcggcataaggacgacagcaggggtcttgtgcttcctgggtacaagtacctcggacccttcaacggactcgacaagggagagccggtcaacgaggcagacgccgcggccctcgagcacgacaaggcctacgaccggcagctcgacagcggagacaacccgtacctcaagtacaaccacgccgacgcggagtttcaggagcgccttaaagaagatacgtcttttgggggcaacctcggacgagcagtattccaggcgaaaaagagggttcttgaacctctgggcctggttgaggagcctgttaagacggctccgggaaaaaagaggccggtagagcactctcctgtggagccagactcctcctcgggaaccggaaaagcgggccagcagcctgcgagaaagagattgaattttggtcagactggagacgcagactccgtacctgacccccagcctctcggacagccaccagcagcccccacaagtttgggatctactacaatggctacaggcagtggcgcaccaatggcagacaataacgagggtgccgatggagtgggtaattcctcaggaaattggcattgcgattcccaatggttgggcgacagagtcatcaccaccagcacccgaacctgggccctgcccacctacaacaaccacctctacaagcaaatctccagccaatcaggagccagcaacgacaaccactactttggctacagcaccccctgggggtattttgacttcaacagattccactgccacttttcaccacgtgactggcaaagactcatcaacaacaactggggattccgacccaagagactcaacttcaagctctttaacattcaagtcaaagaggtcacgcagaatgacggtacgacgacgattgccaataaccttaccagcacggttcaggtgtttactgactcggagtaccagctcccgtacgtcctcggctcggcgcatcaaggatgcctcccgccgtttccagcggacgtcttcatggtcccacagtatggatacctcaccctgaacaacgggagtcaggcggtaggacgctcttccttttactgcctggagtactttccttctcagatgcttcgtaccggaaacaactttaccttcagttacacctttgaagacgttcctttccacagcagctacgctcacagtcaaagtctggaccggctgatgaatcctcttatcgaccagtacctgtattatctaaacaaaacacaatcaaatagtggaactcttcagcagtctcggctactgtttagtcaagctggacctaccagcatgtctcttcaagctaaaaactggctgcctggaccttgctacagacaacagcgtctgtcaaagcaggcaaacgacaacaacaacagcaactttccctggactgcggctacaaagtatcatctaaatggccgggactcgttggttaatccaggaccagctatggccagccacaaagacgatgaagaaaagtttttccccatgcatggaaccctgatatttggcaaacaaggaacaaatgctaacgacgcggatttggacaatgtcatgattacagatgaagaagaaatccgtaccaccaatcccgtggctacggagcagtacgggactgtgtcaaataatttgcaaaactcaaatactggtccaactactggaactgtcaatcaccaaggagcgttacctggtatggtgtggcaggatcgagacgtgtaccttcagggacccatttgggccaagattcctcacaccgatggacactttcacccttctccgctgatgggaggttttggactcaaacacccgcctcctcagatcatgatcaaaaacactcccgttccagccaatcctcccacaaacttcagttctgccaagtttgcttctttcatcacacagtattccacgggacaggttagcgtggagatcgagtgggagctgcagaaggagaacagcaaacgctggaaccccgagatccagtacacttccaactacaacaagtctgttaatgtggactttagtgtggacactaatggtgtgtattcagagcctcgccccattggcaccagatacctgactcgtaatctgtaa

SEQ ID NO: 3704 - DNA, 2208 bp, Artificial Sequence
  Description of Artificial Sequence: Synthetic polynucleotide
atggctgccgatggttatcttccagattggctcgaggacactctctctgaaggaataagacagtggtggaagctcaaacctggcccaccaccgccaaagcccgcagagcggcataaggacgacagcaggggtcttgtgcttcctgggtacaagtacctcggacccttcaacggactcgacaagggagagccggtcaacgaggcagacgccgcggccctcgagcacgacaaggcctacgaccggcagctcgacagcggagacaacccgtacctcaagtacaaccacgccgacgcggagtttcaggagcgccttaaagaagatacgtcttttgggggcaacctcggacgagcagtattccaggcgaaaaagagggttcttgaacctctgggcctggttgaggagcctgttaagacggctccgggaaaaaagaggccggtagagcactctcctgtggagccagactcctcctcgggaaccggaaaagcgggccagcagcctgcgagaaagagattgaattttggtcagactggagacgcagactccgtacctgacccccagcctctcggacagccaccagcagcccccacaagtttgggatctactacaatggctacaggcagtggcgcaccaatggcagacaataacgagggtgccgatggagtgggtaattcctcaggaaattggcattgcgattcccaatggttgggcgacagagtcatcaccaccagcacccgaacctgggccctgcccacctacaacaaccacctctacaagcaaatctccagccaatcaggagccagcaacgacaaccactactttggctacagcaccccctgggggtattttgacttcaacagattccactgccacttttcaccacgtgactggcaaagactcatcaacaacaactggggattccgacccaagagactcaacttcaagctctttaacattcaagtcaaagaggtcacgcagaatgacggtacgacgacgattgccaataaccttaccagcacggttcaggtgtttactgactcggagtaccagctcccgtacgtccccggctcggcgcatcaaggatgcctcccgccgtttccagcggacgtcttcatggtcccacagtatggatacctcaccctgaacaacgggagtcaggcggtaggacgctcttccttttactgcctggagtactttccttctcagatgcttcgtaccggaaacaactttaccttcagttgcacctttgaagacgttcctttccacagcagctacgctcacagtcaaagtctggaccggctgatgaatcctcttatcgaccagtacctgtattatctaaacaaaacacaatcaaatagtggaactcttcagcagcctcggctactgtttagtcaagctggacctaccagcatgtctcttcaagctaaaaactggctgcctggaccttgctacagacaacagcgtctgtcaaagcaggcaaacgacaacaacaacagcaactttccctggactgcggctacaaagtatcatctaaatggccgggactcgttggttaatccaggaccagctatggccagccacaaagacgatgaagaaaagtttttccccatgcatggaaccctgatatttggcaaacaaggaacaaatgctaacgacgcggatttggacaatgtcatgattacagatgaagaagaaatccgtaccaccaatcccgtggctacggagcagtacgggactgtgtcaaataatttgcaaaactcaaatactggtccaactactggaactgtcaatcaccaaggagcgttacctggtatggtgtggcaggatcgagacgtgtaccttcagggacccatttgggccaagattcctcacaccgatggacactttcacccttctccgctgatgggaggttttggactcaaacacccgcctcctcagatcatgatcaaaaacactcccgttccagccaatcctcccacaaacttcagttctgccaagtttgcttctttcatcacacagtattccacgggacaggttagcgtggagatcgagtgggagctgcagaaggagaacagcaaacgctggaaccccgagatccagtacacttccaactacaacaagtctgttaatgtggactttactgtggacactaatggtgtgtattcagagcctcgccccattggcaccagatacctgactcgtaatctgtaa

SEQ ID NO: 3705 - DNA, 2208 bp, Artificial Sequence
  Description of Artificial Sequence: Synthetic polynucleotide
atggctgccgatggttatcttccagattggctcgaggacactctctctgaaggaataagacagtggtggaagctcaaacctggcccaccaccgccaaagcccgcagagcggcataaggacgacagcaggggtcttgtgcttcctgggtacaagtacctcggacccttcaacggactcgacaagggagagccggtcaacgaggcagacgccgcggccctcgagcacgacaaggcctacgaccggcagctcgacagcggagacaacccgtacctcaagtacaaccacgccgacgcggagtttcaggagcgccttaaagaagatacgtcttttgggggcaacctcggacgagcagtattccaggcgaaaaagagggttcttgaacctctgggcctggttgaggagcctgttaagacggctccgggaaaaaagaggccggtagagcactctcctgtggagccagactcctcctcgggaaccggaaaagcgggccagcagcctgcgagaaagagattgaattttggtcagactggagacgcagactccgtacctgacccccagcctctcggacagccaccagcagcccccacaagtttgggatctactacaatggctacaggcagtggcgcaccaatggcagacaataacgagggtgccgatggagtgggtaattcctcaggaaattggcattgcgattcccaatggttgggcgacagagtcatcaccaccagcacccgaacctgggccctgcccacctacaacaaccacctctacaagcaaatctccagccaatcaggagccagcaacgacaaccactactttggctacagcaccccctgggggtattttgacttcaacagattccactgccacttttcaccacgtgactggcaaagactcatcgacaacaactggggattccgacccaagagactcaacttcaagctctttaacattcaagtcaaagaggtcacgcagaatgacggtacgacgacgattgccaataaccttaccagcacggttcaggtgtttactgactcggagtaccagctcccgtacgtcctcggctcggcgcatcaaggatgcctcccgccgttttcagcggacgtcttcatggtcccacagtatggatacctcaccctgaacaacgggagtcaggcggtaggacgctcttccttttactgcctggagtactttccttctcagatgcttcgtaccggaaacaactttaccttcagttacacctttgaagacgttcctttccacagcagctacgctcacagtcaaagtctggaccggctgatgaatcctcttatcgaccagtacctgtattatctaaacaaaacacaatcaaatagtggaactcttcagcagtctcggctactgtttagtcaagctggacctaccagcatgtctcttcaagctaaaaactggctgcctggaccttgctacagacaacagcgtctgtcaaagcaggcaaacgacaacaacaacagcaactttccctggactgcggctacaaagtatcatctaaatggccgggactcgttggttaatccaggaccagctatggccagccacaaagacgatgaagaaaagtttttccccatgcatggaaccctgatatttggcaaacaaggaacaaatgctaacgacgcggatttggacaatgtcatgattacagatgaagaagaaatccgtaccaccaatcccgtggctacggagcagtacgggactgtgtcaaataatttgcaaaactcaaatactggtccaactactggaactgtcaatcaccaaggagcgttacctggtatggtgtggcaggatcgagacgtgtaccttcagggacccatttgggccaagattcctcacaccgatggacactttcacccttctccgctgatgggaggttttggactcaaacacccgcctcctcagatcatgatcaaaaacactcccgttccagccaatcctcccgcaaacttcagttctgccaagtttgcttctttcatcacacagtattccacgggacaggttagcgtggagatcgagtgggagctgcagaaggagaacagcaaacgctggaaccccgagatccagtacacttccaactacaacaagtctgttaatgtggactttactgtggacactaatggtgtgtattcagagcctcgccccattggcaccagatacctgactcgtaatctgtaa

SEQ ID NO: 3706 - DNA, 2208 bp, Artificial Sequence
  Description of Artificial Sequence: Synthetic polynucleotide
atggctgccgatggttatcttccagattggctcgaggacactctctctgaaggaataagacagtggtggaagctcaaacctggcccaccaccgccaaagcccgcagagcggcataaggacgacagcaggggtcttgtgcttcctgggtacaagtacctcggacccttcaacggactcgacaagggagagccggtcaacgaggcagacgccgcggccctcgagcacgacaaggcctacgaccggcagctcgacagcggagacaacccgtacctcaagtacaaccacgccgacgcggagtttcaggagcgccttaaagaagatacgtcttttgggggcaacctcggacgagcagtattccaggcgaaaaagagggttcttgaacctctgggcctggttgaggagcctgttaagacggctccgggaaaaaagaggccggtagagcactctcctgtggagccagactcctcctcgggaaccggaaaagcgggccagcagcctgcgagaaagagattgaattttggtcagactggagacgcagactccgtacctgacccccagcctctcggacagccaccagcagcccccacaagtttgggatctactacaatggctacaggcagtggcgcaccaatggcagacaataacgagggtgccgatggagtgggtaattcctcaggaaattggcattgcgattcccaatggttgggcgacagagtcatcaccaccagcacccgaacctgggccctgcccacctacaacaaccacctctacaagcaaatctccagccaatcaggagccagcaacgacaaccactactttggctacagcaccccctgggggtattttgacttcaacagattccactgccacttttcaccacgtgactggcaaagactcatcaacaacaactggggattccgacccaagagactcaacttcaagctctttaacattcaagtcaaagaggtcacgcagaatgacggtacgacgacgattgccaataaccttaccggcacggttcaggtgtttactgactcggagtaccagctcccgtacgtcctcggctcggcgcatcaaggatgcctcccgccgtttccagcggacgtcttcatggtcccacagtatggatacctcaccctgaacaacgggagtcaggcggtaggacgctcttccttttactgcctggagtactttccttctcagatgcttcgtaccggaaacaactttaccttcagttacacctttgaagacgttcctttccacagcagctacgctcacagtcaaagtctggaccggctgatgaatcctcttatcgaccagtacctgtattatctaaacaaaacacaatcaaatagtggaactcttcagcagtctcggctactgtttagtcaagctggacctaccagcatgtctcttcaagctaaaaactggctgcctggaccttgctacagacaacagcgtctgtcaaagcaggcaaacgacaacaacaacagcaactttccctggactgcggctacaaagtatcatctaaatggccgggactcgttggttaatccaggaccagctatggccagccacaaagacgatgaagaaaagtttttccccatgcatggaaccctgatatttggcaaacaaggaacaaatgctaacgacgcggatttggacaatgtcatgattacagatgaagaagaaatccgtaccaccaatcccgtggctacggagcagtacgggactgtgtcaaataatttgcaaaactcaaatactggtccaactactggaactgtcaatcaccaaggagcgttacctggtatggtgtggcaggatcgagacgtgtaccttcagggacccatttgggccaagattcctcacaccgatggacactttcacccttctccgctgatgggaggttttggactcaaacacccgcctcctcagatcatgatcaaaaacactcccgttccagccaatcctcccacaaacttcagttctgccaagtttgcttctttcatcacacagtattccacgggacaggttagcgtggagatcgagtgggagctgcagaaggagaacagcaaacgctggaaccccgagatccagtacacttccaactacaacaagtctgttaatgtggactttactgtggacactaatggtgtgtattcagagcctcgccccattggcaccagatacctgactcgtaatctgtaa

SEQ ID NO: 3707 - DNA, 2208 bp, Artificial Sequence
  Description of Artificial Sequence: Synthetic polynucleotide
atggctgccgatggttatcttccagattggctcgaggacactctctctgaaggaataagacagtggtggaagctcaaacctggcccaccaccgccaaagcccgcagagcggcataaggacgacagcaggggtcttgtgcttcctgggtacaagtacctcggacccttcaacggactcgacaagggagagccggtcaacgaggcagacgccgcggccctcgagcacgacaaggcctacgaccggcagctcgacagcggagacaacccgtacctcaagtacaaccacgccgacgcggagtttcaggagcgccttaaagaagatacgtcttttgggggcaacctcggacgagcagtattccaggcgaaaaagagggttcttgaacctctgggcctggctgaggagcctgttaagacggctccgggaaaaaagaggccggtagagcactctcctgtggagccagactcctcctcgggaaccggaaaagcgggccagcagcctgcgagaaagagattgaattttggtcagactggagacgcagactccgtacctgacccccagcctctcggacagccaccagcagcccccacaagtttgggatctactacaatggctacaggcagtggcgcaccaatggcagacaataacgagggtgccgatggagtgggtaattcctcaggaaattggcattgcgattcccaatggttgggcgacagagtcatcaccaccagcacccgaacctgggccctgcccacctacaacaaccacctctacaagcaaatctccagccaatcaggagccagcaacgacaaccactactttggctacagcaccccctgggggtattttgacttcaacagattccactgccacttttcaccacgtgactggcaaagactcatcaacaacaactggggattccgacccaagagactcaacttcaagctctttaacattcaagtcaaagaggtcacgcagaatgacggtacgacgacgattgccaataaccttaccagcacggttcaggtgtttactgactcggagtaccagctcccgtacgtcctcggctcggcgcatcaaggatgcctcccgccgtttccagcggacgtcttcatggtcccacagtatggatacctcaccctgaacaacgggagtcaggcggtaggacgctcttccttttactgcctggagtactttccttctcagatgcttcgtaccggaaacaactttaccttcagttacacctttgaagacgttcctttccacagcagctacgctcacagtcaaagtctggaccggctgatgaatcctcttatcgaccagtacctgtattatctaaacaaaacacaatcaaatagtggaactcttcagcagtctcggctactgtttagtcaagctggacctaccagcatgtctcttcaagctaaaaactggctgcctggaccttgctacagacaacagcgtctgtcaaagcaggcaaacgacaacaacaacagcaactttccctggactgcggctacaaagtatcatctaaatggccgggactcgttggttaatccaggaccagctatggccagccacaaagacgatgaagaaaagtttttccccatgcatggaaccctgatatttggcaaacaaggaacaaatgctaacgacgcggatttggacaatgtcatgattacagatgaagaagaaatccgtaccaccaatcccgtggctacggagcagtacgggactgtgtcaaataatttgcaaaactcaaatactggtccaactactggaactgtcaatcaccaaggagcgttacctggtatggtgtggcaggatcgagacgtgtaccttcagggacccatttgggccaagattcctcacaccgatggacactttcacccttctccgctgatgggaggttttggactcaaacacccgcctcctcagatcatgatcaaaaacactcccgttccagccaatcctcccacaaacttcagttctgccaagtttgcttctttcatcacacagtattccacgggacaggttagcgtggagatcgagtgggagctgcagaaggagaacagcaaacgctggaaccccgagatccagtacacttccaactacaacaagtctgttaatgtggactttactgtggacactaatggtgtgtattcagagcctcgccccattggcaccagatacctgactcgtaatctgtaa

SEQ ID NO: 3708 - DNA, 2208 bp, Artificial Sequence; identical to SEQ ID NO: 3637
  Description of Artificial Sequence: Synthetic polynucleotide

SEQ ID NO: 3709 - DNA, 2208 bp, Artificial Sequence
  Description of Artificial Sequence: Synthetic polynucleotide
atggctgccgatggttatcttccagattggctcgaggacactctctctgaaggaataagacagtggtggaagctcaaacctggcccaccaccaccaaggcccgcagagcggcatcaggacgacagcaggggtcttgtgcttcctgggtacaagtacctcggacccttcaacggactcgacaaaggagagccggtcaacgaggcagacgctgcggccctcgagcacgacaaggcctacgaccggcagctcgacagcggagacaacccgtacctcaagtacaaccacgccgacgcggagtttcaggagcgtcttaaagaagatacgtcttttgggggcaacctcggacgagcagtcttccaggcgaaaaagagggttcttgaacctctgggcctggttgaggaacctgttaagacggctccgggaaaaaagaggccggtagagcactctcctgcggagccagactcctcctcgggaaccggaaaagcgggccagcagcctgcaagaaagagattgaatttcggtcagactggagacgcagactccgtacctgacccccagcctctcggacagccaccagcagcccccacaagtttgggatctactacaatggctacaggcagtggcgcaccaatggcagacaataacgagggtgccgatggagtgggtaattcctcaggaaattggcattgcgattcccaatggctgggcgacagagtcatcaccaccagcacccgaacctgggccctgcccacctacaacaaccacctctacaagcaaatctccagccaatcaggagcatcgaacgacaaccactactttggctacagcaccccttgggggtattttgacttcaacagattccactgtcacttctccccacgtgactggcaaagactcatcaacaacaactggggattccgacccaagagactcaacttcaagctctttaacattcaagtcaaagaggtcacgcagaatgacggtacgacgacgattgccaataaccttaccagcacggttcaggtgtttactgactcggagtaccagctcccgtacgtcctcggctcggcgcatcaaggatgcctcccgccgtttccagcggacgtcttcatggtcccacagtatggatacctcaccctgaacaacgggagtcaggcggtaggacgctcttccttttactgcctggagtactttccttctcagatgctgcgtaccggaaacaactttaccttcagctacacctttgaggacgtgcccttccacagcagctacgctcacagccagagtttggaccggctgatgaatcctctgatcgaccagtatctgtattatctgaacaggacacaatcaaatagtggaactcttcagcagtctaggctactgtttagccaagctggacccaccagcatgtcccttcaagctaaaaactggctgcctggaccttgctacagacagcagcgtctgtcaaagcaggcaaacgacaacaacaacagcaactttccctggactgcggctacaaagtatcatctaaatggtcgggactcgttggttaatccaggaccagctatggccagccacaaagacgatgaagaaaagtttttccccatgcatggaaccctgatatttggtaaacaaggaacaaatgctaacgacgcggatttggaacatgtcatgattacaggtgaagaagaaatcaggaccaccaatcccgtggctacagagcagtacggaaacgtgtcaaataatttgcaaaactcaaatactggtccaactacagaaaatgtcaatcaccagggagcgttacctggtatggtgtggcaggatcgagacgtgtacctgcagggacccatttgggccaagattcctcacaccgacggacactttcacccttctccactgatgggaggttttggactcaaacacccgcctcctcaaatcatgatcaaaaacactcctgttccagccaatcctcctacaaacttcagcgcggcaaagtttgcttccttcatcacacagtattccacgggacaggtcagcgtggagatcgagtgggagctgcagaaggagaacagcaaacgctggaaccccgagatccagtacacttccaactacaacaaatctgttaatgtggactttactgtggacgctaatggtgtgtattcagagcctcgccccattggcaccagatacctgactcgtaatctgtaa

SEQ ID NO: 3710 - DNA, 2208 bp, Artificial Sequence
  Description of Artificial Sequence: Synthetic polynucleotide
atggctgccgatggttatcttccagattggctcgaggacactctctctgaaggaataagacagtggtggaagctcaaacctggcccaccaccaccaaggcccgcagagcggcatcaggacgacagcaggggtcttgtgcttcctgggtacaagtacctcggacccttcaacggactcgacaaaggagagccggtcaacgaggcagacgctgcggccctcgagcacgacaaggcctacgaccggcagctcgacagcggagacaacccgtacctcaagtacaaccacgccgacgcggagtttcaggagcgtcttaaagaagatacgtcttttgggggcaacctcggacgagcagtcttccaggcgaaaaagagggttcttgaacctctgggcctggttgaggaacctgttaagacggctccgggaaaaaagaggccggtagagcactctcctgcggagccagactcctcctcgggaaccggaaaagcgggccagcagcctgcaagaaagagattgaatttcggtcagactggagacgcagactccgtacctgacccccagcctctcggacagccaccagcagcccccacaagtttgggatctactacaatggctacaggcagtggcgcaccaatggcagacaataacgagggtgccgatggagtgggtaattcctcaggaaattggcattgcgattcccaatggctgggcgacagagtcatcaccaccagcacccgaacctgggccctgcccacctacaacaaccacctctacaagcaaatctccagccaatcaggagcatcgaacgacaaccactactttggctacagcaccccyttggggtattttgacttcaacagattccactgtcacttctccccacgtgactggcaaagactcatcaacaacaactggggattccgacccaagagactcaacttcaagctctttaacattcaagtcaaagaggtcacgcagaatgacggtacgacgacgattgccaataaccttaccagcacggttcaggtgtttactgactcggagtaccagctcccgtacgtcctcggctcggcgcatcaaggatgcctcccgccgtttccagcggacgtcttcatggtcccacagtatggatacctcaccctgaacaacgggagtcaggcggtaggacgctcttccttttactgcctggagtactttccttctcagatgctgcgtaccggaaacaactttaccttcagctacacctttgaggacgtgcccttccacagcagctacgctcacagccagagtttggaccggctgatgaatcctctgatcgaccagtatctgtattatctgaacaggacacaatcaaatagtggaactcttcagcagtctaggctactgtttagccaagctggacccaccagcatgtcccttcaagctaaaaactggctgcctggaccttgctacagacagcagcgtctgtcaaagcaggcaaacgacaacaacaacagcaactttccctggactgcggctacaaagtatcatctaaatggtcgggactcgttggttaatccaggaccagctatggccagccacaaagacgatgaagaaaagtttttccccatgcatggaaccctgatatttggtaaacaaggaacaaatgctaacgacacggatttggaacatgtcatgattacagatgaagaagaaatcaggaccaccaatcccgtggctacagagcagtacggaaacgtgtcaaataatttgcaaaactcaaatactggtccaactacagaaaatgtcaatcaccagggagcgttacctggtatggtgtggcaggatcgagacgtgtacctgcagggacccatttgggccaagattcctcacaccgacggacactttcacccttctccactgatgggaggttttggactcaaacacccgcctcctcaaatcatgatcaaaaacactcctgttccagccaatcctcctacaaacttcagcgcggcaaagtttgcttccttcatcacacagtattccacgggacaggtcagcgtggagatcgagtgggagctgcagaaggagaacagcaaacgctggaaccccgagatccagtacacttccaactacaacaaatctgttaatgtggactttactgtggacgctaatggtgtgtattcagagcctcgccccattggcaccagatacctgactcgtaatctgtaa

SEQ ID NO: 3711 - DNA, 2208 bp, Artificial Sequence
  Description of Artificial Sequence: Synthetic polynucleotide
atggctgccgatggttatcttccagattggctcgaggacactctctctgaaggaataagacagtggtggaagctcaaacctggcccaccaccaccaaggcccgcagagcggcatcaggacgacagcaggggtcttgtgcttcctgggtacaagtacctcggacccttcaacggactcgacaaaggagagccggtcaacgaggcagacgctgcggccctcgagcacgacaaggcctacgaccggcagctcgacagcggagacaacccgtacctcaagtacaaccacgccgacgcggagtttcaggagcgtcttaaagaagatacgtcttttgggggcaacctcggacgagcagtcttccaggcgaaaaagagggttcttgaacctctgggcctggttgaggaacctgttaagacggctccgggaaaaaagaggccggtagagcactctcctgcggagccagactcctcctcgggaaccggaaaagcgggccagcagcctgcaagaaagagattgaatttcggtcagactggagacgcagactccgtacctgacccccagcctctcggacagccaccagcagcccccacaagtttgggatctactacaatggctacaggcagtggcgcaccaatggcagacaataacgagggtgccgatggagtgggtaattcctcaggaaattggcattgcgattcccaatggctgggcgacagagtcatcaccaccagcacccgaacctgggccctgcccacctacaacaaccacctctacaagcaaatctccagccaatcaggagcatcgaacgacaaccactactttggctacagcaccccttgggggtattttgacttcaacagattccactgtcacttctccccacgtgactggcaaagactcatcaacaacaactggggattccgacccaagagactcaacttcaagctctttaacattcaagtcaaagaggtcacgcagaatgacggtacgacgacgattgccaataaccttaccagcacggttcaggtgtttactgactcggagtaccagctcccgtacgtcctcggctcggcgcatcaaggatgcctcccgccgtttccagcggacgtcttcatggtcccacagtatggatacctcaccctgaacaacgggagtcaggcggtaggacgctcttccttttactgcctggagtactttccttctcagatgctgcgtaccggaaacaactttaccttcagctacacctttgaggacgtgcccttccacagcagctacgctcacagccagagtttggaccggctgatgaatcctctgatcgaccagtatctgtattatctgaacaggacacaatcaaatagtggaactcttcagcagtctaggctactgtttagccaagctggacccaccagcatgtcccttcaagctaaaaactggctgcctggaccttgctacagacagcagcgtctgtcaaagcaggcaaacgacaacaacaacagcaactttccctggactgcggctacaaagtatcatctaaatggtcgggactcgttggttaatccaggaccagctatggccagccacaaagacgatgaagaaaagtttttccccatgcatggaaccctgatatttggtaaacaaggaacaaatgctaacgacgcggatttggaacgtgtcatgattacagatgaagaagaaatcaggaccaccaatcccgtggctacagagcagtacggaaacgtgtcaaataatttgcaaaactcaaatactggtccaactacagaaaatgtcaatcaccagggagcgttacctggtatggtgtggcaggatcgagacgtgtacctgcagggacccatttgggccaagattcctcacgccgacggacactttcacccttctccactgatgggaggttttggactcaaacacccgcctcctcaaatcatgatcaaaaacactcctgttccagccaatcctcctacaaacttcagcgcggcaaagtttgcttccttcatcacacagtattccacgggacaggtcagcgtggagatcgagtgggagctgcagaaggagaacagcaaacgctggaaccccgagatccagtacacttccaactacaacaaatctgttaatgtggactttactgtggacgctaatggtgtgtattcagagcctcgccccattggcaccagatacctgactcgtaatctgtaa

SEQ ID NO: 3712 - DNA, 2208 bp, Artificial Sequence
  Description of Artificial Sequence: Synthetic polynucleotide
atggctgccgatggttatcttccagattggctcgaggacactctctctgaaggaataagacagtggtggaagctcaaacctggcccaccaccaccaaggcccgcagagcggcatcaggacgacagcaggggtcttgtgcttcctgggtacaagtacctcggacccttcaacggactcgacaaaggagagccggtcaacgaggcagacgctgcggccctcgagcacgacaaggcctacgaccggcagctcgacagcggagacaacccgtacctcaagtacaaccacgccgacgcggagtttcaggagcgtcttaaagaagatacgtcttttgggggcaacctcggacgagcagtcttccaggcgaaaaagagggttcttgaacctctgggcctggttgaggaacctgttaagacggctccgggaaaaaagaggccggtagagcactctcctgcggagccagactcctcctcgggaaccggaaaagcgggccagcagcctgcaagaaagagattgaatttcggtcagactggagacgcagactccgtacctgacccccagcctctcggacagccaccagcagcccccacaagtttgggatctactacaatggcaacaggcagtggcgcaccaatggcagacaataacgagggtgccgatggagtgggtaattcctcaggaaattggcattgcgattcccaatggctgggcgacagagtcatcaccaccagcacccgaacctgggccctgcccacctacaacaaccacctctacaagcaaatctccagccaatcaggagcatcgaacgacaaccactactttggctacagcaccccttgggggtattttgacttcaacagattccactgtcacttctccccacgtgactggcaaagactcatcaacaacaactggggattccgacccaagagactcaacttcaagctctttaacattcaagtcaaagaggtcacgcagaatgacggtacgacgacgattgccaataaccttaccagcacggttcaggtgtttactgactcggagtaccagctcccgtacgtcctcggctcggcgcatcaaggatgcctcccgccgtttccagcggacgtcttcatggtcccacagtatggatacctcaccctgaacaacgggagtcaggcggtaggacgctcttccttttactgcctggagtactttccttctcagatgctgcgtaccggaaacaactttaccttcagctacacctttgaggacgtgcccttccacagcagctacgctcacagccagagtttggaccggctgatgaatcctctgatcgaccagtatctgtattatctgaacaggacacaatcaaatagtggaactcttcagcagtctaggctactgtttagccaagctggacccaccagcatgtcccttcaagctaaaaactggctgcctggaccttgctacagacagcagcgtctgtcaaagcaggcaaacgacaacaacaacagcaactttccctggactgcggctacaaagtatcatctaaatggtcgggactcgttggttaatccaggaccagctatggccagccacaaagacgatgaagaaaagtttttccccatgcatggaaccctgatatttggtaaacaaggaacaaatgctaacgacgcggatttggaacatgtcatgattacagatgaagaagaaatcaggaccaccaatcccgtggctacagagcagtacggaaacgtgtcaaataatttgcaaaactcaaatactggtccaactacagaaaatgtcaatcaccagggagcgttacctggtatggtgtggcaggatcgagacgtgtacctgcagggacccatttgggccaagattcctcacaccgacggacactttcacccttctccactgatgggaggttttggactcaaacacccgcctcctcaaatcatgatcaaaaacactcctgttccagccaatcctcctacaaacttcagcgcggcaaagtttgcttccttcatcacacggtattccacgggacaggtcagcgcggagatcgagtgggagctgcagaaggagaacagcaaacgctggaaccccgagatccagtacacttccaactacaacaaatctgttaatgtggactttactgtggacgctaatggtgtgtattcagagcctcgccccattggcaccagatacctgactcgtaatctgtaa

SEQ ID NO: 3713 - DNA, 2208 bp, Artificial Sequence
  Description of Artificial Sequence: Synthetic polynucleotide
atggctgccgatggttatcttccagattggctcgaggacattctctctgaaggaataagacagtggtggaagctcaaacctggcccaccaccaccaaagcccgcagagcggcataaggacgacagcaggggtcttgtgcttcctgggtacaagtacctcggacccttcaacggactcgacaaaggagagccggtcaacgaggcagacgccgcggccctcgagcacgacaaggcctacgaccggcagctcgacagcggagacaacccgtacctcaagtacaaccacgccgacgcggagtttcaggagcgtcttaaagaagatacgtcttttgggggcaacctcggacgagcagtcttccaggcaaaaaagagggttcttgaacctctgggcctggttgaggaacctgttaagacggctccgggaaaaaagaggccggtagagcaatctcctgcggagccagactcctcctcgggaaccggaaaggcgggcaaccagcctgcaagaaagagattgaattttggtcagactggagacgcagactccgtacctgacccccagcctctcggacagccaccagcagccccctctggtctgggatctactacaatggctacaggcagtggcgcaccaatggcagacaataacgagggtgccgatggagtgggtaattcctcaggaaattggcattgcgattcccaatggttgggcgacagagtcatcaccaccagcacccgaacctgggccctgcccacctacaacaatcacctctacaagcaaatctccagccaatcaggagcagcgaacgacaaccactactttggctacagcaccccctgggggtattttgacttcaacagattccactgccacttttcaccacgtgactggcaaagactcatcaacaacaactggggattccgacccaaaagactcaacttcaagctctttaacattcaagtcaaagaggtcacgcagaatgacggtacgacgacgattgccaataaccttaccagcacggttcaggtgtttactgactcggagtaccagctcccgtacgtcctcggctcggcgcatcaaggatgcctcccgccgtttccagcggacgtcttcatggtcccacagtatggatacctcaccctgaacaacgggagtcaggcggtaggacgctcttccttttactgcctggagtactttccttctcagatgcttcgtaccggaaacaactttaccttcagttacacctttgaagacgttcctttccacagcagctacgctcacagtcaaagtctggaccggctgatgaatcctctgatagaccagtacctgcattatctaaacaaaacacaatcaaatagtggaactcttcagcagtctcggctactgtttagtcaagctggacccaccagcatgtctcttcaagctaaaaactggctgcctggaccttgctacagacaacagcgtctgtcaaagcaggcaaacgacaacaacaacagcaactttccctggactgcggctacaaagtatcatctaaatggccgggactcgttggttaatccaggaccagctatggccagccacaaagacgatgaagaaaagtttttccccatgcatggaaccctgatatttggtaaacaaggaacaaatgctaacgacgcggatttggacaatgtcatgattacagatgaagaagaaatccgcaccaccaatcccgtggctacggagcagtacgggactgtgtcaaataatttgcaaaactcaaatactggtccaactactggaactgtcaatcaccaaggagcgttacctggtatggtgtggcaggatcgagacgtgtaccttcagggacccatttgggccaagattcctcacaccgatggacactttcatccttctccactgatgggaggttttggactcaaacacccgcctcctcagatcatgatcaaaaacactcccgttccagccaatcctcctacaaacttcagttctgccaagtttgcttctttcatcacacagtattccacggggcaggtcagcgtggagatagagtgggagctgcagaaggagaacagcaaacgctggaaccccgagatccagtatacttccaactacaacaagtctgttaatgtggactttactgtggacactaatggtgtgtattcagagcctcgccccattggcaccagatacctgactcgtaatctgtaa

SEQ ID NO: 3714 - DNA, 2208 bp, Artificial Sequence
  Description of Artificial Sequence: Synthetic polynucleotide
atggctgccgatggttatcttccagattggctcgaggacactctctctgaaggaataagacagtggtggaagctcaaacctggcccaccaccaccaaggcccgcagagcggcatcaggacgacagcaggggtcttgtgcttcctgggtacaagtacctcggacccttcaacggactcgacaaaggagagccggtcaacgaggcagacgctgcggccctcgagcacgacaaggcctacgaccggcagctcgacagcggagacaacccgtacctcaagtacaaccacgccgacgcggagtttcaggagcgtcttaaagaagatacgtcttttgggggcaacctcggacgagcagtcttccaggcgaaaaagagggttcttgaacctctgggcctggttgaggaacctgttaagacggctccgggaaaaaagaggccggtagagcactctcctgcggagccagactcctcctcgggaaccggaaaagcgggccagcagcctgcaagaaagagattgaatttcggtcagactggagacgcagactccgtacctgacccccagcctctcggacagccaccagcagcccccacaagtttgggatctactacaatggctacaggcagtggcgcaccaatggcagacaataacgagggtgccgatggagtgggtaattcctcaggaaattggcattgcgattcccaatggctgggcgacagagtcatcaccaccagcacccgaacctgggccctgcccacctacaacaaccacctctacaagcaaatctccagccaatcaggagcatcgaacgacaaccactactttggctacagcaccccttgggggtattttgacttcaacagattccactgtcacttctccccacgtgactggcaaagactcatcaacaacaactggggattccgacccaagagactcaacttcaagctctttaacattcaagtcaaagaggtcacgcagaatgacggtacgacgacgattgccaataaccttaccagcacggttcaggtgtttactgactcggagtaccagctcccgtacgtcctcggctcggcgcatcaaggatgcctcccgccgtttccagcggacgtcttcatggtcccacagtatggatacctcaccctgaacaacgggagtcaggcggtaggacgctcttccttttactgcctggagtactttccttctcagatgctgcgtaccggaaacaactttaccttcagctacacctttgaggacgtgcccttccacagcagctacgctcacagccagagtttggaccggctgatgaatcctctgatcgaccagtatctgtattatctgaacaggacacaatcaaatagtggaactcttcagcagtctaggctactgtttagccaagctggacccaccagcatgtcccttcaagctaaaaactggctgcctggaccttgctacagacagcagcgtctgtcaaagcaggcaaacgacaacaacaacagcaactttccctggactgcggctacaaagtatcatctaaatggtcgggactcgttggttaatccaggaccagctatggccagccacaaagacgatgaagaaaagtttttccccatgcatggaaccctgatatttggtaaacaaggaacaaatgctaacgacgcggatttggaacatgtcatgattacagatgaagaagaaatcaggaccaccaatcccgtggctacagagcagtacggaaacgtgtcaaataatttgcaaaactcaaatactggtccgactacagaaaatgtcaatcgccagggagcgttacctggtatggtgtggcaggatcgagacgtgtacctgcagggacccatttgggccaagattcctcacaccgacggacactttcacccttctccactgatgggaggttttggactcaaacacccgcctcctcaaatcatgatcaaaaacactcctgttccagccaatcctcctacaaacttcagcgcggcaaagtttgcttccttcatcacacagtattccacgggacaggtcagcgtggagatcgagtgggagctgcagaaggagaacagcaaacgctggaaccccgagatccagtacacttccaactacaacaaatctgttaatgtggactttactgtggacgctaatggtgtgtattcagagcctcgccccattggcaccagatacctgactcgtaatctgtaa

SEQ ID NO: 3715 - DNA, 2208 bp, Artificial Sequence
  Description of Artificial Sequence: Synthetic polynucleotide
atggctgccgatggttatcttccagattggctcgaggacactctctctgaaggaataagacagtggtggaagctcaaacctggcccaccaccaccaaggcccgcagagcggcatcaggacgacagcaggggtcttgtgcttcctgggtacaagtacctcggacccttcaacggactcgacaaaggagagccggtcaacgaggcagacgctgcggccctcgagcacgacaaggcctacgaccggcagctcgacagcggagacaacccgtacctcaagtacaaccacgccgacgcggagtttcaggagcgtcttaaagaagatacgtcttttgggggcaacctcggacgagcagtcttccaggcgaaaaagagggttcttgaacctctgggcctggttgaggaacctgttaagacggctccgggaaaaaagaggccggtagagcactctcctgcggagccagactcctcctcgggaaccggaaaagcgggccagcagcctgcaagaaagagattgaatttcggtcagactggagacgcagactccgtacctgacccccagcctctcggacagccaccagcagcccccacaagtttgggatctactacaatggctacaggcagtggcgcaccaatggcagacaataacgagggtgccgatggagtgggtaattcctcaggaaattggcattgcgattcccaatggctgggcgacagagtcatcaccaccagcacccgaacctgggccctgcccacctacaacaaccacctctacaagcaaatctccagccaatcaggagcatcgaacgacaaccactactttggctacagcaccccttgggggtattttgacttcaacagattccactgtcacttctccccacgtgactggcaaagactcatcaacaacaactggggattccgacccaagagactcaacttcaagctctttaacattcaagtcaaagaggtcacgcagaatgacggtacgacgacgattgccaataaccttaccagcacggttcaggtgtttactgactcggagtaccagctcccgtacgtcctcggctcggcgcatcaaggatgcctcccgccgtttccagcggacgtcttcatggtcccacagtatggatacctcaccctgaacaacgggagtcaggcggtaggacgctcttccttttactgcctggagtactttccttctcagatgctgcgtaccggaaacaactttaccttcagctacacctttgaggacgtgcccttccacagcagctacgctcacagccagagtttggaccggctgatgaatcctctgatcgaccagtatctgtattatctgaacaggacacaatcaaatagtggaactcttcagcagtctaggctactgtttagccaagctgcacccaccagcatgtcccttcaagctaaaaactggctgcctggaccttgctacagacagcagcgtctgtcaaagcaggcaaacgacaacaacaacagcaactttccctggactgcggctacaaagtatcatctaaatggtcgggactcgttggttaatccaggaccagctatggccagccacaaagacgatgaagaaaagtttttccccatgcatggaaccctgatatttggtaaacaaggaacaaatgctaacgacacggatttggaacatgtcatgattacagatgaagaagaaatcaggaccaccaatcccgtggctacagagcagtacggaaacgtgtcaaataatttgcaaaactcaaatactggtccaactacagaaaatgtcaatcaccagggagcgttacctggtatggtgtggcaggatcgagacgtgtacctgcagggacccatttgggccaagattcctcacaccgacggacactttcacccttctccactgatgggaggttttggactcaaacacccgcctcctcaaatcatgatcaaaaacactcctgttccagccaatcctcctacaaacttcagcgcggcaaagtttgcttccttcatcacacagtattccacgggacaggtcagcgtggagatcgagtgggagctgcagaaggagaacagcaaacgctggaaccccgagatccagtacacttccaactacaacaaatctgttaatgtggactttactgtggacgctaatggtgtgtattcagagcctcgccccattggcaccagatacctgactcgtaatctgtaa

SEQ ID NO: 3716 - DNA, 2208 bp, Artificial Sequence
  Description of Artificial Sequence: Synthetic polynucleotide
atggctgccgatggttatcttccagattggctcgaggacattctctctgaaggaataagacagtggtggaagctcaaacctggcccaccaccaccaaagcccgcagagcggcataaggacgacagcaggggtcttgtgcttcctgggtacaagtacctcggacccttcaacggactcgacaaaggagagccggtcaacgaggcagacgccgcggccctcgagcacgacaaggcctacgaccggcagctcgacagcggagacaacccgtacctcaagtacaaccacgccgacgcggagtttcaggagcgtcttaaagaagatacgtcttttgggggcaacctcggacgagcagtcttccaggcaaaaaagagggttcttgaacctctgggcctggttgaggaacctgttaagacggctccgggaaaaaagaggccggtagagcaatctcctgcggagccagactcctcctcgggaaccggaaaggcgggcaaccagcctgcaagaaagagattgaattttggtcagactggagacgcagactccgtacctgacccccagcctctcggacagccaccagcagccccctctggtctgggatctactacaatggctacaggcagtggcgcaccaatggcagacaataacgagggtgccgatggagtgggtaattcctcaggaaattggcattgcgattcccaatggttgggcgacagagtcatcaccaccagcacccgaacctgggccctgcccacctacaacaatcacctctacaagcaaatctccagccaatcaggagcagcgaacgacaaccactactttggctacagcaccccctgggggtattttgacttcaacagattccactgccacttttcaccacgtgactggcaaagactcatcaacaacaactggggattccgacccaaaagactcaacttcaagctctttaacattcaagtcaaagaggtcacgcagaatgacggtacgacgacgattgccaataaccttaccagcacggttcaggtgtttactgactcggagtaccagctcccgtacgtcctcggctcggcgcatcaaggatgcctcccgccgtttccagcggacgtcttcatggtcccacagtatggatacctcaccctgaacaacgggagtcaggcggtaggacgctcttccttttactgcctggagtactttccttctcagatgcttcgtaccggaaacaactttaccttcagttacacctttgaagacgttcctttccacagcagctacgctcacagtcaaagtctggaccggctgatgaatcctctgatagaccagtacctgtattatctaaacaaaacacaatcaaatagtggaactcttcagcagtctcggctactgtttagtcaagctggacccaccagcatgtctcttcaagctaaaaactggctgcctggaccttgctacagacaacagcgtctgtcaaagcaggcaaacgacaacaacaacagcaactttccctggactgcggctacaaagtatcatctaaatggccgggactcgttggttaatccaggaccagctatggccagccacaaagacgatgaagaaaagtttttccccatgcatggaaccctgatatttggtaaacaaggaacaaatgctaacgacgcggatttggacaatgtcatgattacagatgaagaagaaatccgcaccaccaatcccgtggctacggagcagtacgggactgtgtcaaataatttgcaaaactcaaatactggtccaactactggaactgtcaatcaccaaggagcgttacctggtatggtgtggcaggatcgagacgtgtaccttcagggacccatttgggccaagattcctcacaccgatggacactttcatccttctccactgatgggaggttttggactcaaacacccgcctcctcagatcatgatcaaaaacactcccgttccagccaatcctcctacaaacttcagttctgccaagtttgcttctttcgtcacacagtattccacggggcaggtcagcgtggagatagagtgggagctgcagaaggagaacagcaaacgctggaaccccgagatccagtatacttccaactacaacaagtctgttaatgtggactttactgtggacactaatggtgtgtattcagagcctcgccccattggcaccagatacctgactcgtaatctgtaa

SEQ ID NO: 3717 - DNA, 2208 bp, Artificial Sequence
  Description of Artificial Sequence: Synthetic polynucleotide
atggctgccgatggttatcttccagattggctcgaggacactctctctgaaggaataagacagtggtggaagctcaaacctggcccaccaccaccaaggcccgcagagcggcatcaggacgacagcaggggtcttgtgcttcctgggtacaagtacctcggacccttcaacggactcgacaaaggagagccggtcaacgaggcagacgctgcggccctcgagcacgacaaggcctacgaccggcagctcgacagcggagacaacccgtacctcaagtacaaccacgccgacgcggagtttcaggagcgtcttaaagaagatacgtcttttgggggcaacctcggacgagcagtcttccaggcgaaaaagagggttcttgaacctctgggcctggttgaggaacctgttaagacggctccgggaaaaaagaggccggtagagcactctcctgcggagccagactcctcctcgggaaccggaaaagcgggccagcagcctgcaagaaagagattgaatttcggtcagactggagacgcagactccgtacctgacccccagcctctcggacagccaccagcagcccccacaagtttgggatctactacaatggctacaggcagtggcgcaccaatggcagacaataacgagggtgccgatggagtgggtaattcctcaggaaattggcattgcgattcccaatggctgggcgacagagtcatcaccaccagcacccgaacctgggccctgcccacctacaacaaccacctctacaagcaaatctccagccaatcaggagcatcgaacgacaaccactactttggctacagcaccccttgggggtattttgacttcaacagattccactgtcacttctccccacgtgactggcaaagactcatcaacaacaactggggattccgacccaagagactcaacttcaagctctttaacattcaagtcaaagaggtcacgcagaatgacggtacgacgacgattgccaataaccttaccagcacggttcaggtgtttactgactcggagtaccagctcccgtacgccctcggctcggcgcatcaaggatgcctcccgccgtttccagcggacgtcttcatggtcccacagtatggatacctcaccctgaacaacgggagtcaggcggtaggacgctcttccttttactgcctggagtactttccttctcagatgctgcgtaccggaaacaactttaccttcagctacacctttgaggacgtgcccttccatagcagctacgctcacagccagagtttggaccggctgatgaatcctctgatcgaccagtatctgtattatctgaacaggacacaatcaaatagtggaactcttcagcagtctaggctactgtttagccaagctggacccaccagcatgtcccttcaagctaaaaactggctgcctggaccttgctacagacagcagcgtctgtcaaagcaggcaaacgacaacaacaacagcaactttccctggactgcggctacaaagtatcatctaaatggtcgggactcgttggttaatccaggaccagctatggccagccacaaagacgatgaagaaaagtttttccccatgcatggaaccctgatatttggtaaacaaggaacaaatgctaacgacacggatttggaacatgtcatgattacagatgaagaagaaatcaggaccaccaatcccgtggctacagagcagtacggaaacgtgtcaaataatttgcaaaactcaaatactggtccaactacagaaaatgtcaatcaccagggagcgttacctggtatggtgtggcaggatcgagacgtgtacctgcagggacccatttgggccaagattcctcacaccgacggacactttcacccttctccactgatgggaggttttggactcaaacacccgcctcctcaaatcatgatcaaaaacactcctgttccagccaatcctcctacaaacttcagcgcggcaaagtttgcttccttcatcacacagtattccacgggacaggtcagcgtggagatcgagtgggagctgcagaaggagaacagcaaacgctggaaccccgagatccagtacacttccaactacaacaaatctgttaatgtggactttactgtggacgctaatggtgtgtattcagagcctcgccccattggcaccagatacctgactcgtaatctgtaa

SEQ ID NO: 3718 - DNA, 2208 bp, Artificial Sequence
  Description of Artificial Sequence: Synthetic polynucleotide
atggctgccgatggttatcttccagattggctcgaggacattctctctgaaggaataagacagtggtggaagctcaaacctggcccaccaccaccaaagcccgcagagcggcataaggacgacagcaggggtcttgtgcttcctgggtacaagtacctcggacccttcaacggactcgacaaaggagagccggtcaacgaggcagacgccgcggccctcgagcacgacaaggcctacgaccggcagctcgacagcggagacaacccgtacctcaagtacaaccacgccgacgcggagtttcaggagcgtcttaaagaagatacgtcttttgggggcaacctcggacgagcagtcttccaggcaaaaaagagggttcttgaacctctgggcctggttgaggaacctgttaagacggctccgggaaaaaagaggccggtagagcaatctcctgcggagccagactcctcctcgggaaccggaaaggcgggcaaccagcctgcaagaaagagattgaattttggtcagactggagacgcagactccgtacctgacccccagcctctcggacagccaccagcagccccctctggtctgggatctactacaatggctacaggcagtggcgcaccaatggcagacaataacgagggtgccgatggggtgggtaattcctcaggaaattggcattgcgattcccaatggttgggcgacagagtcatcaccaccagcacccgaacctgggccctgcccacctacaacaatcacctctacaagcaaatctccagccaatcaggagcagcgaacgacaaccactactttggctacagcaccccctgggggtattttgacttcaacagattccactgccacttttcaccacgtgactggcaaagactcatcaacaacaactggggattccgacccaaaagactcaacttcaagctctttagcattcaagtcaaagaggtcacgcagaatgacggtacgacgacgattgccaataaccttaccagcacggttcaggtgtttactgactcggagtaccagctcccgtacgtcctcggctcggcgcatcaaggatgcctcccgccgtttccagcggacgtcttcatggtcccacagtatggatacctcaccctgaacaacgggagtcaggcggtaggacgctcttccttttactgcctggagtactttccttctcagatgcttcgtaccggaaacaactttaccttcagttacacctttgaagacgttcctttccacagcagctacgctcacagtcaaagtctggaccggctgatgaatcctctgatagaccagtacctgtattatctaaacaaaacacaatcaaatagtggaactcttcagcagtctcggctactgtttagtcaagctggacccaccagcatgtctcttcaagctaaaaactggctgcctggaccttgctacagacaacagcgtctgtcaaagcaggcaaacgacaacaacaacagcaactttccctggactgcggctacaaagtatcatctaaatggccgggactcgttggttaatccaggaccagctatggccagccacaaagacgatgaagaaaagtttttccccatgcatggaaccctgatatttggtaaacaaggaacaaatgctaacgacgcggatttggacaatgtcatgattacagatgaagaagaaatccgcaccaccaatcccgtggctacggagcagtacgggactgtgtcaaataatttgcaaaactcaaatactggtccaactactggaactgtcaatcaccaaggagcgttacctggtatggtgtggcaggatcgagacgtgtaccttcagggacccatttgggccaagattcctcacaccgatggacactttcatccttctccactgatgggaggttttggactcaaacacccgcctcctcagatcatgatcaaaaacactcccgttccagccaatcctcctacaaacttcagttctgccaagtttgcttctttcatcacacagtattccacggggcaggtcagcgtggagatagagtgggagctgcagaaggagaacagcaaacgctggaaccccgagatccagtatacttccaactacaacaagtctgttaatgtggactttactgtggacactaatggtgtgtattcagagcctcgccccattggcaccagatacctgactcgtaatctgtaa

SEQ ID NO: 3719 - DNA, 2208 bp, Artificial Sequence
  Description of Artificial Sequence: Synthetic polynucleotide
atggctgccgatggttatcttccagattggctcgaggacactctctctgaaggaataagacagtggtggaagctcaaacctggcccaccaccaccaaggcccgcagagcggcatcaggacgacagcaggggtcttgtgcttcctgggtacaagtacctcggacccttcaacggactcgacaaaggagagccggtcaacgaggcagacgctgcggccctcgagcacgacaaggcctacgaccggcagctcgacagcggagacaacccgtacctcaagtacaaccacgccgacgcggagtttcaggagcgtcttaaagaagatacgtcttttgggggcaacctcggacgagcagtcttccaggcgaaaaagagggttcttgagcctctgggcctggttgaggaacctgttaagacggctccgggaaaaaagaggccggtagagcactctcctgcggagccagactcctcctcgggaaccggaaaagcgggccagcagcctgcaagaaagagattgaatttcggtcagactggagacgcagactccgtacctgacccccagcctctcggacagccaccagcagcccccacaagtttgggatctactacaatggctacaggcagtggcgcaccaatggcagacaataacgagggtgccgatggagtgggtaattcctcaggaaattggcattgcgattcccaatggctgggcgacagagtcatcaccaccagcacccgaacctgggccctgcccacctacaacaaccacctctacaagcaaatctccagccaatcaggagcatcgaacgacaaccactaccttggctacagcaccccttgggggtattttgacttcaacagattccactgtcacttctccccacgtgactggcaaagactcatcaacaacaactggggattccgacccaagagactcaacttcaagctctttaacattcaagtcaaagaggtcacgcagaatgacggtacgacgacgattgccaataaccttaccagcacggttcaggtgtttactgactcggagtaccagctcccgtacgtcctcggctcggcgcatcaaggatgcctcccgccgtttccagcggacgtcttcatggtcccacagtatggatacctcaccctgaacaacgggagtcaggcggtaggacgctcttccttttactgcctggagtactttccttctcagatgctgcgtaccggaaacaactttaccttcagctacacctttgaggacgtgcccttccacagcagctacgctcacagccagagtttggaccggctgatgaatcctctgatcgaccagtatctgtattatctgaacaggacacaatcaaatagtggaactcttcagcagtctaggctactgtttagccaagctgcacccaccagcatgtcccttcaagctaaaaactggctgcctggaccttgctacagacagcagcgtctgtcaaagcaggcaaacgacaacaacaacagcaactttccctggactgcggctacaaagtatcctctaaatggtcgggactcgttggttaatccaggaccagctatggccagccacaaagacgatgaagaaaagtttttccccatgcatggaaccctgatatttggtaaacaaggaacaaatgctaacgacacggatttggaacatgtcatgattacagatgaagaagaaatcaggaccaccaatcccgtggctacagagcagtacggaaacgtgtcaaataatttgcaaaactcaaatactggtccaactacagaaaatgtcaatcaccagggagcgttacctggtatggtgtggcaggatcgagacgtgtacctgcagggacccatttgggccaagattcctcacaccgacggacactttcacccttctccactgatgggaggttttggactcaaacacccgcctcctcaaatcatgatcaaaaacactcctgttccagccaatcctcctacaaacttcagcgcggcaaagtttgcttccttcatcacacagtattccacgggacaggtcagcgtggagatcgagtgggagctgcagaaggagaacagcaaacgctggaaccccgagatccagtacacttccaactacaacaaatctgttaatgtggactttactgtggacgctaatggtgtgtattcagagcctcgccccattggcaccagatacctgactcgtaatctgtaa

SEQ ID NO: 3720 - DNA, 2208 bp, Artificial Sequence
  Description of Artificial Sequence: Synthetic polynucleotide
atggctgccgatggttatcttccagattggctcgaggacattctctctgaaggaataagacagtggtggaagctcaaacctggcccaccaccaccaaagcccgcagagcggcataaggacgacagcaggggtcttgtgcttcctgggtacaagtacctcggacccttcaacggactcgacaaaggagagccggtcaacgaggcagacgccgcggccctcgagcacgacaaggcctacgaccggcagctcgacagcggagacaacccgtacctcaagtacaaccacgccgacgcggagtttcaggagcgtcttaaagaagatacgtcttttgggggcaacctcggacgagcagtcttccaggcaaaaaagagggttcttgaacctctgggcctggttgaggaacctgttaagacggctccgggaaaaaagaggccggtagagcaatctcctgcggagccagactcctcctcgggaaccggaaaggcgggcaaccagcctgcaagaaagagattgaattttggtcagactggagacgcagactccgtacctgacccccagcctctcggacagccaccagcagccccctctggtctgggatctactacaatggctacaggcagtggcgcaccaatggcagacaataacgagggtgccgatggagtgggtaattcctcaggaaattggcattgcgattcccaatggttgggcgacagagtcatcaccaccagcacccgaacctgggccctgcccacctacaacaatcacctctacaagcaaatctccagccaatcaggagcagcgaacgacaaccactactttggctacagcaccccctgggggtattttgacttcaacagattccactgccacttttcaccacgtgactggcaaagactcatcaacaacaactggggattccgacccaaaagactcaacttcaagctctttaacattcaagtcaaagaggtcacgcagaatgacggtacgacgacgattgccaataaccttaccagcacggttcaggtgtttactgactcggagtaccagctcccgtacgtcctcggctcggcgcatcaaggatgcctcccgccgtttccagcggacgtcttcatggtcccacagtatggatacctcaccctgaacaacgggagtcaggcggtaggacgctcttccttttactgcctggagtactttccttctcagatgcttcgtaccggaaacaactttaccttcagttacgcctttgaagacgttcctttccacagcagctacgctcacagtcaaagtctggaccggctgatgaatcctctgatagaccagtacctgtattatctaaacaaaacacaatcaaatagtggaactcttcagcagtctcggctactgtttagtcaagctggacccaccagcatgtctcttcaagctaaaaactggctgcctggaccttgctacagacaacagcgtctgtcaaagcaggcaaacgacaacaacaacagcaactttccctggactgcggctacaaagtatcatctaaatggccgggactcgttggttaatccaggaccagctatggccagccacaaagacgatgaagaaaagtttttccccatgcatggaaccctgatatttggtaaacaaggaacaaatgctaacgacgcggatttggacaatgtcatgattacagatgaagaagaaatccgcaccaccaatcccgtggctacggagcagtacgggactgtgtcaaataatttgcaaaactcaaatactggtccaactactggaactgtcaatcaccaaggagcgttacctggtatggtgtggcaggatcgagacgtgtaccttcagggacccatttgggccaagattcctcacaccgatggacactttcatccttctccactgatgggaggttttggactcaaacacccgcctcctcagatcatgatcaaaaacactcccgttccagccaatcctcctacaaacttcagttctgccaagtttgctcctttcatcacacagtattccacggggcaggtcagcgtggagatagagtgggagctgcagaaggagaacagcaaacgctggaaccccgagatccagtatacttccaactacaacaagtctgttaatgtggactttactgtggacactaatggtgtgtattcagagcctcgccccattggcaccagatacctgactcgtaatctgtaa

SEQ ID NO: 3721 - DNA, 2208 bp, Artificial Sequence
  Description of Artificial Sequence: Synthetic polynucleotide
atggctgccgatggttatcttccagattggctcgaggacactctctctgaaggaataagacagtggtggaagctcaaacctggcccaccaccaccaaggcccgcagagcggcatcaggacgacagcaggggtcttgtgcttcctgggtacaagtacctcggacccttcaacggactcgacaaaggagagccggtcaacgaggcagacgctgcggccctcgagcacgacaaggcctacgaccggcagctcgacagcggagacaacccgtacctcaagtacaaccacgccgacgcggagtttcaggagcgtcttaaagaagatacgtcttttgggggcaacctcggacgagcagtcttccaggcgaaaaagagggttcttgaacctctgggcctggttgaggaacctgttaagacggctccgggaaaaaagaggccggtagagcactctcctgcggagccagactcctcctcgggaaccggaaaagcgggccagcagcctgcaagaaagagattgaatttcggtcagactggagacgcagactccgtacctgacccccagcctctcggacagccaccagcagcccccacaagtttgggatctactacaatggctacaggcagtggcgcaccaatggcagacaataacgagggtgccgatggagtgggtaattcctcaggaaattggcattgcgattcccaatggctgggcgacagagtcatcaccaccagcacccgaacctgggccctgcccacctacaacaaccacctctacaagcaaatctccagccaatcaggagcatcgaacgacaaccactactttggctacagcaccccttgggggtattttgacttcaacagattccactgtcacttctccccacgtgactggcaaagactcatcaacaacaactggggattccgacccaagagactcaacttcaagctctttaacattcaagtcaaagaggtcacgcagaatgacggtacgacgacgattgccaataaccttaccagcacggttcaggtgtttactgactcggagtaccagctcccgtacgtcctcggctcggcgcatcaaggatgcctcccgccgtttccagcggacgtcttcatggtcccacagtatggatacctcaccctgaacaacgggagtcaggcggtaggacgctcttccttttactgcctggagtactttccttctcagatgctgcgtaccggaaacaactttaccttcagctacacctttgaggacgtgcccttccacagcagctacgctcacagccagagtttggaccggctgatgaatcctctgatcgaccagtatctgtattatctgaacaggacacaatcaaatagtggaactcttcagcagtctaggctactgtttagccaagctggacccaccagcatgtcccttcaagctaaaaactggctgcctggaccttgctacagacagcagcgtctgtcaaagcaggcaaacgacaacaacaacagcaactttccctggactgcggctacaaagtatcatctaaatggtcgggactcgttggttaatccaggaccagctatggccagccacaaagacgatgaagaaaagtttttccccatgcatggaaccctgatatttggtaaacaaggaacaaatgctaacgacgcggatttggaacatgtcatgattacagatgaagaagaaatcaggaccaccaatcccgtggctacagagcagtacggaaacgtgtcaaataatttgcaaaactcaaatactggtccaactacagaaaatgtcaatcaccagggagcgttacctggtatggtgtggcaggatcgagacgtgtacctgcagggacccatttgggccaagattcctcacaccgacggacactttcacccttctccactgatgggaggttttggactcaaacacccgcctcctcaaatcatgatcaaaaacactcctgttccagccaatcctcctacaaacttcagcgcggcaaagtttgcttccttcatcacacggtattccacgggacaggtcagcgtggagatcgagtgggagctgcagaaggagaacagcaaacgctggaaccccgagatccagtacacttccaactacaacaaatctgttaatgtggactttactgtggacgctaatggtgtgtattcagagcctcgccccattggcaccagatacctgactcgtaatctgtaa

SEQ ID NO: 3722 - DNA, 2208 bp, Artificial Sequence
  Description of Artificial Sequence: Synthetic polynucleotide
atggctgccgatggttatcttccagattggctcgaggacactctctctgaaggaataagacagtggtggaagctcaaacctggcccaccaccaccaaggcccgcagagcggcatcaggacgacagcaggggtcttgtgcttcctgggtacaagtacctcggacccttcaacggactcgacaaaggagagccggtcaacgaggcagacgctgcggccctcgagcacgacaaggcctacgaccggcagctcgacagcggagacaacccgtacctcaagtacaaccgcgccgacgcggagtttcaggagcgtcttaaagaagatacgtcttttgggggcaacctcggacgagcagtcttccaggcgaaaaagagggttcttgaacctctgggcctggttgaggaacctgttaagacggctccgggaaaaaagaggccggtagagcactctcctgcggagccagactcctcctcgggaaccggaaaagcgggccagcagcctgcaagaaagagattgaatttcggtcagactggagacgcagactccgtacctgacccccagcctctcggacagccaccagcagcccccacaagtttgggatctactacaatggctacaggcagtggcgcaccaatggcagacaataacgagggtgccgatggagtgggtaattcctcaggaaattggcattgcgattcccaatggctgggcgacagagtcatcaccaccagcacccgaacctgggccctgcccacctacaacaaccacctctacaagcaaatctccagccaatcaggagcatcgaacgacaaccactactttggctacagcaccccttgggggtattttgacttcaacagattccactgtcacttctccccacgtgactggcaaagactcatcaacaacaactggggattccgacccaagagactcaacttcaagctctttaacattcaagtcaaagaggtcacgcagaatgacggtacgacgacgattgccaataaccttaccagcacggttcaggtgtttactgactcggagtaccagctcccgtacgtcctcggctcggcgcatcaaggatgcctcccgccgtttccagcggacgtcttcatggtcccacagtatggatacctcaccctgaacaacgggagtcaggcggtaggacgctcttccttttactgcctggagtactttccttctcagatgctgcgtaccggaaacaactttaccttcagctacacctttgaggacgtgcccttccacagcagctacgctcacagccagagtttggaccggctgatgaatcctctgatcgaccagtatctgtattatctgaacaggacacaatcaaatagtggaactcttcagcagtctaggctactgtttagccaagctggacccaccagcatgtcccttcaagctaaaaactggctgcctggaccttgctacagacagcagcgtctgtcaaagcaggcaaacgacaacaacaacagcaactttccctggactgcggctacaaagtatcatctaaatggtcgggactcgttggttaatccaggaccagctatggccagccacaaagacgatgaagaaaagtttttccccatgcatggaaccctgatatttggtaaacaaggaacaaatgctaacgacacggatttggaacatgtcatgattacagatgaagaagaaatcaggaccaccaatcccgtggctacagagcagtacggaaacgtgtcaaataatttgcaaaactcaaatactggtccaactacagaaaatgtcaatcaccagggagcgttacctggtatggtgtggcaggatcgagacgtgtacctgcagggacccatttgggccaagattcctcacaccgacggacactttcacccttctccactgatgggaggttttggactcaaacacccgcctcctcaaatcatgatcaaaaacactcctgttccagccaatcctcctacaaacttcagcgcggcaaagtttgcttccttcatcacacagtattccacgggacaggtcagcgtggagatcgagtgggagctgcagaaggagaacagcaaacgctggaaccccgagatccagtacacttccaactacaacaaatctgttaatgtggactttactgtggacgctaatggtgtgtattcagagcctcgccccattggcaccagatacctgactcgtaatctgtaa

SEQ ID NO: 3723 - DNA, 2208 bp, Artificial Sequence
  Description of Artificial Sequence: Synthetic polynucleotide
atggctgccgatggttatcttccagattggctcgaggacactctctctgaaggaataagacagtggtggaagctcaaacctggcccaccaccaccaaggcccgcagagcggcatcaggacgacagcaggggtcttgtgcttcctgggtacaagtacctcggacccttcaacggactcgacaaaggagagccggtcaacgaggcagacgctgcggccctcgagcacgacaaggcctacgaccggcagctcgacagcggagacaacccgtacctcaagtacaaccacgccgacgcggagtttcaggagcgtcttaaagaagatacgtcttttgggggcaacctcggacgagcagtcttccaggcgaaaaagagggttcttgaacctctgggcctggttgaggaacctgttaagacggctccgggaaaaaagaggccggtagagcactctcctgcggagccagactcctcctcgggaaccggaaaagcgggccagcagcctgcaagaaagagattgaatttcggtcagactggagacgcagactccgtacctgacccccagcctctcggacagccaccagcagcccccacaagtttgggatctactacaatggctacaggcagtggcgcaccaatggcagacaataacgagggtgccgatggagtgggtaattcctcaggaaattggcattgcgattcccaatggctgggcgacagagtcatcaccaccagcacccgaacctgggccctgcccacctacaacaaccacctctacaagcaaatctccagccaatcaggagcatcgaacgacaaccactactttggctacagcaccccttgggggtattttgacttcaacagattccactgtcacttctccccacgtgactggcaaagactcatcaacaacaactggggattccgacccaagagactcaacttcaagctctttaacattcaagtcaaagaggtcacgcagaatgacggtacgacgacgattgccaataaccttaccagcacggttcaggtgtttactgactcggagtaccagctcccgtacgtcctcggctcggcgcatcaaggatgcctcccgccgtttccagcggacgtcttcatggtcccacagtatggatacctcaccctgaacaacgggagtcaggcggtaggacgctcttccttttactgcctggagtactttccttctcagatgctgcgtaccggaaacaactttaccttcagctacacctttgaggacgtgcccttccacagcagctacgctcacagccagagtttggaccggctgatgaatcctctgatcgaccagtatctgtattatctgaacaggacacaatcaaatagtggaactcttcagcagtctaggctactgtttagccaagctggacccaccagcatgtcccttcaagctaaaaactggctgcctggaccttgctacagacagcagcgtctgtcaaagcaggcaaacgacaacaacaacagcaactttccctggactgcggctacaaagtatcatctaaatggtcgggactcgttggttaatccaggaccagctatggccagccacaaagacgatgaagaaaagtttttccccatgcatggaaccctgatatttggtaaacaaggaacaaatgctaacgacgcggatttggaacatgtcatgattacagatgaagaagaaatcaggaccaccaatcccgtggctacagagcagtacggaaacgtgtcaaataatttgcaaaactcaaatactggtccaactacagaaaatgtcaatcaccagggagcgttacctggtatggtgtggcaggatcgagacgtgtacctgcagggacccatttgggccaagattcctcacaccgacggacacyttcacccttctccactgatgggaggttttggactcaaacacccgcctcctcaaatcatgatcaaaaacactcctgttccagccaatcctcctacaaacttcagcgcggcaaagtttgcttccttcatcacacagtattccacgggacaggtcagcgtggagatcgagtgggagctgcagaaggagaacagcaaacgctggaaccccgagatccagtacacttccaactacaacaaatctgttaatgtggactttactgtggacgctaatggtgtgtattcagagcctcgccccattggcaccagatacctgactcgtaatctgtaa

SEQ ID NO: 3724 - DNA, 2208 bp, Artificial Sequence
  Description of Artificial Sequence: Synthetic polynucleotide
atggctgccgatggttatcttccagattggctcgaggacactctctctgaaggaataagacagtggtggaagctcaaacctggcccaccaccaccaaggcccgcagagcggcatcaggacgacagcaggggtcttgtgcttcctgggtacaagtacctcggacccttcaacggactcgacaaaggagagccggtcaacgaggcagacgctgcggccctcgagcacgacaaggcctacgaccggcagctcgacagcggagacaacccgtacctcaagtacaaccacgccgacgcggagtttcaggagcgtcttaaagaagatacgtcttttgggggcaacctcggacgagcagtcttccaggcgaaaaagagggttcttgaacctctgggcctggttgaggaacctgttaagacggctccgggaaaaaagaggccggcagagcactctcctgcggagccagactcctcctcgggaaccggaaaagcgggccagcagcctgcaagaaagagattgaatttcggtcagactggagacgcagactccgtacctgacccccagcctctcggacagccaccagcagcccccacaagtttgggatctactacaatggctacaggcagtggcgcaccaatggcagacaataacgagggtgccgatggagtgggtaattcctcaggaaattggcattgcgattcccaatggctgggcgacagagtcatcaccaccagcacccgaacctgggccctgcccacctacaacaaccacctctacaagcaaatctccagccaatcaggagcatcgaacgacaaccactactttggctacagcaccccttgggggtattttgacttcaacagattccactgtcacttctccccacgtgactggcaaagactcatcaacaacaactggggattccgacccaagagactcaacttcaagctctttaacattcaagtcaaagaggtcacgcagaatgacggtacgacgacgattgccaataaccttaccagcacggttcaggtgtttactgactcggagtaccagctcccgtacgtcctcggctcggcgcatcaaggatgcctcccgccgtttccagcggacgtcttcatggtcccacagtatggatacctcaccctgaacaacgggagtcaggcggtaggacgctcttccttttactgcctggagtactttccttctcagatgctgcgtaccggaaacaactttaccttcagctacacctttgaggacgtgcccttccacagcagctacgctcacagccagagtttggaccggctgatgaatcctctgatcgaccagtatctgtattatctgaacaggacacaatcaaatagtggaactcttcagcagtctaggctactgtttagccaagctggacccaccagcatgtcccttcaagctaaaaactggctgcctggaccttgctacagacagcagcgtctgtcaaagcaggcaaacgacaacaacaacagcaactttccctggactgcggctacaaagtatcatctaaatggtcgggactcgttggttaatccaggaccagctatggccagccacaaagacgatgaagaaaagtttttccccatgcatggaaccctgatatttggtaaacaaggaacaaatgctaacgacgcggatttggaacatgtcatgattacagatgaagaagaaatcaggaccaccaatcccgtggctacagagcagtacggaaacgtgtcaaataatttgcaaaactcaaatactggtccaactacagaaaatgtcaatcaccagggagcgttacctggtatggtgtggcaggatcgagacgtgtacctgcagggacccatttgggccaagattcctcacaccgacggacactttcacccttctccactgatgggaggttttggactcaaacacccgcctcctcaaatcatgatcaaaaacactcctgttccagccaatcctcctacaaacttcagcgcggcaaagtttgcttccttcatcacacagtattccacgggacaggtcagcgtggagatcgagtgggagctgcagaaggagaacagcaaacgctggaaccccgagatccagtacacttccaactacaacaaatctgttaatgtggactttactgtggacgctaatggtgtgtattcagagcctcgccccattggcaccagatacctgactcgtaatctgtaa

SEQ ID NO: 3725 - DNA, 2208 bp, Artificial Sequence
  Description of Artificial Sequence: Synthetic polynucleotide
atggctgccgatggttatcttccagattggctcgaggacactctctctgaaggaataagacagtggtggaagctcaaacctggcccaccaccaccaaggcccgcagagcggcatcaggacgacagcaggggtcttgtgcttcctgggtacaagtacctcggacccttcaacggactcgacaaaggagagccggtcaacgaggcagacgctgcggccctcgagcacgacaaggcctacgaccggcagctcgacagcggagacaacccgtacctcaagtacaaccacgccgacgcggagtttcaggagcgtcttaaagaagatacgtcttttgggggcaacctcggacgagcagtcttccaggcgaaaaagagggttcttgaacctctgggcctggttgaggaacctgttaagacggctccgggaaaaaagaggccggtagagcactctcctgcggagccagactcctcctcgggaaccggaaaagcgggccagcagcctgcaagaaagagattgaatttcggtcagactggagacgcagactccgtacctgacccccagcctctcggacagccaccagcagcccccacaagtttgggatctactacaatggctacaggcagtggcgcaccaatggcagacaataacgagggtgccgatggagtgggtaattcctcaggaaattggcattgcgattcccaatggctgggcgacagagtcatcaccaccagcacccgaacctgggccctgcccacctacaacaaccacctctacaagcaaatctccagccaatcaggagcatcgaacgacaaccactactttggctacagcaccccttgggggtattttgacttcaacagattccactgtcacttctccccacgtgactggcaaagactcatcaacaacaactggggattccgacccaagagactcaacttcaagctctttaacattcaagtcaaagaggtcacgcagaatgacggtacgacgacgattgccaataaccttaccagcacggttcaggtgtttactgactcggagtaccagctcccgtacgtcctcggctcggcgcatcaaggatgcctcccgccgtttccagcggacgtcttcatggtcccacagtatggatacctcaccctgaacaacgggagtcaggcggtaggacgctcttccttttactgcctggagtactttccttctcagatgctgcgtaccggaaacaactttaccttcagctacacctttgaggacgtgcccttccacagcagctacgctcacagccagagtttggaccggctgatgaatcctctgatcgaccagtatctgtattatctgaacaggacacaatcaaatagtggaactcttcagcagcctaggctactgtttagccaagctggacccaccagcatgtcccttcaagctaaaaactggctgcctggaccttgctacagacagcagcgtctgtcaaagcaggcaaacgacaacaacaacagcaactttccctggactgcggctacaaagtatcatctaaatggtcgggactcgttggttaatccaggaccagctatggccagccacaaagacgatgaagaaaagtttttccccatgcatggaaccctgatatttggtaaacaaggaacaaatgctaacgacgcggatttggaacatgtcatgattacagatgaagaagaaatcaggaccaccaatcccgtggctacagagcagtacggaaacgtgtcaaataatttgcaaaactcaaatactggtccgactacagaaaatgtcaatcaccagggagcgttacctggtatggtgtggcaggatcgagacgtgtacctgcagggacccatttgggccaagattcctcacaccgacggacactttcacccttctccactgatgggaggttttggactcaaacacccgcctcctcaaatcatgatcaaaaacactcctgttccagccaatcctcctacaaacttcagcgcggcaaagtttgcttccttcatcacacagtattccacgggacaggtcagcgtggagatcgagtgggagctgcagaaggagaacagcaaacgctggaaccccgagatccagtacacttccaactacaacaaatctgttaatgtggactttactgtggacgctaatggtgtgtattcagagcctcgccccattggcaccagatacctgactcgtaatctgtaa

SEQ ID NO: 3726 - DNA, 2208 bp, Artificial Sequence
  Description of Artificial Sequence: Synthetic polynucleotide
atggctgccgatggttatcttccagattggctcgaggacactctctctgaaggaataagacagtggtggaagctcaaacctggcccaccaccaccaaggcccgcagagcggcatcaggacgacagcaggggtcttgtgcttcctgggtacaagtacctcggacccttcaacggactcgacaaaggagagccggtcaacgaggcagacgctgcggccctcgagcacgacaaggcctacgaccggcagctcgacagcggagacaacccgtacctcaagtacaaccacgccgacgcggagtttcaggagcgtcttaaagaagatacgtcttttgggggcaacctcggacgagcagtcttccaggcgaaaaagagggttcttgaacctctgggcctggttgaggaacctgttaagacggctccgggaaaaaagaggccggtagagcactctcctgcggagccagactcctcctcgggaaccggaaaagcgggccagcagcctgcaagaaagagattgaatttcggtcagactggagacgcagactccgtacctgacccccagcctctcggacagccaccagcagcccccacaagtttgggatctactacaatggctacaggcagtggcgcaccaatggcagacaataacgagggtgccgatggagtgggtaattcctcaggaaattggcattgcgattcccaatggctgggcgacagagtcatcaccaccagcacccgaacctgggccctgcccacctacaacaaccacctctacaagcaaatctccagccaatcaggagcatcgaacgacaaccactactttggctacagcaccccttgggggtattttgacttcaacagattccactgtcacttctccccacgtgactggcaaagactcatcaacaacaactggggattccgacccaagagactcaacttcaagctctttaacattcaagtcaaagaggtcacgcagaatgacggtacgacgacgattgccaataaccttaccagcacggttcaggtgtttactgactcggagtaccagctcccgtacgtcctcggctcggcgcatcaaggatgcctcccgccgtttccagcggacgtcttcatggtcccacagtatggatacctcaccctgaacaacgggagtcaggcggtaggacgctcttccttttactgcctggagtactttccttctcagatgctgcgtaccggaaacaactttaccttcagctacacctttgaggacgtgcccttccacagcagctacgctcacagccagagtttggaccggctgatgaatcctctgatcgaccagtatctgtattatctgaacaggacacaatcaaatagtggaactcttcagcagtctaggctactgtttagccaagctggacccaccagcatgtcccttcaagctaaaaactggctgcctggaccttgctacagacagcagcgtctgtcaaagcaggcaaacgacaacaacaacagcaactttccctggactgcggctacaaagtatcatctaaatggtcgggactcgttggttaatccaggaccagctatggccagccacaaagacgatgaagaaaagtttttccccatgcatggaaccctgatatttggtaaacaaggaacaaatgctaacgacrcggatttggaacatgtcatgattacagatgaagaagaaatcaggaccaccaatcccgtggctacagagcagtacggaaacgtgtcaaataatttgcaaaactcaaatactggtccaactacagaaaatgtcaatcaccagggagcgttacctggtatggtgtggcaggatcgagacgtgtacctgcagggacccatttgggccaagattcctcacaccgacggacactttcacccttctccactgatgggaggttttggactcaaacacccgcctcctcaaatcatgatcaaaaacactcctgttccagccaatcctcctacaaacttcagcgcggcaaagtttgcttccttcatcacacagtattccacgggacaggtcagcgtggagatcgagtgggagctgcagaaggagaacagcaaacgctggaaccccgagacccagtacacttccaactacaacaaatctgttaatgtggactttactgtggacgctaatggtgtgtattcagagcctcgccccattggcaccagatacctgactcgtaatctgtaa

SEQ ID NO: 3727 - DNA, 2208 bp, Artificial Sequence
  Description of Artificial Sequence: Synthetic polynucleotide
atggctgccgatggttatcttccagattggctcgaggacactctctctgaaggaataagacagtggtggaagctcaaacctggcccaccactaccaaggcccgcagagcggcatcaggacgacagcaggggtcttgtgcttcctgggtacaagtacctcggacccttcaacggactcgacaaaggagagccggtcaacgaggcagacgctgcggccctcgagcacgacaaggcctacgaccggcagctcgacagcggagacaacccgtacctcaagtacaaccacgccgacgcggagtttcaggagcgtcttaaagaagatacgtcttttgggggcaacctcggacgagcagtcttccaggcgaaaaagagggttcttgaacctctgggcctggttgaggaacctgttaagacggctccgggaaaaaagaggccggtagagcactctcctgcggagccagactcctcctcgggaaccggaaaagcgggccagcagcctgcaagaaagagattgaatttcggtcagactggagacgcagactccgtacctgacccccagcctctcggacagccaccagcagcccccacaagtttgggatctactacaatggctacaggcagtggcgcaccaatggcagacaataacgagggtgccgatggagtgggtaattcctcaggaaattggcattgcgattcccaatggctgggcgacagagtcatcaccaccagcacccgaacctgggccctgcccacctacaacaaccacctctacaagcaaatctccagccaatcaggagcatcgaacgacaaccactactttggctacagcaccccttgggggtattttgacttcaacagattccactgtcacttctccccacgtgactggcaaagactcatcaacaacaactggggattccgacccaagagactcaacttcaagctctttaacattcaagtcaaagaggtcacgcagaatgacggtacgacgacgattgccaataaccttaccagcacggttcaggtgtttactgactcggagtaccggctcccgtacgtcctcggctcggcgcatcaaggatgcctcccgccgtttccagcggacgtcttcatggtcccacagtatggatacctcaccctgaacaacgggagtcaggcggtaggacgctcttccttttactgcctggagtactttccttctcagatgctgcgtaccggaaacaactttaccttcagctacacctttgaggacgtgcccttccacagcagctacgctcacagccagagtttggaccggctgatgaatcctctgatcgaccagtatctgtattatctgaacaggacacaatcaaatagtggaactcttcagcagtctaggctactgtttagccaagctggacccaccagcatgtcccttcaagctaaaaactggctgcctggaccttgctacagacagcagcgtctgtcaaagcaggcaaacgacaacaacaacagcaactttccctggactgcggctacaaagtatcatctaaatggtcgggactcgttggttaatccgggaccagctatggccagccacaaagacgatgaagaaaagtttttccccatgcatggaaccctgatatttggtaaacaaggaacaaatgctaacgacgcggatttggaacatgtcatgattacagatgaagaagaaatcaggaccaccaatcccgtggctacagagcagtacggaaacgtgtcaaataatttgcaaaactcaaatactggtccaactacagaaaatgtcaatcaccagggagcgttacctggtatggtgtggcaggatcgagacgtgtacctgcagggacccatttgggccaagattcctcacaccgacggacactttcacccttctccactgatgggaggttttggactcaaacacccgcctcctcaaatcatgatcaaaaacactcctgttccagccaatcctcctacaaacttcagcgcggcaaagtttgcttccttcatcacacagtattccacgggacaggtcagcgtggagatcgagtgggagctgcagaaggagaacagcaaacgctggaaccccgagatccagtacacttccaactacaacaaatctgttaatgtggactttactgtggacgctaatggtgtgtattcagagcctcgccccattggcaccagatacctgactcgtaatctgtaa

SEQ ID NO: 3728 - DNA, 2208 bp, Artificial Sequence
  Description of Artificial Sequence: Synthetic polynucleotide
atggctgccgatggttatcttccagattggctcgaggacactctctctgaaggaataagacagtggtggaagctcaaacctggcccaccaccaccaaggcccgcagagcggcatcaggacgacagcaggggtcttgtgcttcctgggtacaagtacctcggacccttcaacggactcgacaaaggagagccggtcaacgaggcagacgctgcggccctcgagcacgacaaggcctacgaccggcagctcgacagcggagacaacccgtacctcaagtacaaccacgccgacgcggagtttcaggagcgtcttaaagaagatacgtcttttgggggcaacctcggacgagcagtcttccaggcgaaaaagagggttcttgaacctctgggcctggttgaggaacctgttaagacggctccgggaaaaaagaggccggtagagcactctcctgcggagccagactcctcctcgggaaccggaaaagcgggccagcagcctgcaagaaagagattgaatttcggtcagactggagacgcagactccgtacctgacccccagcctctcggacagccaccagcagcccccacaagtttgggatctactacaatggctacaggcagtggcgcaccaatggcagacaataacgagggtgccgatggagtgggtaattcctcaggaaattggcattgcgattcccaatggctgggcgacagagtcatcaccaccagcacccgaacctgggccctgcccacctacaacaaccacctctacaagcaaatctccagccaatcaggagcatcgaacgacaaccactactttggctacagcaccccttgggggtattttgacttcaacagattccactgtcacttctccccacgtgactggcaaagactcatcaacaacaactggggattccgacccaagagactcaacttcaagctctttaacattcaagtcaaagaggtcacgcagaatgacggtacgacgacgattgccaataaccttaccagcacggttcaggtgtttactgactcggagtaccagctcccgtacgtcctcggctcggcgcatcaaggatgcctcccgccgtttccagcggacgtcttcatggtcccacagtatggatacctcaccctgaacaacgggagtcaggcggtaggacgctcttccttttactgcctggagtactttccttctcagatgctgcgtaccggaaacaactttaccttcagctacacctttgaggacgtgcccttccacagcagctacgctcacagccagagtttggaccggctgatgaatcctctgaccgaccagtatctgtattatctgaacaggacacaatcaaatagtggaactcttcagcagtctaggctactgtttagccaagctggacccaccagcatgtcccttcaagctaaaaactggctgcctggaccttgctacagacagcagcgtctgtcaaagcaggcaaacgacaacaacaacagcaactttccctggactgcggctacaaagtatcatctaaatggtcgggactcgttggttaatccaggaccagctatggccagccacaaagacgatgaagaaaagtttttccccatgcatggaaccctgatatttggtaaacaaggaacaaatgctaacgacacggatttggaacatgtcatgattacagatgaagaagaaatcaggaccaccaatcccgtggctacagagcagtacggaaacgtgtcaaataatttgcaaaactcaaatactggtccaactacagaaaatgtcaatcaccagggagcgttacctggtatggtgtggcaggatcgagacgtgtacctgcagggacccatttgggccaagattcctcacaccgacggacactttcacccttctccactgatgggaggttttggactcaaacacccgcctcctcaaatcatgatcaaaaacactcctgttccagccaatcctcctacaaacttcagcgcggcaaagtttgcttccttcatcacacagtattccacgggacaggtcagcgtggagatcgagtgggagctgcagaaggagaacagcaaacgctggaaccccgagatccagtacacttccaactacaacaaatctgttaatgtggactttactgtggacgctaatggtgtgtattcagagcctcgccccattggcaccagatacctgactcgtaatctgtaa

SEQ ID NO: 3729 - DNA, 2208 bp, Artificial Sequence
  Description of Artificial Sequence: Synthetic polynucleotide
atggctgccgatggttatcttccagattggctcgaggacactctctctgaaggaataagacagtggtggaagctcaaacctggcccaccaccaccaaggcccgcagagcggcatcaggacgacagcaggggtcttgtgcttcctgggtacaagtacctcggacccttcaacggactcgacaaaggagagccggtcaacgaggcagacgctgcggccctcgagcacgacaaggcctacgaccggcagctcgacagcggagacaacccgtacctcaagtacaaccacgccgacgcggagtttcaggagcgtcttaaagaagatacgtcttttgggggcaacctcggacgagcagtcttccaggcgaaaaagagggttcttgaacctctgggcctggttgaggaacctgttaagacggctccgggaaaaaagaggccggtagagcactctcctgcggagccagactcctcctcgggaaccggaaaagcgggccagcagcctgcaagaaagagattgaatttcggtcagactggagacgcagactccgtacctgacccccagcctctcggacagccaccagcagcccccacaagtttgggatctactacaatggctacaggcagtggcgcaccaatggcagacaataacgagggtgccgatggagtgggtaattcctcaggaaattggcattgcgattcccaatggctgggcgacagagtcatcaccaccagcacccgaacctgggccctgcccacctacaacaaccacctctacaggcaaatctccagccaatcaggagcatcgaacgacaaccactactttggctacagcaccccttgggggtattttgacttcaacagattccactgtcacttctccccacgtgactggcaaagactcatcaacaacaactggggattccgacccaagagactcaacttcaagctctttaacattcaagtcaaagaggtcacgcagaatgacggtacgacgacgattgccaataaccttaccagcacggttcaggtgtttactgactcggagtaccagctcccgtacgtcctcggctcggcgcatcaaggatgcctcccgccgtttccagcggacgtcttcatggtcccacagtatggatacctcaccctgaacaacgggagtcaggcggtaggacgctcttccttttactgcctgaagtactttccttctcagatgctgcgtaccggaaacaactttaccttcagctacacctttgaggacgtgcccttccacagcagctacgctcacagccagagtttggaccggctgatgaatcctctgatcgaccagtatctgtattatctgaacaggacacaatcaaatagtggaactcttcagcagtctaggctactgtttagccaagctggacccaccagcatgtcccttcaagctaaaaactggctgcctggaccttgctacagacagcagcgtctgtcaaagcaggcaaacgacaacaacaacagcaactttccctggactgcggctacaaagtatcatctaaatggtcgggactcgttggttaatccaggaccagctatggccagccacaaagacgatgaagaaaagtttttccccctgcatggaaccctgatatttggtaaacaaggaacaaatgctaacgacacggatttggaacatgtcatgattacagatgaagaagaaatcaggaccaccaatcccgtggctacagagcagtacggaaacgtgtcaaataatttgcaaaactcaaatactggtccaactacagaaaatgtcaatcaccagggagcgttacctggtatggtgtggcaggatcgagacgtgtacctgcagggacccatttgggccaagattcctcacaccgacggacactttcacccttctccactgatgggaggttttggactcaaacacccgcctcctcaaatcatgatcaaaaacactcctgttccagccaatcctcctacaaacttcagcgcggcaaagtttgcttccttcatcacacagtattccacgggacaggtcagcgtggagatcgagtgggagctgcagaaggagaacagcaaacgctggaaccccgagatccagtacacttccaactacaacaaatctgttaatgtggactttactgtggacgctaatggtgtgtattcagagcctcgccccattggcaccagatacctgactcgtaatctgtaa

SEQ ID NO: 3730 - DNA, 2208 bp, Artificial Sequence
  Description of Artificial Sequence: Synthetic polynucleotide
atggctgccgatggttatcttccagattggctcgaggacactctctctgaaggaataagacagtggtggaagctcaaacctggcccaccaccaccaaggcccgcagagcggcatcaggacgacagcaggggtcttgtgcttcctgggtacaagtacctcggacccttcaacggactcgacaaaggagagccggtcaacgaggcagacgctgcggccctcgagcacgacaaggcctacgaccggcagctcgacagcggagacaacccgtacctcaagtacaaccacgccgacgcggagtttcaggagcgtcttaaagaagatacgtcttttgggggcaacctcggacgagcagtcttccaggcgaaaaagagggttcttgaacctctgggcctggttgaggaacctgttaagacggctccgggaaaaaagaggccggtagagcactctcctgcggagccagactcctcctcgggaaccggaaaagcgggccagcagcctgcaagaaagagattgaatttcggtcagactggagacgcagactccgtacctgacccccagcctctcggacagccaccagcagcccccacaagtttgggatctactacaatggctacaggcagtggcgcaccaatggcagacaataacgagggtgccgatggagtgggtaattcctcaggaaattggcattgcgattcccaatggctgggcgacagagtcatcaccaccagcacccgaacctgggccctgcccacctacaacaaccacctctacaggcaaatctccagccaatcaggagcatcgaacgacaaccactactttggctacagcaccccttgggggtattttgacttcaacagattccactgtcacttctccccacgtgactggcaaagactcatcaacaacaactggggattccgacccaagagactcaacttcaagctctttaacattcaagtcaaagaggtcacgcagaatgacggtacgacgacgattgccaataaccttaccagcacggttcaggtgtttactgactcggagtaccagctcccgtacgtcctcggctcggcgcatcaaggatgcctcccgccgtttccagcggacgtcttcatggtcccacagtatggatacctcaccctgaacaacgggagtcaggcggtaggacgctcttccttttactgcctggagtactttccttctcagatgctgcgtaccggaaacaactttaccttcagctacacctttgaggacgtgcccttccacagcagctacgctcacagccagagtttggaccggctgatgaatcctctgatcgaccagtatctgtattatctgaacaggacacaatcaaatagtggaactcttcagcagtctaggctactgtttagccaagctggacccaccagcatgtcccttcaagctaaaaactggctgcctggaccttgctacagacagcagcgtctgtcaaagcaggcaaacgacaacaacaacagcaactttccctggactgcggctacaaagtatcatctaaatggtcgggactcgttggttaatccaggaccagctatggccagccacaaagacgatgaagaaaagtttttccccatgcatggaaccctgatatttggtaaacaaggaacaaatgctaacgacacggatttggaacatgtcatgattacagatgaagaagaaatcaggaccaccaatcccgtggctacagagcagtacggaaacgtgtcaaataatttgcaaaactcaaatactggtccaactacagaaaatgtcaatcaccagggagcgttacctggtatggtgtggcaggatcgagacgtgtacctgcagggacccatttgggccaagattcctcacaccgacggacactttcacccttctccactgatgggaggttttggactcaaacacccgcctcctcaaatcatgatcaaaaacactcctgttccagccaatcctcctacaaacttcagcgcggcaaagtttgcttccttcatcacacagtattccacgggacaggtcagcgtggagatcgagtgggtgctgcagaaggagaacagcaaacgctggaaccccgagatccagtacacttccaactacaacaaatctgttaatgtggactttactgtggacgctaatggtgtgtattcagagcctcgccccattggcaccagatacctgactcgtaatctgtaa

SEQ ID NO: 3731 - DNA, 2208 bp, Artificial Sequence
  Description of Artificial Sequence: Synthetic polynucleotide
atggctgccgatggttatcttccagattggctcgaggacactctctctgaaggaataagacagtggtggaagctcaaacctggcccaccaccaccaaggcccgcagagcggcatcaggacgacagcaggggtcttgtgcttcctgggtacaagtacctcggacccttcaacggactcgacaaaggagagccggtcaacgaggcagacgctgcggccctcgagcacgacaaggcctacgaccggcagctcgacagcggagacaacccgtacctcaagtacaaccacgccgacgcggagtttcaggagcgtcttaaagaagatacgtcttttgggggcaacctcggacgagcagtcttccaggcgaaaaagagggttcttgaacctctgggcctggttgaggaacctgttaagacggctccgggaaaaaagaggccggtagagcactctcctgcggagccagactcctcctcgggaaccggaaaagcgggccagcagcctgcaagaaagagattgaatttcggtcagactggagacgcagactccgtacctgacccccagcctctcggacagccaccagcagcccccacaagtttgggatctactacaatggctacaggcagtggcgcaccaatggcagacaataacgagggtgccgatggagtgggtaattcctcaggaaattggcattgcgattcccaatggctgggcgacagagtcatcaccaccagcacccgaacctgggccctgcccacctacaacaaccacctctacaagcaaatctccagccaatcaggagcatcgaacgacaaccactactttggctacagcaccccttgggggtattttgacttcaacagattccactgtcacttctccccacgtgactggcaaagactcatcaacaacaactggggattccgacccaagagactcaacttcaagctctttaacattcaagtcaaagaggtcacgcagaatgacggtacgacgacgattgccaataaccttatcagcacggttcaggtgtttactgactcggagtaccagctcccgtacgtcctcggctcggcgcatcaaggatgcctcccgccgtttccagcggacgtcttcatggtcccacagtatggatacctcaccctgaacaacgggagtcaggcggtaggacgctcttccttttactgcctggagtactttccttctcagatgctgcgtaccggaaacaactttaccttcagctacacctttgaggacgtgcccttccacagcagctacgctcacagccagagtttggaccggctgatgaatcctctgatcgaccagtatctgtattatctgaacaggacacaatcaaatagtggaactcttcagcagtctaggctactgtttagccaagctggacccaccagcatgtcccttcaagctaaaaactggctgcctggaccttgctacagacagcagcgtctgtcaaagcaggcaaacgacaacaacaacagcaactttccctggactgcggctacaaagtatcatctaaatggtcgggactcgttggttaatccaggaccagctatggccagccacaaagacgatgaagaaaagtttttccccatgcatggaaccctgatatttggtaaacaaggaacaaatgctaacgacgcggatttggaacatgtcatgattacagatgaagaagaaatcaggaccaccaatcccgtggctacagagcagtacggaaacgtgtcaaataatttgcaaaactcaaatactggtccaactacagaaaatgtcaatcaccagggagcgttacctggtatggtgtggcaggatcgagacgtgtacctgcagggacccatttgggccaagattcctcacaccgacggacactttcacccttctccactgatgggaggttttggactcaaacacccgcctcctcaaatcatgatcaaaaacactcctgttccagccaatcctcctacaaacttcagcgcggcaaagtttgcttccttcatcacacagtattccacgggacaggtcagcgtggagatcgagtgggagctgcagaaggagaacagcaaacgctggaaccccgagatccagtacacttccaactacaacaaatctgttaatgtggactttactgtggacgctaatggtgtgtattcagagcctcgccccattggcaccagatacctgactcgtaatctgtaa

SEQ ID NO: 3732 - DNA, 2205 bp, Artificial Sequence
  Description of Artificial Sequence: Synthetic polynucleotide
atggctgccgatggttatcttccagattggctcgaggacattctctctgaaggaataagacagtggtggaagctcaaacctggcccaccaccaccaaagcccgcagagcggcataaggacgacagcaggggtcttgtgcttcctgggtacaagtacctcggacccttcaacggactcgacaaaggagagccggtcaacgaggcagacgccgcggccctcgagcacgacaaggcctacgaccggcagctcgacagcggagacaacccgtacctcaagtacaaccacgccgacgcggagtttcaggagcgtcttaaagaagatacgtcttttgggggcaacctcggacgagcagtcttccaggcaaaaaagagggttcttgaacctctgggcctggttgaggaacctgttaagacggctccgggaaaaaagaggccggtagagcaatctcctgcggagccagactcctcctcgggaaccggaaaggcgggcaaccagcctgcaagaaagagattgaattttggtcagactggagacgcagactccgtacctgacccccagcctctcggacagccaccagcagccccctctggtctgggatctactacaatggctacaggcagtggcgcaccaatggcagacaataacgagggtgccgatggagtgggtaattcctcaggaaattggcattgcgattcccaatggttgggcgacagagtcatcaccaccagcacccgaacctgggccctgcccacctacaacaatcacctctacaagcaaatctccagccaatcaggagcagcgaacgacaaccactactttggctacagcaccccctgggggtattttgacttcaacagattccactgccacttttcaccacgtgactggcaaagactcatcaacaacaactggggattccgacccaaaagactcaacttcaagctctttaacattcaagtcaaagaggtcacgcagaatgacggtacgacgacgattgccaataaccttaccagcacggttcaggtgtttactgactcggagtaccagctcccgtacgtcctcggctcggcgcatcaaggatgcctcccgccgtttccagcggacgtcttcatggtcccacagtatggatacctcaccctgaacaacgggagtcaggcggtaggacgctcttccttttactgcctggagtactttccttctcagatgcttcgtaccggaaacaactttaccttcagttacacctttgaagacgttcctttccacagcagctacgctcacagtcaaagtctggaccggctgatgaatcctctgatagaccagtacctgtattatctaaacaaaacacaatcaaatagtggaactcttcagcagtctcggctactgtttagtcaagctggacccaccagcatgtctcttcaagctaaaaactggctgcctggaccttgctacagacaacagcgtctgtcaaagcaggcaaacgacaacaacagcaactttccctggactgcggctacaaagtatcatctaaatggccgggactcgttggttaatccaggaccagctatggccagccacaaagacgatgaagaaaagtttttccccatgcatggaaccctgatatttggtaaacaaggaacaaatgctaacgacgcggatttggacaatgtcatgattacagatgaagaagaaatccgcaccaccaatcccgtggctacggagcagtacgggactgtgtcaaataatttgcaaaactcaaatactggtccaactactggaactgtcaatcaccaaggagcgttacctggtatggtgtggcaggatcgagacgtgtaccttcagggacccatttgggccaagattcctcacaccgatggacactttcatccttctccactgatgggaggttttggactcaaacacccgcctcctcagatcatgatcaaaaacactcccgttccagccaatcctcctacaaacttcagttctgccaagtttgcttctttcatcacacagtattccacggggcaggtcagcgtggagatagagtgggagctgcagaaggagaacagcaaacgctggaaccccgagatccagtatacttccaactacaacaagtctgttaatgtggactttactgtggacactaatggtgtgtattcagagcctcgccccattggcaccagatacctgactcgtaatctgtaa

SEQ ID NO: 3733 - DNA, 2208 bp, Artificial Sequence
  Description of Artificial Sequence: Synthetic polynucleotide
atggctgccgatggttatcttccagattggctcgaggacattctctctgaaggaataagacagtggtggaagctcaaacctggcccaccaccaccaaagcccgcagagcggcataaggacgacagcaggggtcttgtgcttcctgggtacaagtacctcggacccttcaacggactcgacaaaggagagccggtcaacgaggcagacgccgcggccctcgagcacgacaaggcctacgaccggcagctcgacagcggagacaacccgtacctcaagtacaaccacgccgacgcggagtttcaggagcgtcttaaagaagatacgtcttttgggggcaacctcggacgagcagtcttccaggcaaaaaagagggttcttgaacctctgggcctggttgaggaacctgttaagacggctccgggaaaaaagaggccggtagagcaatctcctgcggagccagactcctcctcgggaaccggaaaggcgggcaaccagcctgcaagaaagagattgaattttggtcagactggagacgcagactccgtacctgacccccagcctctcggacagccaccagcagccccctctggtctgggatctactacaatggctacaggcagtggcgcaccaatggcagacaataacgagggtgccgatggagtgggtaattcctcaggaaattggcattgcgattcccaatggttgggcgacagagtcatcaccaccagcacccgaacctgggccctgcccacctacaacaatcacctctacaagcaaatctccagccaatcaggagcagcgaacgacagccactactttggctacagcaccccctgggggtattttgacttcaacagattccactgccacttttcaccacgtgactggcaaagactcatcaacaacaactggggattccgacccaaaagactcaacttcaagctctttaacattcaagtcaaagaggtcacgcagaatgacggtacgacgacgattgccaataaccttaccagcacggttcaggtgtttactgactcggagtaccagctcccgtacgtcctcggctcggcgcatcaaggatgcctcccgccgtttccagcggacgtcttcatggtcccacagtatggatacctcaccctgaacaacgggagtcaggcggtaggacgctcttccttttactgcctggagtactttccttctcagatgcttcgtaccggaaacaactttaccttcagttacacctttgaagacgttcctttccacagcagctacgctcacagtcaaagtctggaccggctgatgaatcctctgatagaccagtacctgtattatctaaacaaaacacaatcaaatagtggaactcttcagcagtctcggctactgtttagtcaagctggacccaccagcatgtctcttcaagctaaaaactggctgcctggaccttgctacagacaacagcgtctgtcaaagcaggcaaacgacaacaacaacagcaactttccctggactgcggctacaaagtatcatctaaatggccgggactcgttggttaatccaggaccagctatggccagccacaaagacgatgaagaaaagtttttccccatgcatggaaccctgatatttggtaaacaaggaacaaatgctaacgacgcggatttggacaatgtcatgattacagatgaagaagaaatccgcaccaccaatcccgtggctacggagcagtacgggactgtgtcaaataatttgcaaaactcaaatactggtccaactactggaactgtcaatcaccaaggagcgttacctggtatggtgtggcaggatcgagacgtgtaccttcagggacccatttgggccaagattcctcacaccgatggacactttcatccttctccactgatgggaggttttggactcaaacacccgcctcctcagatcatgatcaaaaacactcccgttccagccaatcctcctacaaacttcagttctgccaagtttgcttctttcatcacacagtattccacggggcaggtcagcgtggagatagagtgggagctgcagaaggagaacagcaaacgctggaaccccgagatccagtatacttccaactacaacaagtctgttaatgtggactttactgtggacactaatggtgtgtattcagagcctcgccccattggcaccagatacctgactcgtaatctgtaa

SEQ ID NO: 3734 - DNA, 2208 bp, Artificial Sequence
  Description of Artificial Sequence: Synthetic polynucleotide
atggctgccgatggttatcttccagattggctcgaggacactctctctgaaggaataagacagtggtggaagctcaaacctggcccaccaccaccaaggcccgcagagcggcatcaggacgacagcaggggtcttgtgcttcctgggtacaagtacctcggacccttcaacggactcgacaaaggagagccggtcaacgaggcagacgctgcggccctcgagcacgacaaggcctacgaccggcagctcgacagcggagacaacccgtacctcaagtacaaccacgccgacgcggagtttcaggagcgtcttaaagaagatacgtcttttgggggcaacctcggacgagcagtcttccaggcgaaaaagagggttcttgaacctctgggcctggttgaggaacctgttaagacggctccgggaaaaaagaggccggtagagcactctcctgcggagccagactcctcctcgggaaccggaaaagcgggccagcagcctgcaagaaagagattgaatttcggtcagactggagacgcagactccgtacctgacccccagcctctcggacagccaccagcagcccccacaagtttgggatctactacaatggctacaggcagtggcgcaccaatggcagacaataacgagggtgccgatggagtgggtaattcctcaggaaattggcattgcgattcccaatggctgggcgacagagtcatcaccaccagcacccgaacctgggccctgcccacctacaacaaccacctctacaagcaaatctccagccaatcaggagcatcgaacgacaaccactactttggctacagcaccccttgggggtattttgacttcaacagattccactgtcacttctccccacgtgactggcaaagactcatcaacaacaactggggattccgacccaagagactcaacttcaagctctttaacattcaagtcaaagaggtcacgcagaatgacggtacgacgacgattgccaataaccttaccagcacggttcaggtgtttactgactcggagtaccagctcccgtacgtcctcggctcggcgcatcaaggatgcctcccgccgtttccagcggacgtcttcatggtcccacagtatggatacctcaccctgaacaacgggagtcaggcggtaggacgctcttccttttactgcctggagtactttccttctcagatgctgcgtaccggaaacaactttaccttcagctacacctttgaggacgtgcccttccacagcagctacgctcacagccagagtttggaccggctgatgaatcctctgatcgaccagtatctgtattatctgaacaggacacaatcaaatagtggaactcttcagcagtctaggctactgtttagccaagctggacccaccagcatgtcccttcaagctaaaaactggctgcctggaccttgctacagacagcagcgtctgtcaaagcaggcaaacgacaacaacaacagcaactttccctggactgcggctacaaagtatcatctaaatggtcgggactcgttggttaatccaggaccagctatggccagccacaaagacgatgaagaaaagtttttccccatgcatggaaccctgatatttggtaaacaaggaacaaatgctaacgacacggatttggaacatgtcatgattacagatgaagaagaaatcaggaccaccaatcccgtggctacagagcagtacggaaacgtgtcaaataatttgcaaaactcaaatactggtccaactacagaaaatgtcaatcaccagggagcgttacctggtatggtgtggcaggatcgagacgtgtacctgcagggacccatttgggccaagattcctcacaccgacggacactttcacccttctccactgatgggaggttttgggctcaaacacccgcctcctcaaatcatgatcaaaaacactcctgttccagccaatcctcctacaaacttcagcgcggcaaagtttgcttccttcatcacacagtattccacgggacaggtcagcgtggagatcgagtgggagctgcagaaggagaacagcaaacgctggaaccccgagatccagtacacttccaactacaacaaatctgttaatgtggactttactgtggacgctaatggtgtgtattcagagcctcgccccattggcaccagatacctgactcgtaatctgtaa

SEQ ID NO: 3735 - DNA, 2205 bp, Artificial Sequence
  Description of Artificial Sequence: Synthetic polynucleotide
atggctgccgatggttatcttccagattggctcgaggacattctctctgaaggaataagacagtggtggaagctcaaacctggcccaccaccaaagcccgcagagcggcataaggacgacagcaggggtcttgtgcttcctgggtacaagtacctcggacccttcaacggactcgacaaaggagagccggtcaacgaggcagacgccgcggccctcgagcacgacaaggcctacgaccggcagctcgacagcggagacaacccgtacctcaagtacaaccacgccgacgcggagtttcaggagcgtcttaaagaagatacgtcttttgggggcaacctcggacgagcagtcttccaggcaaaaaagagggttcttgaacctctgggcctggttgaggaacctgttaagacggctccgggaaaaaagaggccggtagagcaatctcctgcggagccagactcctcctcgggaaccggaaaggcgggcaaccagcctgcaagaaagagattgaattttggtcagactggagacgcagactccgtacctgacccccagcctctcggacagccaccagcagccccctctggtctgggatctactacaatggctacaggcagtggcgcaccaatggcagacaataacgagggtgccgatggagtgggtaattcctcaggaaattggcattgcgattcccaatggttgggcgacagagtcatcaccaccagcacccgaacctgggccctgcccacctacaacaatcacctctacaagcaaatctccagccaatcaggagcagcgaacgacaaccactactttggctacagcaccccctgggggtattttgacttcaacagattccactgccacttttcaccacgtgactggcaaagactcatcaacaacaactggggattccgacccaaaagactcaacttcaagctctttaacattcaagtcaaagaggtcacgcagaatgacggtacgacgacgattgccaataaccttaccagcacggttcaggtgtttactgactcggagtaccagctcccgtacgtcctcggctcggcgcatcaaggatgcctcccgccgtttccagcggacgtcttcatggtcccacagtatggatacctcaccctgaacaacgggagtcaggcggtaggacgctcttccttttactgcctggagtactttccttctcagatgcttcgtaccggaaacaactttaccttcagttacacctttgaagacgttcctttccacagcagctacgctcacagtcaaagtctggaccggctgatgaatcctctgatagaccagtacctgtattatctaaacaaaacacaatcaaatagtggaactcttcagcagtctcggctactgtttagtcaagctggacccaccagcatgtctcttcaagctaaaaactggctgcctggaccttgctacagacaacagcgtctgtcaaagcaggcaaacgacaacaacaacagcaactttccctggactgcggctacaaagtatcatctaaatggccgggactcgttggttaatccaggaccagctatggccagccacaaagacgatgaagaaaagtttttccccatgcatggaaccctgatatttggtaaacaaggaacaaatgctaacgacgcggatttggacaatgtcatgattacagatgaagaagaaatccgcaccaccaatcccgtggctacggagcagtacgggactgtgtcaaataatttgcaaaactcaaatactggtccaactactggaactgtcaatcaccaaggagcgttacctggtatggtgtggcaggatcgagacgtgtaccttcagggacccatttgggccaagattcctcacaccgatggacactttcatccttctccactgatgggaggttttggactcaaacacccgcctcctcagatcatgatcaaaaacactcccgttccagccaatcctcctacaaacttcagttctgccaagtttgcttctttcatcacacagtattccacggggcaggtcagcgtggagatagagtgggagctgcagaaggagaacagcaaacgctggaaccccgagatccagtatacttccaactacaacaagtctgttaatgtggactttactgtggacactaatggtgtgtattcagagcctcgccccattggcaccagatacctgactcgtaatctgtaa

SEQ ID NO: 3736 - DNA, 2208 bp, Artificial Sequence
  Description of Artificial Sequence: Synthetic polynucleotide
atggctgccgatggttatcttccagattggctcgaggacactctctctgaaggaataagacagtggtggaagctcaaacctggcccaccaccaccaaggcccgcagagcggcatcaggacgacagcaggggtcttgtgcttcctgggtacaagtacctcggacccttcaacggactcgacaaaggagagccggtcaacgaggcagacgctgcggccctcgagcacgacaaggcctacgaccggcagctcgacagcggagacaacccgtacctcaagtacaaccacgccgacgcggagtttcaggagcgtcttaaagaagatacgtcttttgggggcaacctcggacgagcagtcttccaggcgaaaaagagggttcttgaacctctgggcctggttgaggaacctgttaagacggctccgggaaaaaagaggccggtagagcactctcctgcggagccagactcctcctcgggaaccggaaaagcgggccagcagcctgcaagaaagagattgaatttcggtcagactggagacgcagactccgtacctgacccccagcctctcggacagccaccagcagcccccacaagtttgggatctactacaatggctacaggcagtggcgcaccaatggcagacaataacgagggtgccgatggagtgggtaattcctcaggaaattggcattgcgattcccaatggctgggcgacagagtcatcaccaccagcacccgaacctgggccctgcccacctacaacaaccacctctacaagcaaatctccagccaatcaggagcatcgaacgacaaccactactttggctacagcaccccttgggggtattttgacttcaacagattccactgtcacttctccccacgtgactggcaaagactcatcaacaacaactggggattccgacccaagagactcaacttcaagctctttaacattcaagtcaaagaggtcacgcagaatgacggtacgacgacgattgccaataaccttaccagcacggttcaggtgtttactgactcggagtaccagctcccgtacgtcctcggctcggcgcatcaaggatgcctcccgccgtttccagcggacgtcttcatggtcccacagtatggatacctcaccctgaacaacgggagtcaggcggtaggacgctcttccttttactgcctggagtactttccttctcagatgctgcgtaccggaaacaactttaccttcagctacacctttggggacgtgcccttccacagcagctacgctcacagccagagtttggaccggctgatgaatcctctgatcgaccagtatctgtattatctgaacaggacacaatcaaatagtggaactcttcagcagtctaggctactgtttagccaagctggacccaccagcatgtcccttcaagctaaaaactggctgcctggaccttgctacagacagcagcgtctgtcaaagcaggcaaacgacaacaacaacagcaactttccctggactgcggctacaaagtatcatctaaatggtcgggactcgttggttaatccaggaccagctatggccagccacaaagacgatgaagaaaagtttttccccatgcatggaaccctgatatttggtaaacaaggaacaaatgctaacgacgcggatttggaacatgtcatgattacagatgaagaagaaatcaggaccaccaatcccgtggctacagagcagtacggaaacgtgtcaaataatttgcaaaactcaaatactggtccaactacagaaaatgtcaatcaccagggagcgttacctggtatggtgtggcaggatcgagacgtgtacctgcagggacccatttgggccaagattcctcacaccgacggacactttcacccttctccactgatgggaggttttggactcaaacacccgcctcctcaaatcatgatcaaaaacactcctgttccagccaatcctcctacaaacttcagcgcggcaaagtttgcttccttcatcacacagtattccacgggacaggtcagcgtggagatcgagtgggagctgcagaaggagaacagcaaacgctggaaccccgagatccagtacacttccaactacaacaaatctgttaatgtggactttactgtggacgctaatggtgtgtattcagagcctcgccccattggcaccagatacctgactcgtaatctgtaa

SEQ ID NO: 3737 - DNA, 2208 bp, Artificial Sequence
  Description of Artificial Sequence: Synthetic polynucleotide
atggctgccgatggttatcttccagattggctcgaggacactctctctgaaggaataagacagtggtggaagctcaaacctggcccaccaccaccaaggcccgcagagcggcatcaggacgacagcaggggtcttgtgcttcctgggtacaagtacctcggacccttcaacggactcgacaaaggagagccggtcaacgaggcagacgctgcggccctcgagcacgacaaggcctacgaccggcagctcgacagcggagacaacccgtacctcaagtacaaccacgccgacgcggagtttcaggagcgtcttaaagaagatacgtcttttgggggcaacctcggacgagcagtcttccaggcgaaaaagagggttcttgaacctctgggcctggttgaggaacctgttaagacggctccgggaaaaaagaggccggtagagcactctcctgcggagccagactcctcctcgggaaccggaaaagcgggccagcagcctgcaagaaagagattgaatttcggtcagactggagacgcagactccgtacctgacccccagcctctcggacagccaccagcagcccccacaagtttgggatctactacaatggctacaggcagtggcgcaccaatggcagacaataacgagggtgccgatggagtgggtaattcctcaggaaattggcattgcgattcccaatggctgggcgacagagtcatcaccaccagcacccgaacctgggccctgcccacctacaacaaccacctctacaagcaaatctccagccaatcaggagcatcgaacgacagccactactttggctacagcaccccttgggggtattttgacttcaacagattccactgtcacttctccccacgtgactggcaaagactcatcaacaacaactggggattccgacccaagagactcaacttcaagctctttaacattcaagtcaaagaggtcacgcagaatgacggtacgacgacgattgccaataaccttaccagcacggttcaggtgtttactgactcggagtaccagctcccgtacgtcctcggctcggcgcatcaaggatgcctcccgccgtttccagcggacgtcttcatggtcccacagtatggatacctcaccctgaacaacgggagtcaggcggtaggacgctcttccttttactgcctggagtactttccttctcagatgctgcgtaccggaaacaactttaccttcagctacacctttgaggacgtgcccttccacagcagctacgctcacagccagagtttggaccggctgatgaatcctctgatcgaccagtatctgtattatctgaacaggacacaatcaaatagtggaactcttcagcagtctaggctactgtttagccaagctggacccaccagcatgtcccttcaagctaaaaactggctgcctggaccttgctacagacagcagcgtctgtcaaagcaggcaaacgacaacaacaacagcaactttccctggactgcggctacaaagtatcatctaaatggtcgggactcgttggttaatccaggaccagctatggccagccacaaagacgatgaagaaaagtttttccccatgcatggaaccctgatatttggtaaacaaggaacaaatgctaacgacgcggatttggaacatgtcatgattacagatgaagaagaaatcaggaccaccaatcccgtggctacagagcagtacggaaacgtgtcaaataatttgcaaaactcaaatactggtccaactacagaaaatgtcaatcaccagggagcgttacctggtatggtgtggcaggatcgagacgtgtacctgcagggacccatttgggccaagattcctcacaccgacggacactttcacccttctccactgatgggaggttttggactcaaacacccgcctcctcaaatcatgatcaaaaacactcctgttccagccaatcctcctacaaacttcagcgcggcaaagtttgcttccttcatcacacagtattccacgggacaggtcagcgtggagatcgagtgggagctgcagaaggagaacagcaaacgctggaaccccgagatccagtacacttccaactacaacaaatctgttaatgtggactttactgtggacgctaatggtgtgtattcagagcctcgccccattggcaccagatacctgactcgtaatctgtaa

SEQ ID NO: 3738 - DNA, 2208 bp, Artificial Sequence
  Description of Artificial Sequence: Synthetic polynucleotide
atggctgccgatggttatcttccagattggctcgaggacactctctctgaaggaataagacagtggtggaagctcaaacctggcccaccaccaccaaggcccgcagagcggcatcaggacgacagcaggggtcttgtgcttcctgggtacaagtacctcggacccttcaacggactcgacaaaggagagccggtcaacgaggcagacgctgcggccctcgagcacgacaaggcctacgaccggcagctcgacagcggagacaacccgtacctcaagtacaaccacgccgacgcggagtttcaggagcgtcttaaagaagatacgtcttttgggggcaacctcggacgagcagtcttccaggcgaaaaagagggttcttgaacctctgggcctggttgaggaacctgttaagacggctccgggaaaaaagaggccggtagagcactctcctgcggagccagactcctcctcgggaaccggaaaagcgggccagcagcctgcaagaaagagattgaatttcggtcagactggagacgcagactccgtacctgacccccagcctctcggacagccaccagcagcccccacaagtttgggatctactacaatggctacaggcagtggcgcaccaatggcagacaataacgagggtgccgatggagtgggtaattcctcaggaaattggcattgcgattcccaatggctgggcgacagagtcatcaccaccagcacccgaacctgggccctgcccacctacaacaaccacctctacaagcaaatctccagccaatcaggagcatcgaacgacaaccactactttggctacagcaccccttgggggtattttgacttcaacagattccactgtcacttctccccacgtgactggcaaagactcatcaacaacaactggggattccgacccaagagactcaacttcaagctctttaacattcaagtcaaagaggtcacgcagaatgacggtacgacgacgattgccaataaccttaccagcacgattcaggtgtttactgactcggagtaccagctcccgtacgtcctcggctcggcgcatcaaggatgcctcccgccgtttccagcggacgtcttcatggtcccacagtatggatacctcaccctgaacaacgggagtcaggcggtaggacgctcttccttttactgcctggagtactttccttctcagatgctgcgtaccggaaacaactttaccttcagctacacctttgaggacgtgcccttccacagcagctacgctcacagccagagtttggaccggctgatgaatcctctgatcgaccagtatctgtattatctgaacaggacacaatcaaatagtggaactcttcagcagtctaggctactgtttagccaagctggacccaccagcatgtcccttcaagctaaaaactggctgcctggaccttgctacagacagcagcgtctgtcaaagcaggcaaacgacaacaacaacagcaactttccctggactgcggctacaaagtatcatctaaatggtcgggactcgttggttaatccaggaccagctatggccagccacaaagacgatgaagaaaagtttttccccatgcatggaaccctgatatttggtaaacaaggaacaaatgctaacgacgcggatttggaacatgtcatgattacagatgaagaagaaatcaggaccaccaatcccgtggctacagagcagtacggaaacgtgtcaaataatttgcaaaactcaaatactggtccaactacagaaaatgtcaatcaccagggagcgttacctggtatggtgtggcaggatcgagacgtgtacctgcagggacccatttgggccaagattcctcacaccgacggacactttcacccttctccactgatgggaggttttggactcaaacacccgcctcctcaaatcatgatcaaaaacactcctgttccagccaatccccctacaaacttcagcgcggcaaagtttgcttccttcatcacacagtattccacgggacaggtcagcgtggagatcgagtgggagctgcagaaggagaacagcaaacgctggaaccccgagatccagtacacttccaactacaacaaatctgttaatgtggactttactgtggacgctaatggtgtgtattcagagcctcgccccattggcaccagacacctgactcgtaatctgtaa

SEQ ID NO: 3739 - DNA, 2208 bp, Artificial Sequence
  Description of Artificial Sequence: Synthetic polynucleotide
atggctgccgatggttatcttccagattggctcgaggacactctctctgaaggaataagacagtggtggaagctcaaacctggcccaccaccaccaaggcccgcagagcggcatcaggacgacagcaggggtcttgtgcttcctgggtacaagtacctcggacccttcaacggactcgacaaaggagagccggtcaacgaggcagacgctgcggccctcgagcacgacaaggcctacgaccggcagctcgacagcggagacaacccgtacctcaagtacaaccacgccgacgcggagtttcaggagcgtcttaaagaagatacgtcttttgggggcaacctcggacgagcagtcttccaggcgaaaaagagggttcttgaacctctgggcctggttgaggaacctgttaagacggctccgggaaaaaagaggccggtagagcactctcctgcggagccagactcctcctcgggaaccggaaaagcgggccagcagcctgcaagaaagagattgaatttcggtcagactggagacgcagactccgtacctgacccccagcctctcggacagccaccagcagcccccacaagtttgggatctactacaatggctacaggcagtggcgcaccaatggcagacaataacgagggtgccgatggagtgggtaattcctcaggaaattggcattgcgattcccaatggctgggcgacagagtcatcaccaccagcacccgaacctgggccctgcccacctacaacaaccacctctacaagcaaatctccagccaatcaggagcatcgaacgacaaccactactttggctacagcaccccttgggggtattttgacttcaacagattccactgtcacttctccccacgtgactggcaaagactcatcaacaacaactggggattccgacccaagagactcaacttcaagctctttaacattcaagtcaaagaggtcacgcagaatgacggtacgacgacgattgccaataaccttaccagcacggttcaggtgtttactgactcggagtaccagctcccgtacgtcctcggctcggcgcatcaaggatgcctcccgccgtttccagcggacgtcttcatggtcccacagtatggatacctcaccctgaacaacgggagtcaggcggtaggacgctcttccttttactgcctggagtactttccttctcagatgctgcgtaccggaaacaactttaccttcagctacacctttgaggacgtgcccttccacagcagctacgctcacagccagagtttggaccggctgatgaatcctctgatcgaccagtatctgtattatctgaacaggacacaatcaaatagtggaactcttcagcagtctgggctactgtttagccaagctggacccaccagcatgtcccttcaagctaaaaactggctgcctggaccttgctacagacagcagcgtctgtcaaagcaggcaaacgacaacaacaacagcaactttccctggactgcggctacaaagtatcatctaaatggtcgggactcgttggttaatccaggaccagctatggccagccacaaagacgatgaagaaaagtttttccccatgcatggaaccctgatatttggtaaacaaggaacaaatgctaacgacacggatttggaacatgtcatgattacagatgaagaagaaatcaggaccaccaatcccgtggctacagagcagtacggaaacgtgtcaaataatttgcaaaactcaaatactggtccaactacagaaaatgtcaatcaccagggagcgttacctggtatggtgtggcaggatcgagacgtgtacctgcagggacccatttgggccaagattcctcacaccgacggacactttcacccttctccactgatgggaggttttggactcaaacacccgcctcctcaaatcatgatcaaaaacactcctgttccagccaatcctcctacaaacttcagcgcggcaaagtttgcttccttcatcacacagtattccacgggacaggtcagcgtggagatcgagtgggagctgcagaaggagaacagcaaacgctggaaccccgagatccagtacacttccaactacaacaaatctgttaatgtggactttactgtggacgctaatggtgtgtattcagagcctcgccccattggcaccagatacctgactcgtaatctgtaa

SEQ ID NO: 3740 - DNA, 2208 bp, Artificial Sequence
  Description of Artificial Sequence: Synthetic polynucleotide
atggctgccgatggttatcttccagattggctcgaggacactctctctgaaggaataagacagtggtggaagctcaaacctggcccaccaccaccaaggcccgcagagcggcatcaggacgacagcaggggtcttgtgcttcctgggtacaagtacctcggacccttcaacggactcgacaaaggagagccggtcaacgaggcagacgctgcggccctcgagcacgacaaggcctacgaccggcagctcgacagcggagacaacccgtacctcaagtacaaccacgccgacgcggagtttcaggagcgtcctaaagaagatacgtcttttgggggcaacctcggacgagcagtcttccaggcgaaaaagagggttcttgaacctctgggcctggttgaggaacctgttaagacggctccgggaaaaaagaggccggtagagcactctcctgcggagccagactcctcctcgggaaccggaaaagcgggccagcagcctgcaagaaagagattgaatttcggtcagactggagacgcagactccgtacctgacccccagcctctcggacagccaccagcagcccccacaagtttgggatctactacaatggctacaggcagtggcgcaccaatggcagacaataacgagggtgccgatggagtgggtaattcctcaggaaattggcattgcgattcccaatggctgggcgacagagtcatcaccaccagcacccgaacctgggccctgcccacctacaacaaccacctctacaagcaaatctccagccaatcaggagcatcgaacgacaaccactactttggctacagcaccccttgggggtattttgacttcaacagattccactgtcacttctccccacgtgactggcaaagactcattaacaacaactggggattccgacccaagagactcaacttcaagctctttaacattcaagtcaaagaggtcacgcagaatgacggtacgacgacgattgccaataaccttaccagcacggttcaggtgtttactgactcggagtaccagctcccgtacgtcctcggctcggcgcatcaaggatgcctcccgccgtttccagcggacgtcttcatggtcccacagtatggatacctcaccctgaacaacgggagtcaggcggtaggacgctcttccttttactgcctggagtactttccttctcagatgctgcgtaccggaaacaactttaccttcagctacacctttgaggacgtgcccttccacagcagctacgctcacagccagagtttggaccggctgatgaatcctctgatcgaccagtatctgtattatctgaacaggacacaatcaaatagtggaactcttcagcagtctaggctactgtttagccaagctggacccaccagcatgtcccttcaagctaaaaactggctgcctggaccttgctacagacagcagcgtctgtcaaagcaggcaaacgacaacaacaacagcaactttccctggactgcggctacaaagtatcatctaaatggtcgggactcgttggttaatccaggaccagctatggccagccacaaagacgatgaagaaaagtttttccccatgcatggaaccctgatatttggtaaacaaggaacaaatgctaacgacgcggatttggaacatgtcatgattacagatgaagaagaaatcaggaccaccaatcccgtggctacagagcagtacggaaacgtgtcaaataatttgcaaaactcaaatactggtccaactacagaaaatgtcaatcaccagggagcgttacctggtatggtgtggcaggatcgagacgtgtacctgcagggacccatttgggccaagattcctcacaccgacggacactttcacccttctccactgatgggaggttttggactcaaacacccgcctcctcaaatcatgatcaaaaacactcctgttccagccaatcctcctacaaacttcagcgcggcaaagtttgcttccttcatcacacggtattccacgggacaggtcagcgtggagatcgagtgggagctgcagaaggagaacagcaaacgctggaaccccgagatccagtacacttccaactacaacaaatctgttaatgtggactttactgtggacgctaatggtgtgtattcagagcctcgccccattggcaccagatacctgactcgtaatctgtaa

SEQ ID NO: 3741 - DNA, 2208 bp, Artificial Sequence
  Description of Artificial Sequence: Synthetic polynucleotide
atggctgccgatggttatcttccagattggctcgaggacactctctctgaaggaataagacagtggtggaagctcaaacctggcccaccaccgccaaagcccgcagagcggcataaggacgacagcaggggtcttgtgcttcctgggtacaagtacctcggacccttcaacggactcgacaagggagagccggtcaacgaggcagacgccgcggccctcgagcacgacaaggcctacgaccggcagctcgacagcggagacaacccgtacctcaagtacaaccacgccgacgcggagcttcaggagcgccttaaagaagatacgtcttttgggggcaacctcggacgagcagtattccaggcgaaaaagagggttcttgaacctctgggcctggttgaggagcctgttaagacggctccgggaaaaaagaggccggtagagcactctcctgtggagccagactcctcctcgggaaccggaaaagcgggccagcagcctgcgagaaagagattgaattttggtcagactggagacgcagactccgtacctgacccccagcctctcggacagccaccagcagcccccacaagtttgggatctactacaatggctacaggcagtggcgcaccaatggcagacaataacgagggtgccgatggagtgggtaattcctcaggaaattggcattgcgattcccaatggtcgggcgacagagtcatcaccaccagcacccgaacctgggccctgcccacctacaacaaccacctctacaagcaaatctccagccaatcaggagccagcaacgacaaccactactttggctacagcaccccctgggggtattttgacttcaacagattccactgccacttttcaccacgtgactggcaaagactcatcaacaacaactggggattccgacccaagagactcaacttcaagctctttaacattcaagtcaaaggggtcacgcagaatgacggtacgacgacgattgccaataaccttaccagcacggttcaggtgtttactgactcggagtaccagctcccgtacgtcctcggctcggcgcatcaaggatgcctcccgccgtttccagcggacgtcttcatggtcccacagtatggatacctcaccctgaacaacgggagtcaggcggtaggacgctcttccttttactgcctggagtactttccttctcagatgcttcgtaccggaaacaactttaccttcagttacacctttgaagacgttcctttccacagcagctacgctcacagtcaaagtctggaccggctgatgaatcctcttatcgaccagtacctgtattatctaaacaaaacacaatcaaatagtggaactcttcagcagtctcggctactgtttagtcaagctggacctaccagcatgtctcttcaagctaaaaactggctgcctggaccttgctacagacaacagcgtctgtcaaagcaggcaaacgacaacaacaacagcaactttccctggactgcggctacaaagtatcatctaaatggccgggactcgttggttaatccaggaccagctatggccagccacaaagacgatgaagaaaagtttttccccatgcatggaaccctgatatttggcaaacaaggaacaaatgctaacgacgcggatttggacaatgtcatgattacagatgaagaagaaatccgtaccaccaatcccgtggctacggagcagtacgggactgtgtcaaataatttgcaaaactcaaatactggtccaactactggaactgtcaatcaccaaggagcgttacctggtatggtgtggcaggatcgagacgtgtaccttcagggacccatttgggccaagattcctcacaccgatggacactttcacccttctccgctgatgggaggttttggactcaaacacccgcctcctcagatcatgatcaaaaacactcccgttccagccaatcctcccacaaacttcagttctgccaagtttgcttctttcatcacacagtattccacgggacaggttagcgtggagatcgagtgggagctgcagaaggagaacagcaaacgctggaaccccgagatccagtacacttccaactacaacaagtctgttaatgtggactttactgtggacactaatggtgtgtattcagagcctcgccccattggcaccagatacctgactcgtaatctgtaa

SEQ ID NO: 3742 - DNA, 2208 bp, Artificial Sequence
  Description of Artificial Sequence: Synthetic polynucleotide
atggctgccgatggttatcttccagattggctcgaggacattctctctgaaggaataagacagtggtggaagctcaaacctggcccaccaccaccaaagcccgcagagcggcataaggacgacagcaggggtcttgtgcttcctgggtacaagtacctcggacccttcaacggactcgacaaaggagagccggtcaacgaggcagacgccgcggccctcgagcacgacaaggcctacgaccggcagctcgacagcggagacaacccgtacctcaagtacaaccacgccgacgcggagtttcaggagcgtcttaaagaagatacgtcttttgggggcaacctcggacgagcagtcttccaggcaaaaaagagggttcttgaacctctgggcctggttgaggaacctgttaagacggctccgggaaaaaagaggccggtagagcaatctcctgcggagccagactcctcctcgggaaccggaaaggcgggcaaccagcctgcaagaaagagattgaattttggtcagactggagacgcagactccgtacctgacccccagcctctcggacatccaccagcagccccctctggtctgggatctactacaatggctacaggcagtggcgcaccaatggcagacaataacgagggtgccgatggagtgggtaattcctcaggaaattggcattgcgattcccaatggttgggcgacagagtcatcaccaccagcacccgaacctgggccctgcccacctacaacaatcacctctacaagcaaatctccagccaatcaggagccagcaacgacaaccactactttggctacagcaccccctgggggtattttgacttcaacagattccactgccacttttcaccacgtgactggcaaagactcatcaacaacaactggggattccgacccaaaagactcaacttcaagctctttaacattcaagtcaaagaggtcacgcagaatgacggtacgacgacgattgccaataaccttaccagcacggttcaggtgtttactgactcggagtaccagctcccgtacgtcctcggctcggcgcatcaaggatgcctcccgccgtttccagcggacgtcttcatggtcccacagtatggatacctcaccctgaacaacgggagtcaggcggtaggacgctcttccttttactgcctggagtactttccttctcagatgcttcgtaccggaaacaactttaccttcagttacacctttgaagacgttcctttccacagcagctacgctcacagtcaaagtctggaccggctgatgaatcctctgatagaccagtacctgtattatctaaacaaaacacaatcaaatagtggaactcttcagcagtctcggctactgtttagtcaagctggacccaccagcatgtctcttcaagctaaaaactggctgcctggaccttgctacagacaacagcgtctgtcaaagcaggcaaacgacaacaacaacagcaactttccctggactgcggctacaaagtatcatctaaatggccgggactcgttggttaatccaggaccagctatggccagccacaaagacgatgaagaaaagtttttccccatgcatggaaccctgatatttggtaaacaaggaacaaatgctaacgacgcggatttggacaatgtcatgattacagatgaagaagaaatccgcaccaccaatcccgtggctacggagcagtacgggactgtgtcaaataatttgcaaaactcaaatactggtccaactactggaactgtcaatcaccaaggagcgttacctggtatggtgtggcaggatcgagacgtgtaccttcagggacccatttgggccaagattcctcacaccgatggacactttcatccttctccactgatgggaggttttggactcaaacacccgcctcctcagatcatgatcaaaaacactcccgttccagccaatcctcctacaaacttcagttctgccaagtttgcttctttcatcacacagtattccacggggcaggtcagcgtggagatagagtgggagctgcagaaggagaacagcaaacgctggaaccccgagatccagtatacttccaactacaacaagtctgttaatgtggactttactgtggacactaatggtgtgtattcagagcctcgccccattggcaccagatacctgactcgtaatctgtaa

SEQ ID NO: 3743 - DNA, 2208 bp, Artificial Sequence
  Description of Artificial Sequence: Synthetic polynucleotide
atggctgccgatggttatcttccagattggctcgaggacattctctctgaaggaataagacagtggtggaagctcaaacctggcccaccaccaccaaagcccgcagagcggcataaggacgacagcaggggtcttgtgcttcctgggtacaagtacctcggacccttcaacggactcgacaaaggagagccggtcaacgaggcagacgccgcggccctcgagcacgacaaggcctacgaccggcagctcgacagcggagacaacccgtacctcaagtacaaccacgccgacgcggagtttcaggagcgtcttaaagaagatacgtcttttgggggcaacctcggacgagcagtcttccaggcaaaaaagagggttcttgaacctctgggcctggttgaggaacctgttaagacggctccgggaaaaaagaggccggtagagcaatctcctgcggagccagactcctcctcgggaaccggaaaggcgggcaaccagcctgcaagaaagagattgaattttggtcagactggagacgcagactccgtacctgacccccagcctctcggacagccaccagcagccccctctggtctgggatctactacaatggctacaggcagtggcgcaccaatggcagacaataacgagggtgccgatggagtgggtaattcctcaggaaattggcattgcgattcccaatggttgggcgacagagtcatcaccaccagcacccgaacctgggccctgcccacctacaacaatcacctctacaagcaaatctccagccaatcaggagccagcaacgacaaccactactttggctacagcaccccctgggggtattttgacttcaacagattccactgccacttttcaccacgtgactggcaaagactcatcaacaacaactggggattccgacccaaaagactcaacttcaagctctttaacattcaagtcaaagaggtcacgcagaatgacggtacgacgacgattgccaataaccttaccagcacggttcaggtgtttactgactcggagtaccagctcccgtacgtcctcggctcggcgcatcaaggatgcctcccgccgtttccagcggacgtcttcatggtcccacagtatggatacctcaccctgaacaacgggagtcaggcggtaggacgctcttccttttactgcctggagtactttccttctcagatgcttcgtaccggaaacaactttaccttcagttacacctttgaagacgttcctttccacagcagctacgctcacagtcaaagtctggaccggctgatgaatcctctgatagaccagtacctgtattatctaaacaaaacacaatcaaatagtggaactcttcagcagtctcggctactgtttagtcaagctggacccaccagcatgtctcttcaagctaaaaactggctgcctggaccttgctacagacaacagcgtctgtcaaagcaggtaaacgacaacaacaacagcaactttccctggactgcggctacaaagtatcatctaaatggccgggactcgttggttaatccaggaccagctatggccagccacaaagacgatgaagaaaagtttttccccatgcatggaaccctgatatttggtaaacaaggaacaaatgctaacgacgcggatttggacaatgtcatgattacagatgaagaagaaatccgcaccaccaatcccgtggctacggagcagtacgggactgtgtcaaataatttgcaaaactcaaatactggtccaactactggaactgtcaatcaccaaggagcgttacctggtatggtgtggcaggatcgagacgtgtaccttcagggacccatttgggccaagattcctcacaccgatggacactttcatccttctccactgatgggaggttttggactcaaacacccgcctcctcagatcatgatcaaaaacactcccgttccagccaatcctcctacaaacttcagttctgccaagtttgcttctttcatcacacagtattccacggggcaggtcagcgtggagatagagtgggagctgcagaaggagaacagcaaacgctggaaccccgagatccagtatacttccaactacaacaagtctgttaatgtggactttactgtggacactaatggtgtgtattcagagcctcgccccattggcaccagatacctgactcgtaatctgtaa

SEQ ID NO: 3744 - DNA, 2208 bp, Artificial Sequence
  Description of Artificial Sequence: Synthetic polynucleotide
atggctgccgatggttatcttccagattggctcgaggacattctctctgaaggaataagacagtggtggaagctcaaacctggcccaccaccaccaaagcccgcagagcggcataaggacgacagcaggggtcttgtgcttcctgggtacaagtacctcggacccttcaacggactcgacaaaggagagccggtcaacgaggcagacgccgcggccctcgagcacgacaaggcctacgaccggcagctcgacagcggagacaacccgtacctcaagtacaaccacgccgacgcggagtttcaggagcgtcttaaagaagatacgtcttttgggggcaacctcggacgagcagtcttccaggcaaaaaagagggttcttgaacctctgggcctggttgaggaacctgttaagacggctccgggaaaaaagaggccggtagagcaatctcctgcggagccagactcctcctcgggagccggaaaggcgggcaaccagcctgcaagaaagagattgaattttggtcagactggagacgcagactccgtacctgacccccagcctctcggacagccaccagcagccccctctggtctgggatctactacaatggctacaggcagtggcgcaccaatggcagacaataacgagggtgccgatggagtgggtaattcctcaggaaattggcattgcgattcccaatggttgggcgacagagtcatcaccaccagcacccgaacctgggccctgcccacctacaacaatcacctctacaagcaaatctccagccaatcaggagccagcaacgacaaccactactttggctacagcaccccctgggggtattttgacttcaacagattccactgccacttttcaccacgtgactggcaaagactcatcaacaacaactggggattccgacccaaaagactcaacttcaagctctttaacattcaagtcaaagaggtcacgcagaatgacggtacgacgacgattgccaataaccttaccagcacggttcaggtgtttactgactcggagtaccagctcccgtacgtcctcggctcggcgcatcaaggatgcctcccgccgtttccagcggacgtcttcatggtcccacagtatggatacctcaccctgaacaacgggagtcaggcggtaggacgctcttccttttactgcctggagtactttccttctcagatgcttcgtaccggaaacaactttaccttcagttacacctttgaagacgttcctttccacagcagctacgctcacagtcaaagtctggaccggctgatgaatcctctgatagaccagtacctgtattatctaaccaaaacacaatcaaatagtggaactcttcagcagtctcggctactgtttagtcaagctggacccaccagcatgtctcttcaagctaaaaactggctgcctggaccttgctacagacaacagcgtctgtcaaagcaggcaaacgacaacaacaacagcaactttccctggactgcggctacaaagtatcatctaaatggccgggactcgttggttaatccaggaccagctatggccagccacaaagacgatgaagaaaagtttttccccatgcatggaaccctgatatttggtaaacaaggaacaaatgctaacgacgcggatttggacaatgtcatgattacagatgaagaagaaatccgcaccaccaatcccgtggctacggagcagtacgggactgtgtcaaataatttgcaaaactcaaatactggtccaactactggaactgtcgatcaccaaggagcgttacctggtatggtgtggcaggatcgagacgtgtaccttcagggacccatttgggccaagattcctcacaccgatggacactttcatccttctccactgatgggaggttttggactcaaacacccgcctcctcagatcatgatcaaaaacactcccgttccagccaatcctcctacaaacttcagttctgccaagtttgcttctttcatcacacagtattccacggggcaggtcagcgtggagatagagtgggagctgcagaaggagaacagcaaacgctggaaccccgagatccagtatacttccaactacaacaagtctgttaatgtggactttactgtggacactaatggtgtgtattcagagcctcgccccattggcaccagatacctgactcgtaatctgtaa

SEQ ID NO: 3745 - DNA, 2208 bp, Artificial Sequence
  Description of Artificial Sequence: Synthetic polynucleotide
atggctgccgatggttatcttccagattggctcgaggacattctctctgaaggaataagacagtggtggaagctcaaacctggcccaccaccaccaaagcccgcagagcggcataaggacgacagcaggggtcttgtgcttcctgggtacaagtacctcggacccttcaacggactcgacaaaggagagccggtcaacgaggcagacgccgcggccctcgagcacgacaaggcctacgaccggcagctcgacagcggagacaacccgtacctcaagtacaaccacgccgacgcggagtttcaggagcgtcttaaagaagatacgtcttttgggggcaacctcggacgagcagtcttccaggcaaaaaagagggttcttgaacctctgggcctggttgaggaacctgttaagacggctccgggaaaaaagaggccggtagagcaatctcctgcggagccagactcctcctcgggaaccggaaaggcgggcaaccagcctgcaagaaagagattgaattttggtcagactggagacgcagactccgtacctgacccccagcctctcggacagccaccagcagccccctctggtctgggatctactacaatggctacaggcagtggcgcaccaatggcagacaataacgagggtgccgatggagtgggtaattcctcaggaaattggcattgcgattcccaatggttgggcgacagagtcatcaccaccagcacccgaacctgggccctgcccacctacaacaatcacctctacaagcaaatctccagccaatcaggagccagcaacgacaaccactactttggctacagcaccccctgggggtattttgacttcaacagattccactgccacttttcaccacgtgactggcaaagactcatcaacaacaactggggattccgacccaaaagactcaacttcaagctctttaacattcaagtcaaagaggtcacgcagaatgacggtacgacgacgattgccaataaccttaccagcacggttcaggtgtttactgactcggagtaccagctcccgtacgtcctcggctcggcgcatcaaggatgcctcccgccgtttccagcggacgtcttcatggtcccacagtatggatacctcaccctgaacaacgggagtcaggcggtaggacgctcttccttttactgcctggagtactttccttctcagatgcttcgtaccggaaacaactttaccttcagttacacctttgaagacgttcctttccacagcagctacgctcacagtcaaagtctggaccggctgatgaatcctctgatagaccagtacctgtattatctaaacaaaacacaatcaaatagtggaactcttcagcagtctcggctactgcttagtcaagctggacccaccagcatgtctcttcaagctaaaaactggctgcctggaccttgctacagacaacagcgtctgtcaaagcaggcaaacgacaacaacaacagcaactttccctggactgcggctacaaagtatcatctaaatggccgggactcgttggttaatccaggaccagctatggccagccacaaagacgatgaagaaaagtttttccccatgcatggaaccctgatatttggtaaacaaggaacaaatgctaacgacgcggatttggacaatgtcatgattacagatgaagaagaaatccgcaccaccaatcccgtggctacggagcagtacgggactgtgtcaaataatttgcaaaactcaaatactggtccaactactggaactgtcaatcaccaaggagcgttacctggtatggtgtggcaggatcgagacgtgtaccttcagggacccatttgggccaagattcctcacaccgatggacactttcatccttctccactgatgggaggttttggactcaaacacccgcctcctcagatcatgatcaaaaacactcccgttccagccaatcctcctacaaacttcagttctgccaagtttgcttctttcatcacacagtattccacggggcaggtcagcgtggagatagagtgggagctgcagaaggagaacagcaaacgctggaaccccgagatccagtatacttccaactacaacaagtctgttaatgtggactttactgtggacactaatggtgtgtattcagagcctcgccccattggcaccagatacctgactcgtaatctgtaa

SEQ ID NO: 3746 - DNA, 2208 bp, Artificial Sequence
  Description of Artificial Sequence: Synthetic polynucleotide
atggctgccgatggttatcttccagattggctcgaggacactctctctgaaggaataagacagtggtggaagctcaaacctggcccaccaccgccaaagcccgcagagcggcataaggacgacagcaggggtcttgtgcttcctgggtacaagtacctcggacccttcaacggactcgacaagggagagccggtcaacgaggcagacgccgcggccctcgagcacgacaaggcctacgaccggcagctcgacagcggagacaacccgtacctcaagtacaaccacgccgacgcggagtttcaggagcgccttaaagaagatacgtcttttgggggcaacctcggacgagcagtattccaggcgaaaaagagggttcttgaacctctgggcctggttgaggagcctgttaagacggctccgggaaaaaagaggccggtagagcactctcctgtggagccagactcctcctcgggaaccggaaaagcgggccagcagcctgcgagaaagagattgaattttggtcagactggagacgcagactccgtacctgacccccagcctctcggacagccaccagcagcccccacaagtttgggatctactacaatggctacaggcagtggcgcaccaatggcagacaataacgagggtgccgatggagtggataattcctcaggaaattggcattgcgattcccaatggtcgggcgacagagtcatcaccaccagcacccgaacctgggccctgcccacctacaacaaccacctctacaagcaaatctccagccaatcaggagccagcaacgacaaccactactttggctacagcaccccctgggggtattttgacttcaacagattccactgccacttttcaccacgtgactggcaaagactcatcaacaacaactggggattccgacccaagagactcaacttcaagctctttaacattcaagtcaaagaggtcacgcagaatgacggtacgacgacgattgccaataaccttaccagcacggttcaggtgtctactgactcggagtaccagctcccgtacgtcctcggctcggcgcatcaaggatgcctcccgccgtttccagcggacgtcttcatggtcccacagtatggatacctcaccctgaacaacgggagtcaggcggtaggacgctcttccttttactgcctggagtactttccttctcagatgcttcgtaccggaaacaactttaccttcagttacacctttgaagacgttcctttccacagcagctacgctcacagtcaaagtctggaccggctgatgaatcctcttatcgaccagtacctgtattatctaaacaaaacacaatcaaatagtggaactcttcagcagtctcggctactgtttagtcaagctggacctaccagcatgtctcttcaagctaaaaactggctgcctggaccttgctacagacaacagcgtctgtcaaagcaggcaaacgacaacaacaacagcaactttccctggactgcggctacaaagtatcatctaaatggccgggactcgttggttaatccaggaccagctatggccagccacaaagacgatgaagaaaagtttttccccatgcatggaaccctgatatttggcaaacaaggaacaaatgctaacgacgcggatttggacaatgtcatgattacagatgaagaagaaatccgtaccaccaatcccgtggctacggagcagtacgggactgtgtcaaataatttgcaaaactcaaatactggtccaactactggaactgtcaatcaccaaggagcgttacctggtatggtgtggcaggatcgagacgtgtaccttcagggacccatttgggccaagattcctcacaccgatggacactttcacccttctccgctgatgggaggttttggactcaaacacccgcctcctcagatcatgatcaaaaacactcccgttccagccaatcctcccacaaacttcagttctgccaagtttgcttctttcatcacacagtattccacgggacaggttagcgtggagatcgagtgggagctgcagaaggagaacagcaaacgctggaaccccgagatccagtacacttccaactacaacaagtctgttaatgtggactttactgtggacactaatggtgtgtattcagagcctcgccccattggcaccagatacctgactcgtaatctgtaa

SEQ ID NO: 3747 - DNA, 2208 bp, Artificial Sequence
  Description of Artificial Sequence: Synthetic polynucleotide
atggctgccgatggttatcttccagattggctcgaggacactctctctgaaggaataagacagtggtggaagctcaaacctggcccaccaccgccaaagcccgcagagcggcataaggacgacagcaggggtcttgtgcttcctgggtacaagtacctcggacccttcaacggactcgacaagggagagccggtcaacgaggcagacgccgcggccctcgagcacgacaaggcctacgaccggcagctcgacagcggagacaacccgtacctcaagtacaaccacgccgacgcggagtttcaggagcgccttaaagaagatacgtcttttgggggcaacctcggacgagcagtattccaggcgaaaaagagggttcttgaacctctgggcctggttgaggagcctgttaagacggctccgggaaaaaagaggccggtagagcactctcctgtggagccagactcctcctcgggaaccggaaaagcgggccagcagcctgcgagaaagagattgaattttggtcagactggagacgcagactccgtacctgacccccagcctctcggacagccaccagcagcccccacaagtttgggatctactacaatggctacaggcagtggcgcaccaatggcagacaataacgagggtgccgatggagtgggtaattcctcaggaaattggcattgcgattcccaatggtcgggcgacagagtcatcaccaccagcacccgaacctgggccctgcccacctacaacaaccacctctacaagcaaatctccagccaatcaggagccagcaacgacaaccactactttggctacagcaccccctgggggtattttgacttcaacagattccactgccacttttcaccacgtgactggcaaagactcatcaacaacaactggggattccgacccaagagactcaacttcaagctctttaacattcaagtcaaagaggtcacgcagaatgacggtacgacgacgattgccaataaccttaccagcacggttcaggtgtttactgactcggagtaccagctcccgtacgtcctcggctcggcgcatcaaggatgcctcccgccgtttccggcggacgtcttcatggtcccacagtatggatacctcaccctgaacaacgggagtcaggcggtaggacgctcttccttttactgcctggagtactttccttctcagatgcttcgtaccggaaacaactttaccttcagttacacctttgaagacgttcctttccacagcagctacgctcacagtcaaagtctggaccggctgatgaatcctcttatcgaccagtacctgtattatctaaacaaaacacaatcaaatagtggaactcttcagcagtctcggctactgtttagtcaagctggacctaccagcatgtctcttcaagctaaaaactggctgcctggaccttgctgcagacaacagcgtctgtcaaagcaggcaaacgacaacaacaacagcaactttccctggactgcggctacaaagtatcatctaaatggccgggactcgttggttaatccaggaccagctatggccagccacaaagacgatgaagaaaagtttttccccatgcatggaaccctgatatttggcaaacaaggaacaaatgctaacgacgcggatttggacaatgtcatgattacagatgaagaagaaatccgtaccaccaatcccgtggctacggagcagtacgggactgtgtcaaataatttgcaaaactcaaatactggtccaactactggaactgtcaatcaccaaggagcgttacctggtatggtgtggcaggatcgagacgtgtaccttcagggacccatttgggccaagattcctcacaccgatggacactttcacccttctccgctgatgggaggttttggactcaaacacccgcctcctcagatcatgatcaaaaacactcccgttccagccaatcctcccacaaacttcagttctgccaagtttgcttctttcatcacacagtattccacgggacaggttagcgtggagatcgagtgggagctgcagaaggagaacagcaaacgctggaaccccgagatccagtacacttccaactacaacaagtctgttaatgtggactttactgtggacactaatggtgtgtattcagagcctcgccccattggcaccagatacctgactcgtaatctgtaa

SEQ ID NO: 3748 - DNA, 2208 bp, Artificial Sequence
  Description of Artificial Sequence: Synthetic polynucleotide
atggctgccgatggttatcttccagattggctcgaggacattctctctgaaggaataagacagtggtggaagctcaaacctggcccaccaccaccaaagcccgcagagcggcataaggacgacagcaggggtctcgtgcttcctgggtacaagtacctcggacccttcaacggactcgacaaaggagagccggtcaacgaggcagacgccgcggccctcgagcacgacaaggcctacgaccggcagctcgacagcggagacaacccgtacctcaagtacaaccacgccgacgcggagtttcaggagcgtcttaaagaagatacgtcttttgggggcaacctcggacgagcagtcttccaggcaaaaaagagggttcttgaacctctgggcctggttgaggaacctgttaagacggctccgggaaaaaagaggccggtagagcaatctcctgcggagccagactcctcctcgggaaccggaaaggcgggcaaccagcctgcaagaaagagattgaattttggtcagactggagacgcagactccgtacctgacccccagcctctcggacagccaccagcagccccctctggtctgggatctactacaatggctacaggcagtggcgcaccaatggcagacaataacgagggtgccgatggagtgggtaattcctcaggaaattggcattgcgattcccaatggttgggcgacagagtcatcaccaccagcacccgaacctgggccctgcccacctacaacaatcacctctacaagcaaatctccagccaatcaggagccagcaacgacaaccactactttggctacagcaccccctgggggtattttgacttcaacagattccactgccacttttcaccacgtgactggcaaagactcatcaacaacaactggggattccgacccaaaagactcaacttcaagctctttaacattcaagtcaaagaggtcacgcagaatgacggtacgacgacgattgccaataaccttaccagcacggttcaggtgtttactgactcggagtaccagctcccgtacgtcctcggctcggcgcatcaaggatgcctcccgccgtttccagcggacgtcttcatggtcccacagtatggatacctcaccctgaacaacgggagtcaggcggtaggacgctcttccttttactgcctggagtactttccttctcagatgcttcgtaccggaaacaactttaccttcagttacacctttgaagacgttcctttccacagcagctacgctcacagtcaaagtctggaccggctgatgaatcctctgatagaccagtacctgtattatctaaacaaaacacaatcaaatagtggaactcttcagcagtctcggctactgtttagtcaagctggacccaccagcatgtctcttcaagctaaaaactggctgcctggaccttgctacagacaacagcgtctgtcaaagcaggcaaacgacaacaacaacagcaactttccctggactgcggctacaaagtatcatctaaatggccgggactcgttggttaatccaggaccagctatggccagccacaaagacgatgaagaaaagtttttccccatgcatggaaccctgatatttggtaaacaaggaacaaatgctaacgacgcggatttggacaatgtcatgattacagatgaagaagaaatccgcaccaccaatcccgtggctacggagcagtacgggactgtgtcaaataatttgcaaaactcaaatactggtccaactactggaactgtcaatcaccaaggagcgttacctggtatggtgtggcaggatcgagacgtgtaccttcagggacccatttgggccaagattcctcacaccgatggacactttcatccttctccactgatgggaggttttggactcaaacacccgcctcctcagatcatgatcaaaaacactcccgttccagccaatcctcctacaaacttcagttctgccaagtttgcttctttcatcacacagtattccacggggcaggtcagcgtggagatagagcgggagctgcagaaggagaacagcaaacgctggaaccccgagatccagtatacttccaactacaacaagtctgttaatgtggactttactgtggacactaatggtgtgtattcagagcctcgccccattggcaccagatacctgactcgtaatctgtaa

SEQ ID NO: 3749 - DNA, 2208 bp, Artificial Sequence
  Description of Artificial Sequence: Synthetic polynucleotide
atggctgccgatggttatcttccagattggctcgaggacattctctctgaaggagtaagacagtggtggaagctcaaacctggcccaccaccaccaaagcccgcagagcggcataaggacgacagcaggggtcttgtgcttcctgggtacaagtacctcggacccttcaacggactcgacaaaggagagccggtcaacgaggcagacgccgcggccctcgagcacgacaaggcctacgaccggcagctcgacagcggagacaacccgtacctcaagtacaaccacgccgacgcagagtttcaggagcgtcttaaagaagatacgtcttttgggggcaacctcggacgagcagtcttccaggcaaaaaagagggttcttgaacctctgggcctggttgaggaacctgttaagacggctccgggaaaaaagaggccggtagagcaatctcctgcggagccagactcctcctcgggaaccggaaaggcgggcaaccagcctgcaagaaagagattgaattttggtcagactggagacgcagactccgtacctgacccccagcctctcggacagccaccagcagccccctctggtctgggatctactacaatggctacaggcagtggcgcaccaatggcagacaataacgagggtgccgatggagtgggtaattcctcaggaaattggcattgcgattcccaatggttgggcgacagagtcatcaccaccagcacccgaacctgggccctgcccacctacaacaatcacctctacaagcaaatctccagccaatcaggagccagcaacgacaaccactactttggctacagcaccccctgggggtattttgacttcaacagattccactgccacttttcaccacgtgactggcaaagactcatcaacaacaactggggattccgacccaaaagactcaacttcaagctctttaacattcaagtcaaagaggtcacgcagaatgacggtacgacgacgattgccaataaccttaccagcacggttcaggtgtttactgactcggagtaccagctcccgtacgtcctcggctcggcgcatcaaggatgcctcccgccgtttccagcggacgtcttcatggtcccacagtatggatacctcaccctgaacaacgggagtcaggcggtaggacgctcttccttttactgcctggagtactttccttctcagatgcttcgtaccggaaacaactttaccttcagttacacctttgaagacgttcctttccacagcagctacgctcacagtcaaagtctggaccggctgatgaatcctctgatagaccagtacctgtattatctaaacaaaacacaatcaaatagtggaactcttcagcagtctcggctactgtttagtcaagctggacccaccagcatgtctcttcaagctaaaaactggctgcctggaccttgctacagacaacagcgtctgtcaaagcaggcaaacgacaacaacaacagcaactttccctggactgcggctacaaagtatcatctaaatggccgggactcgttggttaatccaggaccagctatggccagccacaaagacgatgaagaaaagtttttccccatgcatggaaccctgatatttggtaaacaaggaacaaatgctaacgacgcggatttggacaatgtcatgattacagatgaagaagaaatccgcaccaccaatcccgtggctacggagcagtacgggactgtgtcaaataatttgcaaaactcaaatactggtccaactactggaactgtcaatcaccaaggagcgttacctggtatggtgtggcaggatcgagacgtgtaccttcagggacccatttgggccaagattcctcacaccgatggacactttcatccttctccactgatgggaggttttggactcaaacacccgcctcctcagatcatgatcaaaaacactcccgttccagccaatcctcctacaaacttcagttctgccaagtttgcttctttcatcacacagtattccacggggcaggtcagcgtggagatagagtgggagctgcagaaggagaacagcaaacgctggaaccccgagatccagtatacttccaactacaacaagtctgttaatgtggactttactgtggacactaatggtgtgtattcagagcctcgccccattggcaccagatacctgactcgtaatctgtaa

SEQ ID NO: 3750 - DNA, 2208 bp, Artificial Sequence
  Description of Artificial Sequence: Synthetic polynucleotide
atggctgccgatggttatcttccagattggctcgaggacactctctctgaaggaataagacagtggtggaagctcaaacctggcccaccaccgccaaagcccgcagagcggcataaggacgacagcaggggtcttgtgcttcctgggtacaagtacctcggacccttcaacggactcgacaagggagagccggtcaacgaggcagacgccgcggccctcgagcacgacaaggcctacgaccggcagctcgacagcggagacaacccgtacctcaagtacaaccacgccgacgcggagtttcaggagcgccttaaagaagatacgtcttttgggggcaacctcggacgagcagtattccaggcgaaaaagagggttcttgaacctctgggcctggttgaggagcctgttaagacggctccgggaaaaaagaggccggtagagcactctcctgtggagccagactcctcctcgggaaccggaaaagcgggccagcagcctgcgagaaagagattgaattttggtcagactggagacgcagactccgtacctgacccccagcctctcggacagccaccagcagcccccacaagtttgggatctactacaatggctacaggcagtggcgcaccaatggcagacaataacgagggtgccgatggagtgggtaattcctcaggaaattggcattgcgattcccaatggtcgggcgacagagtcatcaccaccagcacccgaacctgggccctgcccacctacaacaaccacctctacaagcaaatctccagccaatcaggagccagcaacgacaaccactactttggctacagcaccccctgggggtattttgacttcaacagattccactgccacttttcaccacgtgactggcaaagactcatcaacaacaactggggattccgacccaagagactcaacttcaagctctttaacattcaagtcaaagaggtcacgcagaatgacggtacgacgacgattgccaataaccttaccagcacggttcaggtgtctactgactcggagtaccagctcccgtacgtcctcggctcggcgcatcaaggatgcctcccgccgtttccagcggacgtcttcatggtcccacagtatggatacctcaccctgaacaacgggagtcaggcggtaggacgctcttccttttactgcctggagtactttccttctcagatgcttcgtaccggaaacaactttaccttcagttacacctttgaagacgttcctttccacagcagctacgctcacagtcaaagtctggaccggctgatgaatcctcttatcgaccagtacctgtattatctaaacaaaacacaatcaaatagtggaactcttcagcagtctcggctactgtttagtcaagctggacctaccagcatgtctcttcaagctaaaaactggctgcctggaccttgctacagacaacagcgtctgtcaaagcaggcaaacgacaacaacaacagcaactttccctggactgcggctacaaagtatcatctaaatggccgggactcgttggttaatccaggaccagctatggccagccacaaagacgatgaagaaaagtttttccccatgcatggaaccctgatatttggcaaacaaggaacaaatgctaacgacgcggatttggacaatgtcatgattacagatgaagaagaaatccgtaccaccaatcccgtggctacggagcagtacgggactgtgtcaaataatttgcaaaactcaaatactggtccaactactggaactgtcaatcaccaaggagcgttacctggtatggtgtggcaggatcgagacgtgtaccttcagggacccatttgggccaagattcctcacaccgatggacactttcacccttctccgctgatgggaggttttggactcaaacacccgcctcctcagatcatgatcaaaaacactcccgttccagccaatcctcccacaaacttcagttctgccaagtttgcttctttcatcacacagtattccacgggacaggttagcgtggagatcgagtgggagctgcagaaggagaacagcaaacgctggaaccccgagatccagtacacttccaactacaacaagtctgttaatgtggactttactgtggacactaatggtgtgtattcagagcctcgccccattggcaccagatacctgactcgtaatctgtaa

SEQ ID NO: 3751 - DNA, 2208 bp, Artificial Sequence
  Description of Artificial Sequence: Synthetic polynucleotide
atggctgccgatggttatcttccagattggctcgaggacattctctctgaaggaataagacagtggtggaagctcaaacctggcccaccaccaccaaagcccgcagagcggcataaggacgacagcaggggtcttgtgcttcctgggtacaagtacctcggacccttcaacggactcgacaaaggagagccggtcaacgaggcagacgccgcggccctcgagcacgacaaggcctacgaccggcagctcgacagcggagacaacccgtacctcaagtacaaccacgccgacgcggagtttcaggagcgtcttaaagaagatacgtcttttgggggcaacctcggacgagcagtcttccaggcaaaaaagagggttcttgaacctctgggcctggttgaggaacctgttaagacggctccgggaaaaaagaggccggtagagcaatctcctgcggagccagactcctcctcgggaaccggaaaggcgggcaaccagcctgcaagaaagagattgaattttggtcagactggagacgcagactccgtacctgacccccagcctctcggacagccaccagcagccccctctggtctgggatctactacaatggctacaggcagtggcgcaccaatggcagacaataacgagggtgccgatggagtgggtaattcctcaggaaattggcattgcgattcccaatggttgggcgacagagtcatcaccaccagcacccgaacctgggccctgcccacctacaacaatcacctctacaagcaaatctccagccaatcaggagccagcaacgacaaccactactttggctacagcaccccctgggggtattttgacttcaacagattccactgccacttttcaccacgtgactggcaaagactcatcaacaacaactggggattccgacccaaaagactcaacttcaagctctttaacattcaagtcaaagaggtcacgcagaatgacggtacgacgacgattgccaataaccttaccagcacggttcaggtgtttactgactcggagtaccagctcccgtacgtcctcggctcggcgcatcaaggatgcctcccgccgtttccagcggacgtcttcatggtcccacagtatggatacctcaccctgaacaacgggagtcaggcggtaggacgctcttccttttactgcctggagtactttccttctcagatgcttcgtaccggaaacaactttaccttcagttacacctttgaagacgttcctttccacagcagctacgctcacagtcaaagtctggaccggctgatgaatcctctgatagaccagtacctgtattatctaaacaaaacacaatcaaatagtggaactcttcagcagtctcggctactgtttagtcaagctggacccaccagcatgtctcttcaagctaaaaactggctgcctggaccttgctacagacaacagcgtctgtcaaagcaggcaaacgacaacaacaacagcaactttccctggactgcggctacaaagtatcatctaaatggccgggactcgttggttaatccaggaccagctatggccagccacaaagacgatgaagaaaagtttttccccatgcatggaaccctgatatttggtaaacaaggaacaaatgctaacgacgcggatttggacaatgtcatgattacagatgaagaagaaatccgcaccaccaatcccgtggctacggagcagtacgggactgtgtcaaataatttgcaaaactcaaatactggtccaactactggaactgtcaatcaccaaggagcgttacctggtatggtgtggcaggatcgagacgtgtaccttcagggacccatttgggccaagattcctcacaccgatggacactttcatccttctccactgatgggaggttttggactcaaacacccgcctcctcagatcatgatcaaaaacactcccgttccagtcaatcctcctacaaacttcagttctgccaagtttgcttctttcatcacacagtattccacggggcaggtcagcgtggagatagagtgggagctgcagaaggagaacagcaaacgctggaaccccgagatccagtatacttccaactacaacaagtctgttaatgtggactttactgtggacactaatggtgtgtattcagagcctcgccccattggcaccagatacctgactcgtaatctgtaa

SEQ ID NO: 3752 - DNA, 2208 bp, Artificial Sequence
  Description of Artificial Sequence: Synthetic polynucleotide
atggctgccgatggttatcttccagattggctcgaggacactctctctgaaggaataagacagtggtggaagctcaaacctggcccaccaccgccaaagcccgcagagcggcataaggacgacagcaggggtcttgtgcttcctgggtacaagtacctcggacccttcaacggactcgacaaaggagagccggtcaacgaggcagacgccgcggccctcgagcacgacaaggcctacgaccggcagctcgacagcggagacaacccgtacctcaagtacaaccacgccgacgcggagtttcaggagcgccttaaagaagatacgtcttttgggggcaacctcgcaagagcagtattccaggcgaaaaagagggttcttgaacctctgggcctggttgaggagcctgttaagacggctccgggaaaaaagaggccggtagagcactctcctgcggagccagattcctcctccggaactggaaagtcgggccaacagcctgcaagaaagagattgaattttggtcagactggagacgcagactccgtacctgacccccagcctctcggacagccaccagcagccccctctggtctgggatctactacaatggctacaggcagtggcgcaccaatggcagacaataacgagggtgccgatggagtgggtaattcctcaggaaattggcattgcgattcccaatggttgggcgacagagtcatcaccaccagcacccgaacctgggccctgcccacctacaacaatcacctctacaagcaaatctccagccaatcaggagccagcaacgacaaccactactttggctacagcaccccctgggggtattttgacttcaacagattccactgccacttttcaccacgtgactggcaaagactcatcaacaacaactggggattccgacccaaaagactcaacttcaagctctttaacattcaagtcaaagaggtcacgcagaatgacggtacgacgacgattgccaataaccttaccagcacggttcaggtgtttactgactcggagtaccagctcccgtacgtcctcggctcggcgcatcaaggatgcctcccgccgtttccagcggacgtcttcatggtcccacagtatggatacctcaccctgaacaacgggagtcaggcggtaggacgctcttccttttactgcctggagtactttccttctcagatgcttcgtaccggaaacaactttaccttcagttacacctttgaagacgttcctttccacagcagctacgctcacagtcaaagtctggaccggctgatgaatcctctgatagaccagtacctgtattatctaaacaaaacacaatcaaatagtggaactcttcagcagtctcggctactgtttagtcaagctggacccaccagcatgtctcttcaagctaaaaactggctgcctggaccttgctacagacaacagcgtctgtcaaagcaggcaaacgacaacaacaacagcaactttccctggactgcggctacaaagtatcatctaaatggccgggactcgttggttaatccaggaccagctatggccagccacaaagacgatgaagaaaagtttttccccatgcatggaaccctgatatttggtaaacaaggaacaaatgctaacgacgcggatttggacaatgtcatgattacagatgaagaagaaatccgcaccaccaatcccgtggctacggagcagtacgggactgtgtcaaataatttgcaaaactcaaatactggtccaactactggaactgtcaatcaccaaggagcgttacctggtatggtgtggcaggatcgagacgtgtaccttcagggacccatttgggccaagattcctcacaccgatggacactttcatccttctccactgatgggaggttttggactcaaacacccgcctcctcagatcatgatcaaaaacactcccgttccagccaatcctcctacaaacttcagttctgccaagtttgcttctttcatcacacagtattccacggggcaggtcagcgtggagatagagtgggagctgcagaaggagaacagcaaacgctggaaccccgagatccagtatacttccaactacaacaagtctgttaatgtggactttactgtggacactaatggtgtgtattcagagcctcgccccattggcaccagatacctgactcgtaatctgtaa

SEQ ID NO: 3753 - DNA, 2208 bp, Artificial Sequence
  Description of Artificial Sequence: Synthetic polynucleotide
atggctgccgatggttatcttccagattggctcgaggacattctctctgaaggaataagacagtggtggaagctcaaacctggcccaccaccaccaaagcccgcagagcggcataaggacgacagcaggggtcttgtgcttcctgggtacaagtacctcggacccttcaacggactcgacaaaggagagccggtcaacgaggcagacgccgcggccctcgagcacgacaaggcctacgaccggcagctcgacagcggagacaacccgtacctcaagtacaaccacgccgacgcggagtttcaggagcgtcttaaagaagatacgtcttttgggggcaacctcggacgagcagtcttccaggcaaaaaagagggttcttgaacctctgggcctggttgaggaacctgttaagacggctccgggaaaaaagaggccggtagagcaatctcctgcggagccagactcctcctcgggaaccggaaaggcgggcaaccagcctgcaagaaagagattgaattttggtcagactggagacgcagactccgtacctgacccccagcctctcggacagccaccagcagccccctctggtctgggatctactacaatggctacaggcagtggcgcaccaatggcagacaataacgagggtgccgatggagtgggtaattcctcaggaaattggcattgcgattcccaatggttgggcgacagagtcatcaccaccagcacccgaacctgggccctgcccacctacaacaatcacctctacaagcaaatctccagccaatcaggagccagcaacgacaaccactactttggctacagcaccccctgggggtattttgacttcaacagattccactgccacttttcaccacgtgactggcaaagactcatcaacaacaactggggattccgacccaaaagactcaacttcaagctctttaacattcaagtcaaagaggtcacgcagaatgacggtacgacgacgattgccaataaccttaccagcacggttcaggtgtttactgactcggagtaccagctcccgtacgtcctcggctcggcgcatcaaggatgcctcccgccgtttccagcggacgtcttcatggtcccacagtatggatacctcaccctgaacaacgggagtcaggcggtaggacgctcttccttttactgcctggagtactttccttctcagatgcttcgtaccggaaacaactttaccttcagttacacctttgaagacgttcctttccacagcagctacgctcacagtcaaagtctggaccggctgatgaatcctctgatagaccagtacctgtattatctaaacaaaacacaatcaaatagtggaactcttcagcagtctcggctactgtttagtcaagctggacccaccagcatgtctcttcaagctaaaaactggctgcctggaccttgctacagacaacagcgtctgtcaaagcaggcaaacgacaacaacaacagcaactttccctggactgcggctacaaagtatcatctaaatggccgggactcgttggttaatccaggaccagctatggccagccacaaagacgatgaagaaaagtttttccccatgcatggaaccctgatatttggtaaacaaggaacaaatgctaacgacgcggatttggacaatgtcatgattacagatgaagaagaaatccgcaccaccaatcccgtggctacggagcagtacgggactgtgtcaaataatttgcaaaactcaaatactggtccaactactggaactgtcaatcaccaaggagcgttacctggtatggtgtggcaggatcgagacgtgtaccttcagggacccatttgggccaagattcctcacaccgatggacactttcatccttccccactgatgggaggttttggactcaaacacccgcctcctcagatcatgatcaaaaacactcccgttccagccaatcctcctacaaacttcagttctgccaagtttgcttctttcatcacacagtattccacggggcaggtcagcgtggggatagagtgggagctgcagaaggagaacagcaaacgctggaaccccgagatccagtatacttccaactacaacaagtctgttaatgtggactttactgtggacactaatggtgtgtattcagagcctcgccccattggcaccagatacctgactcgtaatctgtaa

SEQ ID NO: 3754 - DNA, 2205 bp, Artificial Sequence
  Description of Artificial Sequence: Synthetic polynucleotide
atggctgccgatggttatcttccagattggctcgaggacattctctctgaaggaataagacagtggtggaagctcaaacctggcccaccaccaccaaagcccgcagagcggcataaggacgacagcaggggtcttgtgcttcctgggtacaagtacctcggacccttcaacggactcgacaaaggagagccggtcaacgaggcagacgccgcggccctcgagcacgacaaggcctacgaccggcagctcgacagcggagacaacccgtacctcaagtacaaccacgccgacgcggagtttcaggagcgtcttaaagaagatacgtcttttgggggcaacctcggacgagcagtcttccaggcaaaaaagagggttcttgaacctctgggcctggttgaggaacctgttaagacggctccgggaaaaaagaggccggtagagcaatctcctgcggagccagactcctcctcgggaaccggaaaggcgggcaaccagcctgcaagaaagagattgaattttggtcagactggagacgcagactccgtacctgacccccagcctctcggacagccaccagcagccccctctggtctgggatctactacaatggctacaggcagtggcgcaccaatggcagacaataacgagggtgccgatggagtgggtaattcctcaggaaattggcattgcgattcccaatggttgggcgacagagtcatcaccaccagcacccgaacctgggccctgcccacctacaacaatcacctctacaagcaaatctccagccaatcaggagccagcaacgacaaccactactttggctacagcaccccctgggggtattttgacttcaacagattccactgccacttttcaccacgtgactggcaaagactcatcaacaacaactggggattccgacccaaaagactcaacttcaagctctttaacattcaagtcaaagaggtcacgcagaatgacggtacgacgacgattgccaataaccttaccagcacggttcaggtgtttactgactcggagtaccagctcccgtacgtcctcggctcggcgcatcaaggatgcctcccgccgtttccagcggacgtcttcatggtcccacagtatggatacctcaccctgaacaacgggagtcaggcggtaggacgctcttccttttactgcctggagtactttccttctcagatgcttcgtaccggaaacaactttaccttcagttacacctttgaagacgttcctttccacagcagctacgctcacagtcaaagtctggaccggctgatgaatcctctgatagaccagtacctgtattatctaaacaaaacacaatcaaatagtggaactcttcagcagtctcggctactgtttagtcaagctggacccaccagcatgtctcttcaagctaaaaactggctgcctggaccttgctacagacaacagcgtctgtcaaagcaggcaaacgacaacaacagcaactttccctggactgcggctacaaagtatcatctaaatggccgggactcgttggttaatccaggaccagctatggccagccacaaagacgatgaagaaaagtttttccccatgcatggaaccctgatatttggtaaacaaggaacaaatgctaacgacgcggatttggacaatgtcatgattacagatgaagaagaaatccgcaccaccaatcccgtggctacggagcagtacgggactgtgtcaaataatttgcaaaactcaaatactggtccaactactggaactgtcaatcaccaaggagcgttacctggtatggtgtggcaggatcgagacgtgtaccttcagggacccatttgggccaagattcctcacaccgatggacactttcatccttctccactgatgggaggttttggactcaaacacccgcctcctcagatcatgatcaaaaacactcccgttccagccaatcctcctacaaacttcagttctgccaagtttgcttctttcatcacacagtattccacggggcaggtcagcgtggagatagagtgggagctgcagaaggagaacagcaaacgctggaaccccgagatccagtatacttccaactacaacaagtctgttaatgtggactttactgtggacactaatggtgtgtattcagagcctcgccccattggcaccagatacctgactcgtaatctgtaa

SEQ ID NO: 3755 - DNA, 2208 bp, Artificial Sequence
  Description of Artificial Sequence: Synthetic polynucleotide
atggctgccgatggttatcttccagattggctcgaggacactctctctgaaggaataagacagtggtggaagctcaaacctggcccaccaccgccaaagcccgcagagcggcataaggacgacagcaggggtcttgtgcttcctgggtataagtacctcggacccttcaacggactcgacaagggagagccggtcaacgaggcagacgccgcggccctcgagcacgacaaggcctacgaccggcagctcgacagcggagacaacccgtacctcaagtacaaccacgccgacgcggagtttcaggagcgccttaaagaagatacgtcttttgggggcaacctcggacgagcagtattccaggcgaaaaagagggttcttgaacctctgggcctggttgtggagcctgttaagacggctccgggaaaaaagaggccggtagagcactctcctgtggagccagactcctcctcgggaaccggaaaagcgggccagcagcctgcgagaaagagattgaattttgatcagactggaggcgcagactccgtacctgacccccagcctctcggacagccaccagcagcccccacaagtttgggatctactacaatggctacaggcagtggcgcaccaatggcagacaataacgagggtgccgatggagtgggtaattcctcaggaaattggcattgcgattcccaatggtcgggcgacagagtcatcaccaccagcacccgaacctgggccctgcccacctacaacaaccacctctacaagcaaatctccagccgatcaggagccagcaacgacaaccactactttggctacagcaccccctgggggtattttgacttcaacggattccactgccacttttcaccacgtgactggcaaagactcatcaacaacaactggggattccgacccaagagactcaacttcaagctctttaacattcaagtcaaagaggtcacgcagaatgacggtacgacgacgattgccaataaccttaccagcacggttcaggtgtttactgactcggagtaccagctcccgcacgtcctcggctcggcgcatcaaggatgcctcccgccgtttccagcggacgtcttcatggtcccacagtatggatacctcaccctgaacaacgggagtcaggcggtaggacgctcttccttttactgcccggggtactttccttctcagatgcttcgtaccggaaacaactttaccttcagttacacctttgaagacgttcctttccacagcagctacgctcacagtcaaagtctggaccggctgatgaatcctcttatcgaccagtacctgtattatctaaacaaaacacaatcaaatagtggaactcttcagcagtctcggctactgtttagtcaagctggacctaccagcatgtctcttcaagctaaaaactggctgcctggaccttgctacagacaacagcgtctgtcaaagcaggcaaacggcaacaacaacagcaactttccctggactgcggctacaaagtatcatctaaatggccgggactcgttggttaatccaggaccagctatggccagccacaaagacgatgaagaaaagtttttccccatgcatggaaccctgatatttggcaaacaaggaacaaatgctaacgacgcggatttggacaatgtcatgattacagatgaagaagaaatccgtaccaccaatcccgtggctacggagcagtacgggactgtgtcaaataatttgcaaaactcaaatactggtccaactactggaactgtcaatcaccaaggagcgttacctggtatggtgtggcaggatcgagacgtgtaccttcagggacccatttgggccaagattcctcacaccgatggacactttcacccttctccgctgatgggaggttttggactcaaacacccgcctcctcagatcatgatcaaaaacactcccgttccagccaatcctcccacaaacttcagttctgccaagtttgcttctttcatcacacagtattccacgggacaggttagcgtggagatcgagtgggagctgcagaaggagaacagcaaacgctggaaccccgagatccagtacacttccaactacaacaagtctgttaatgtggactttactgtggacactaatggtgtgtattcagagcctcgccccattggcaccagatacctgactcgtaatctgtaa

SEQ ID NO: 3756 - DNA, 2205 bp, Artificial Sequence
  Description of Artificial Sequence: Synthetic polynucleotide
atggctgccgatggttatcttccagattggctcgaggacactctctctgaaggaataagacagtggtggaagctcaaacctggcccaccaccgccaaagcccgcagagcggcataaggacgacagcaggggtcttgtgcttcctgggtacaagtacctcggacccttcaacggactcgacaagggagagccggtcaacgaggcagacgccgcggccctcgagcacgacaaggcctacgaccggcagctcgacagcggagacaacccgtacctcaagtacaaccacgccgacgcggagtttcaggagcgccttaaagaagatacgtcttttgggggcaacctcggacgagcagtattccaggcgaaaaagagggttcttgaacctctgggcctggttgaggagcctgttaagacggctccgggaaaaaagaggccggtagagcactctcctgtggagccagactcctcctcgggaaccggaaaagcgggccagcagcctgcgagaaagagattgaattttggtcagactggagacgcagactccgtacctgacccccagcctctcggacagccaccagcagcccccacaagtttgggatctactacaatggctacaggcagtggcgcaccaatggcagacaataacgagggtgccgatggagtgggtaattcctcaggaaattggcattgcgattcccaatggtcgggcgacagagtcatcaccaccagcacccgaacctgggccctgcccacctacaacaaccacctctacaagcaaatctccagccaatcaggagccagcaacgacaaccactactttggctacagcaccccctgggggtattttgacttcaacagattccactgccacttttcaccacgtgactggcaaagactcatcaacaacaactggggattccgacccaagagactcaacttcaagctctttaacattcaagtcaaagaggtcacgcagaatgacggtacgacgacgattgccaataaccttaccagcacggttcaggtgtttactgactcggagtaccagctcccgtacgtcctcggctcggcgcatcaaggatgcctcccgccgtttccagcggacgtcttcatggtcccacagtatggatacctcaccctgaacaacgggagtcaggcggtaggacgctcttccttttactgcctggagtactttccttctcagatgcttcgtaccggaaacaactttaccttcagttacacctttgaagacgttcctttccacagcagctacgctcacagtcaaagtctggaccggctgatgaatcctcttatcgaccagtacctgtattatctaaacaaaacacaatcaaatagtggaactcttcagcagtctcggctactgtttagtcaagctggacctaccagcatgtctcttcaagctaaaaactggctgcctggaccttgctacagacaacagcgtctgtcaaagcaggcaaacgacaacaacagcaactttccctggactgcggctacaaagtatcatctaaatggccgggactcgttggttaatccaggaccagctatggccagccacaaagacgatgaagaaaagtttttccccatgcatggaaccctgatatttggcaaacaaggaacaaatgctaacgacgcggatttggacaatgtcatgattacagatgaagaagaaatccgtaccaccaatcccgtggctacggagcagtacgggactgtgtcaaataatttgcaaaactcaaatactggtccaactactggaactgtcaatcaccaaggagcgttacctggtatggtgtggcaggatcgagacgtgtaccttcagggacccatttgggccaagattcctcacaccgatggacactttcacccttctccgctgatgggaggttttggactcaaacacccgcctcctcagatcatgatcaaaaacactcccgttccagccaatcctcccacaaacttcagttctgccaagtttgcttctttcatcacacagtattccacgggacaggttagcgtggagatcgagtgggagctgcagaaggagaacagcaaacgctggaaccccgagatccagtacacttccaactacaacaagtctgttaatgtggactttactgtggacactaatggtgtgtattcagagcctcgccccattggcaccagatacctgactcgtaatctgtaa

SEQ ID NO: 3757 - DNA, 2208 bp, Artificial Sequence
  Description of Artificial Sequence: Synthetic polynucleotide
atggctgccgatggttatcttccagattggctcgaggacattctctctgaaggaataagacagtggtggaagctcaaacctggcccaccaccaccaaagcccgcagagcggcataaggacgacagcaggggtcttgtgcttcctgggtacaagtacctcggacccttcaacggactcgacaaaggagagccggtcaacgaggcagacgccgcggccctcgagcacgacaaggcctacgaccggcagctcgacagcggagacaacccgtacctcaagtacaaccacgccgacgcggagtttcaggagcgtcttaaagaagatacgtcttttgggggcaacctcggacgagcagtcttccaggcaaaaaagagggttcttgaacctctgggcctggttgaggaacctgttaagacggctccgggaaaaaagaggccggtagagcaatctcctgcggagccagactcctcctcgggaaccggaaaggcgggcaaccagcctgcaagaaagagattgaattttggtcagactggagacgcagactccgtacctgacccccagcctctcggacagccaccagcagccccctctggtctgggatctactacaatggctacaggcagtggcgcaccaatggcagacaataacgagggtgccgatggagtgggtaattcctcaggaaattggcattgcgattcccaatggttgggcgacagagtcatcaccaccagcacccgaacctgggccctgcccacctacaacaatcacctctacaagcaaatctccagccaatcaggagccagcaacgacaaccactactttggctacagcaccccctgggggtattttgacttcaacagattccactgccacttttcaccacgtgactggcaaagactcatcaacaacaactggggattccgacccaaaagactcaacttcaagctctttaacattcaagtcaaagaggtcacgcagaatgacggtacgacgacgattgccaataaccttaccagcacggttcaggtgtttactgactcggagtaccagctcccgtacgtcctcggctcggcgcatcaaggatgcctcccgccgtttccagcggacgtcttcatggtcccacagtatggatacctcaccctgaacaacgggagtcaggcggtaggacgctcttccttttactgcctggagtactttccttctcagatgcttcgtaccggaaacaactttaccttcagttacacctttgaagacgttcctttccacagcagctacgctcacagtcaaagtctggaccggctgatgaatcctctgatagaccagtacctgtattatctaaacaaaacacaatcaaatagtggaactcttcagcagtctcggctactgtttagtcaagctggacccaccagcatgtctcttcaagctaaaaactggctgcctggaccttgctacagacaacagcgtctgtcaaagcaggcaaacgacaacaacaacagcaactttccctggactgcggctacaaagtatcatctaaatggccgggactcgttggttaatccaggaccagctatggccagccacaaagacgatgaagaaaagtttttccccatgcatggaaccctgatatttggtaaacaaggaacaaatgctaacgacgcggatttggacaatgtcatgattacagatgaagaagaaatccgcaccaccaatcccgtggctacggagcagtacgggactgtgtcaaataatttgcaaaactcaaatactggtccaactactggaactgtcaatcaccaaggagcgttacctggtatggtgtggcaggatcgagacgtgtaccttcagggacccatttgggccaagattcctcacaccgatggacactttcatccttccccactgatgggaggttttggactcaaacacccgcctcctcagatcatgatcaaaaacactcccgttccagccaatcctcctacaaacttcagttctgccaagtttgcttctttcatcacacagtattccacggggcaggtcagcgtggggatagagtgggtgctgcagaaggagaacagcaaacgctggaaccccgagatccagtatacttccaactacaacaagtctgttaatgtggactttactgtggacactaatggtgtgtattcagagcctcgccccattggcaccagatacctgactcgtaatctgtaa

SEQ ID NO: 3758 - DNA, 2208 bp, Artificial Sequence
  Description of Artificial Sequence: Synthetic polynucleotide
atggctgccgatggttatcttccagattggctcgaggacactctctctgaaggaataagacagtggtggaagctcaaacctggcccaccaccgccaaagcccgcagagcggcataaggacgacagcaggggtcttgtgcttcctgggtacaagtacctcggacccttcaacggactcgacaaaggagagccggtcaacgaggcagacgccgcggccctcgagcacgacaaggcctacgaccggcagctcgacagcggagacaacccgtacctcaagtacaaccacgccgacgcggagtttcaggagcgccttaaagaagatacgtcttttgggggcaacctcgcaagagcagtattccaggcgaaaaagagggttcttgaacctctgggcctggttgaggagcctgttaagacggctccgggaaaaaagaggccggtagagcaatctcctgcggagccagactcctcctcgggaaccggaaaggcgggcaaccagcctgcaagaaagagattgaattttggtcagactggagacgcagactccgtacctgacccccagcctctcggacagccaccagcagccccctctggtctgggatctactacaatggctacaggcagtggcgcaccaatggcagacaataacgagggtgccgatggagtgggtaattcctcaggaaattggcattgcgattcccaatggttgggcgacagagtcatcaccaccagcacccgaacctgggccctgcccacctacaacaatcacctctacaagcaaatctccagccaatcaggagccagcaacgacaaccactactttggctacagcaccccctgggggtattttgacttcaacagattccactgccacttttcaccacgtgactggcaaagactcatcaacaacaactggggattccgacccaaaagactcaacttcaagctctttaacattcaagtcaaagaggtcacgcagaatgacggtacgacgacgattgccaataaccttaccagcacggttcaggtgtttactgactcggagtaccagctcccgtacgtcctcggctcggcgcatcaaggatgcctcccgccgtttccagcggacgtcttcatggtcccacagtatggatacctcaccctgaacaacgggagtcaggcggtaggacgctcttccttttactgcctggagtactttccttctcagatgcttcgtaccggaaacaactttaccttcagttacacctttgaagacgttcctttccacagcagctacgctcacagtcaaagtctggaccggctgatgaatcctctgatagaccagtacctgtattatctaaacaaaacacaatcaaatagtggaactcttcagcagtctcggctactgtttagtcaagctggacccaccagcatgtctcttcaagctaaaaactggctgcctggaccttgctacagacaacagcgtctgtcaaagcaggcaaacgacaacaacaacagcaactttccctggactgcggctacaaagtatcatctaaatggccgggactcgttggttaatccaggaccagctatggccagccacaaagacgatgaagaaaagtttttccccatgcatggaaccctgatatttggtaaacaaggaacaaatgctaacgacgcggatttggacaatgtcatgattacagatgaagaagaaatccgcaccaccaatcccgtggctacggagcagtacgggactgtgtcaaataatttgcaaaactcaaatactggtccaactactggaactgtcaatcaccaaggagcgttacctggtatggtgtggcaggatcgagacgtgtaccttcagggacccatttgggccaagattcctcacaccgatggacactttcatccttctccactgatgggaggttttggactcaaacacccgcctcctcagatcatgatcaaaaacactcccgttccagccaatcctcctacaaacttcagttctgccaagtttgcttctttcatcacacagtattccacggggcaggtcagcgtggagatagagtgggagctgcagaaggagaacagcaaacgctggaaccccgagatccagtatacttccaactacaacaagtctgttaatgtggactttactgtggacactaatggtgtgtattcagagcctcgccccattggcaccagatacctgactcgtaatctgtaa

SEQ ID NO: 3759 - DNA, 2208 bp, Artificial Sequence
  Description of Artificial Sequence: Synthetic polynucleotide
atggctgccgatggttatcttccagattggctcgaggacattctctctgaaggaataagacagtggtggaagctcaaacctggcccaccaccaccaaagcccgcagagcggcataaggacgacagcaggggtcttgtgcttcctgggtacaagtacctcggacccttcaacggactcgacaaaggagagccggtcaacgaggcagacgccgcggccctcgagcacgacaaggcctacgaccggcagctcgacagcggagacaacccgtacctcaagtacaaccacgccgacgcggagtttcaggagcgtcttaaagaagatacgtcttttgggggcaacctcggacgagcagtcttccaggcaaaaaagagggttcttgaacctctgggcctggttgaggaacctgttaagacggctccgggaaaaaagaggccggtagagcaatctcctgcggagccagactcctcctcgggagccggaaaggcgggcaaccagcctgcaagaaagagattgaattttggtcagactggagacgcagactccgtacctgacccccagcctctcggacagccaccagcagccccctctggtctgggatctactacaatggctacaggcagtggcgcaccaatggcagacaataacgagggtgccgatggagtgggtaattcctcaggaaattggcattgcgattcccaatggttgggcgacagagtcatcaccaccagcacccgaacctgggccctgcccacctacaacaatcacctctacaagcaaatctccagccaatcaggagccagcaacgacaaccactactttggctacagcaccccctgggggtattttgacttcaacagattccactgccacttttcaccacgtgactggcaaagactcatcaacaacaactggggattccgacccaaaagactcaacttcaagctctttaacattcaagtcaaagaggtcacgcagaatgacggtacgacgacgattgccaataaccttaccagcacggttcaggtgtttactgactcggagtaccagctcccgtacgtcctcggctcggcgcatcaaggatgcctcccgccgtttccagcggacgtcttcatggtcccacagtatggatacctcaccctgaacaacgggagtcaggcggtaggacgctcttccttttactgcctggagtactttccttctcagatgcttcgtaccggaaacaactttaccttcagttacacctttgaagacgttcctttccacagcagctacgctcacagtcaaagtctggaccggctgatgaatcctctgatagaccagtacctgtattatctaaacaaaacacaatcaaatagtggaactcttcagcagtctcggctactgtttagtcaagctggacccaccagcatgtctcttcaagctaaaaactggctgcctggaccttgctacagacaacagcgtctgtcaaagcaggcaaacgacaacaacaacagcaactttccctggactgcggctacaaagtatcatctaaatggccgggactcgttggttaatccaggaccagctatggccagccacaaagacgatgaagaaaagtttttccccatgcatggaaccctgatatttggtaaacaaggaacaaatgctaacgacgcggatttggacaatgtcatgattacagatgaagaagaaatccgcaccaccaatcccgtggctacggagcagtacgggactgtgtcaaataatttgcaaaactcaaatactggtccaactactggaactgtcaatcaccaaggagcgttacctggtatggtgtggcaggatcgagacgtgtaccttcagggacccatttgggccaagattcctcacaccgatggacactttcatccttctccactgatgggaggttttggactcaaacacccgcctcctcagatcatgatcaaaaacactcccgttccagccaatcctcctacaaacttcagttctgccaagtttgcttctttcatcacacagtattccacggggcaggtcagcgtggagatagagtgggagctgcagaaggagaacagcaaacgctggaaccccgagatccagtatacttccaactacaacaagtctgttaatgtggactttactgtggacactaatggtgtgtattcagagcctcgccccattggcaccagatacctgactcgtaatctgtaa

SEQ ID NO: 3760 - DNA, 2208 bp, Artificial Sequence
  Description of Artificial Sequence: Synthetic polynucleotide
atggctgccgatggttatcttccagattggctcaaggacattctctctgaaggaataagacagtggtggaagctcaaacctggcccaccaccaccaaagcccgcagagcggcataaggacgacagcaggggtcttgtgcttcctgggtacaagtacctcggacccttcaacggactcgacaaaggagagccggtcaacgaggcagacgccgcggccctcgagcacgacaaggcctacgaccggcagctcgacagcggagacaacccgtacctcaagtacaaccacgccgacgcggagtttcaggagcgtcttaaagaagatacgtcttttgggggcaacctcggacgagcagtcttccaggcaaaaaagagggttcttgaacctctgggcctggttgaggaacctgttaagacggctccgggaaaaaagaggccggtagagcaatctcctgcggagccagactcctcctcgggaaccggaaaggcgggcaaccagcctgcaagaaagagattgaattttggtcagactggagacgcagactccgtacctgacccccagcctctcggacagccaccagcagccccctctggtctgggatctactacaatggctacaggcagtggcgcaccaatggcagacaataacgagggtgccgatggagtgggtaattcctcaggaaattggcatcgcgattcccaatggttgggcgacagagtcatcaccaccagcacccgaacctgggccctgcccacctacaacaatcacctctacaagcaaatctccagccaatcaggagccagcaacgacaaccactactttggctacagcaccccctgggggtattttgacttcaacagattccactgccacttttcaccacgtgactggcaaagactcatcaacaacaactggggattccgacccaaaagactcaacttcaagctctttaacattcaagtcaaagaggtcacgcagaatgacggtacgacgacgattgccaataaccttaccagcacggttcaggtgtttactgactcggagtaccagctcccgtacgtcctcggctcggcgcatcaaggatgcctcccgccgtttccagcggacgtcttcatggtcccacagtatggatacctcaccctgaacaacgggagtcaggcggtaggacgctcttccttttactgcctggagtactttccttctcagatgcttcgtaccggaaacaactttaccttcagttacacctttgaagacgttcctttccacagcagctacgctcacagtcaaagtctggaccggctgatgaatcctctgatagaccagtacctgtattatctaaacaaaacacaatcaaatagtggaactcttcagcagtctcggctactgtttagtcaagctggacccaccagcatgtctcttcaagctaaaaactggctgcctggaccttgctacagacaacagcgtctgtcaaagcaggcaaacgacaacaacaacagcaactttccctggactgcggctacaaagtatcatctaaatggccgggactcgttggttaatccaggaccagctatggccagccacaaagacgatgaagaaaagtttttccccatgcatggaaccctgatatttggtaaacaaggaacaaatgctaacgacgcggatttggacaatgtcatgattacagatgaagaagaaatccgcaccaccaatcccgtggctacggagcagtacgggactgtgtcaaataatttgcaaaactcaaatactggtccaactactggaactgtcaatcaccaaggagcgttacctggtatggtgtggcaggatcgagacgtgtaccttcagggacccatttgggccaagattcctcacaccgatggacactttcatccttctccactgatgggaggttttggactcaaacacccgcctcctcagatcatgatcaaaaacactcccgttccagtcaatcctcctacaaacttcagttctgccaagtttgcttctttcatcacacagtattccacggggcaggtcagcgtggagatagagtgggagctgcagaaggagaacagcaaacgctggaaccccgagatccagtatacttccaactacaacaagtctgttaatgtggactttactgtggacactaatggtgtgtattcagagcctcgccccattggcaccagatacctgactcgtaatctgtaa

SEQ ID NO: 3761 - DNA, 2208 bp, Artificial Sequence
  Description of Artificial Sequence: Synthetic polynucleotide
atggctgccgatggttatcttccagattggctcgaggacattctctctgaaggaataagacggtggtggaagctcaaacctggcccaccaccaccaaagcccgcagagcggcataaggacgacagcaggggtcttgtgcttcctgggtacaagtacctcggacccttcaacggactcgacaaaggagagccggtcaacgaggcagacgccgcggccctcgagcacgacaaggcctacgaccggcagctcgacagcggagacaacccgtacctcaagtacaaccacgccgacgcagagtttcaggagcgtcttaaagaagatacgtcttttgggggcaacctcggacgagcagtcttccaggcaaaaaagagggttcttgaacctctgggcctggttgaggaacctgttaagacggctccgggaaaaaagaggccggtagagcaatctcctgcggagccagactcctcctcgggaaccggaaaggcgggcaaccagcctgcaagaaagagattgaattttggtcagactggagacgcagactccgtacctgacccccagcctctcggacagccaccagcagccccctctggtctgggatctactacaatggctacaggcagtggcgcaccaatggcagacaataacgagggtgccgatggagtgggtaattcctcaggaaattggcattgcgattcccaatggttgggcgacagagtcatcaccaccagcacccgaacctgggccctgcccacctacaacaatcacctctacaagcaaatctccagccaatcaggagccagcaacgacaaccactactttggctacagcaccccctgggggtattttgacttcaacagattccactgccacttttcaccacgtgactggcaaagactcatcaacaacaactggggattccgacccaaaagactcaacttcaagctctttaacattcaagtcaaagaggtcacgcagaatgacggtacgacgacgattgccaataaccttaccagcacggttcaggtgtttactgactcggagtaccagctcccgtacgtcctcggctcggcgcatcaaggatgcctcccgccgtttccagcggacgtcttcatggtcccacagtatggatacctcaccctgaacaacgggagtcaggcggtaggacgctcttccttttactgcctggagtactttccttctcagatgcttcgtaccggaaacaactttaccttcagttacacctttgaagacgttcctttccacagcagctacgctcacagtcaaagtctggaccggctgatgaatcctctgatagaccagtacctgtattatctaaacaaaacacaatcaaatagtggaactcttcagcagtctcggctactgtttagtcaagctggacccaccagcatgtctcttcaagctaaaaactggctgcctggaccttgctacagacaacagcgtctgtcaaagcaggcaaacgacaacaacaacagcaactttccctggactgcggctacaaagtatcatctaaatggccgggactcgttggttaatccaggaccagctatggccagccacaaagacgatgaagaaaagtttttccccatgcatggaaccctgatatttggtaaacaaggaacaaatgctaacgacgcggatttggacaatgtcatgattacagatgaagaagaaatccgcaccaccaatcccgtggctacggagcggtacgggactgtgtcaaataatttgcaaaactcaaatactggtccaactactggaactgtcaatcaccaaggagcgttacctggtatggtgtggcaggatcgagacgtgtaccttcagggacccatttgggccaagattcctcacaccgatggacactttcatccttctccactgatgggaggttttggactcaaacacccgcctcctcagatcatgatcaaaaacactcccgttccagccaatcctcctacaaacttcagttctgccaagtttgcttctttcatcacacagtattccacggggcaggtcagcgtggagatagagtgggagctgcagaaggagaacagcaaacgctggaaccccgagatccagtatacttccaactacaacaagtctgttaatgtggactttactgtggacactaatggtgtgtattcagagcctcgccccattggcaccagatacctgactcgtaatctgtaa

SEQ ID NO: 3762 - DNA, 2208 bp, Artificial Sequence
  Description of Artificial Sequence: Synthetic polynucleotide
atggctgccgatggttatcttccagattggctcgaggacactctctctgaaggaataagacagtggtggaagctcaaacctggcccaccaccgccaaagcccgcagagcggcataaggacgacagcaggggtcttgtgcttcctgggtacaagtacctcggacccttcaacggactcgacaaaggagagccggtcaacgaggcagacgccgcggccctcgagcacgacaaggcctacgaccggcagctcgacagcggagacaacccgtacctcaagtacaaccacgccgacgcggagtttcaggagcgccttaaagaagatacgtcttttgggggcaacctcgcaagagcagtattccaggcgaaaaagagggttcttgaacctctgggcctggttgaggagcctgttaagacggctccgggaaaaaagaggccggtagagcactctcctgcggagccagattcctcctccggaactggaaagtcgggccaacagcctgcaagaaagagattgaattttggtcagactggagacgcagactccgtacctgacccccagcctctcggacagccaccagcagccccctctggtctgggaactaatacgatggcttcaggcagtggcgcaccaatggcagacaataacgagggcgccgacggagtgggtaattcctcaggaaattggcattgcgattcccaatggttgggcgacagagtcatcaccaccagcacccgaacctgggccctgcccacctacaacaatcacctctacaagcaaatctccagccaatcaggagccagcaacgacaaccactactttggctacagcaccccctgggggtattttgacttcaacagattccactgccacttttcaccacgtgactggcaaagactcatcaacaacaactggggattccgacccaaaagactcaacttcaagctctttaacattcaagtcaaagaggtcacgcagaatgacggtacgacgacgattgccaataaccttaccagcacggttcaggtgtttactgactcggagtaccagctcccgtacgtcctcggctcggcgcatcaaggatgcctcccgccgtttccagcggacgtcttcatggtcccacagtatggatacctcaccctgaacaacgggagtcaggcggtaggacgctcttccttttactgcctggagtactttccttctcagatgcttcgtaccggaaacaactttaccttcagttacacctttgaagacgttcctttccacagcagctacgctcacagtcaaagtctggaccggctgatgaatcctctgatagaccagtacctgtattatctaaacaaaacacaatcaaatagtggaactcttcagcagtctcggctactgtttagtcaagctggacccaccagcatgtctcttcaagctaaaaactggctgcctggaccttgctacagacaacagcgtctgtcaaagcaggcaaacgacaacaacaacagcaactttccctggactgcggctacaaagtatcatctaaatggccgggactcgttggttaatccaggaccagctatggccagccacaaagacgatgaagaaaagtttttccccatgcatggaaccctgatatttggtaaacaaggaacaaatgctaacgacgcggatttggacaatgtcatgattacagatgaagaagaaatccgcaccaccaatcccgtggctacggagcagtacgggactgtgtcaaataatttgcaaaactcaaatactggtccaactactggaactgtcaatcaccaaggagcgttacctggtatggtgtggcaggatcgagacgtgtaccttcagggacccatttgggccaagattcctcacaccgatggacactttcatccttctccactgatgggaggttttggactcaaacacccgcctcctcagatcatgatcaaaaacactcccgttccagccaatcctcctacaaacttcagttctgccaagtttgcttctttcatcacacagtattccacggggcaggtcagcgtggagatagagtgggagctgcagaaggagaacagcaaacgctggaaccccgagatccagtatacttccaactacaacaagtctgttaatgtggactttactgtggacactaatggtgtgtattcagagcctcgccccattggcaccagatacctgactcgtaatctgtaa

SEQ ID NO: 3763 - DNA, 2208 bp, Artificial Sequence
  Description of Artificial Sequence: Synthetic polynucleotide
atggctgccgatggttatcttccagattggctcgaggacactctctctgaaggaataagacagtggtggaagctcaaacctggcccaccaccgccaaagcccgcagagcggcataaggacgacagcaggggtcttgtgcttcctgggtacaagtacctcggacccttcaacggactcgacaaaggagagccggtcaacgaggcagacgccgcggccctcgagcacgacaaggcctacgaccggcagctcgacagcggagacaacccgtacctcaagtacaaccacgccgacgcggagtttcaggagcgccttaaagaagatacgtcttttgggggcaacctcgcaagagcagtattccaggcgaaaaagagggttcttgaacctctgggcctggttgaggagcctgttaagacggctccgggaaaaaagaggccggtagagcactctcctgcggagccagattcctcctccggaactggaaagtcgggccaacagcctgcaagaaagagattgaattttggtcagactggagacgcagactccgtacctgacccccagcctctcggacagccaccagcagccccctctggtctgggaactaatacgatggcttcaggcagtggcgcaccaatggcagacaataacgagggcgccgacggagtgggtaattcctcgggaaattggcattgcgattccacatggatgggcgacagagtcatcaccaccagcacccgcacctgggctctgcccacctacaacaaccatctgtacaagcaaatttccagccagtctggagccagcaacgacaaccactacttcggctacagcacccccttggggtattttgacttcaacagattccactgccacttctccccacgtgactggcaaagactcatcaacaacaattggggattccggcccaaaagactcaacttcaagctctttaacattcaagtcaaagaggtcacgcagaatgacggtacgacgacgattgccaataaccttaccagcacggttcaggtgtttactgactcggagtaccagctcccgtacgtcctcggctcggcgcatcaaggatgcctcccgccgtttccagcggacgtcttcatggtcccacagtatggatacctcaccctgaacaacgggagtcaggcggtaggacgctcttccttttactgcctggagtactttccttctcagatgcttcgtaccggaaacaactttaccttcagttacacctttgaagacgttcctttccacagcagctacgctcacagtcaaagtctggaccggctgatgaatcctctgatagaccagtacctgtattatctaaacaaaacacaatcaaatagtggaactcttcagcagtctcggctactgtttagtcaagctggacccaccagcatgtctcttcaagctaaaaactggctgcctggaccttgctacagacaacagcgtctgtcaaagcaggcaaacgacaacaacaacagcaactttccctggactgcggctacaaagtatcatctaaatggccgggactcgttggttaatccaggaccagctatggccagccacaaagacgatgaagaaaagtttttccccatgcatggaaccctgatatttggtaaacaaggaacaaatgctaacgacgcggatttggacaatgtcatgattacagatgaagaagaaatccgcaccaccaatcccgtggctacggagcagtacgggactgtgtcaaataatttgcaaaactcaaatactggtccaactactggaactgtcaatcaccaaggagcgttacctggtatggtgtggcaggatcgagacgtgtaccttcagggacccatttgggccaagattcctcacaccgatggacactttcatccttctccactgatgggaggttttggactcaaacacccgcctcctcagatcatgatcaaaaacactcccgttccagccaatcctcctacaaacttcagttctgccaagtttgcttctttcatcacacagtattccacggggcaggtcagcgtggagatagagtgggagctgcagaaggagaacagcaaacgctggaaccccgagatccagtatacttccaactacaacaagtctgttaatgtggactttactgtggacactaatggtgtgtattcagagcctcgccccattggcaccagatacctgactcgtaatctgtaa

SEQ ID NO: 3764 - DNA, 2208 bp, Artificial Sequence
  Description of Artificial Sequence: Synthetic polynucleotide
atggctgccgatggttatcttccagattggctcgaggacactctctctgaaggaataagacagtggtggaagctcaaacctggcccaccaccgccaaagcccgcagagcggcataaggacgacagcaggggtcttgtgcttcctgggtacaagtacctcggacccttcaacggactcgacaaaggagagccggtcaacgaggcagacgccgcggccctcgagcacgacaaggcctacgaccggcagctcgacagcggagacaacccgtacctcaagtacaaccacgccgacgcggagtttcaggagcgccttaaagaagatacgtcttttgggggcaacctcgcaagagcagtattccaggcgaaaaagagggttcttgaacctctgggcctggttgaggagcctgttaagacggctccgggaaaaaagaggccggtagagcactctcctgcggagccagattcctcctccggaactggaaagtcgggccaacagcctgcaagaaagagattgaattttggtcagactggagacgcagactccgtacctgacccccagcctctcggacagccaccagcagccccctctggtctgggaactaatacgatggcttcaggcagtggcgcaccaatggcagacaataacgagggcgccgacggagtgggtaattcctcgggaaattggcattgcgattccacatggatgggcgacagagtcatcaccaccagcacccgcacctgggctctgcccacctacaacaaccatctgtacaagcaaatttccagccagtctggagccagcaacgacaaccactacttcggctacagcaccccttgggggtattttgacttcaacagattccactgccacttctccccacgtgactggcaaagactcatcaacaacaactggggattccgacccaaaagactcaacttcaagctctttaacattcaagtcaaagaggtcacgcagaatgacggtacgacgacgattgccaataaccttaccagcacggttcaggtgtttactgactcggagtaccagctcccgtacgtcctcggctcggcgcatcaaggatgcctcccgccgtttccagcggacgtcttcatggtcccacagtatggatacctcaccctgaacaacgggagtcaggcggtaggacgctcttccttttactgcctggagtactttccttctcagatgcttcgtaccggaaacaactttaccttcagttacacctttgaagacgttcctttccacagcagctacgctcacagtcaaagtctggaccggctgatgaatcctctgatagaccagtacctgtattatctaaacaaaacacaatcaaatagtggaactcttcagcagtctcggctactgtttagtcaagctggacccaccagcatgtctcttcaagctaaaaactggctgcctggaccttgctacagacaacagcgtctgtcaaagcaggcaaacgacaacaacaacagcaactttccctggactgcggctacaaagtatcatctaaatggccgggactcgttggttaatccaggaccagctatggccagccacaaagacgatgaagaaaagtttttccccatgcatggaaccctgatatttggtaaacaaggaacaaatgctaacgacgcggatttggacaatgtcatgattacagatgaagaagaaatccgcaccaccaatcccgtggctacggagcagtacgggactgtgtcaaataatttgcaaaactcaaatactggtccaactactggaactgtcaatcaccaaggagcgttacctggtatggtgtggcaggatcgagacgtgtaccttcagggacccatttgggccaagattcctcacaccgatggacactttcatccttctccactgatgggaggttttggactcaaacacccgcctcctcagatcatgatcaaaaacactcccgttccagccaatcctcctacaaacttcagttctgccaagtttgcttctttcatcacacagtattccacggggcaggtcagcgtggagatagagtgggagctgcagaaggagaacagcaaacgctggaaccccgagatccagtatacttccaactacaacaagtctgttaatgtggactttactgtggacactaatggtgtgtattcagagcctcgccccattggcaccagatacctgactcgtaatctgtaa

SEQ ID NO: 3765 - DNA, 2208 bp, Artificial Sequence
  Description of Artificial Sequence: Synthetic polynucleotide
atggctgccgatggttatcttccagattggctcgaggacactctctctgaaggaataagacagtggtggaagctcaaacctggcccaccaccgccaaagcccgcagagcggcataaggacgacagcaggggtcttgtgcttcctgggtataagtacctcggacccttcaacggactcgacaagggagagccggtcaacgaggcagacgccgcggccctcgagcacgacaaggcctacgaccggcagctcgacagcggagacaacccgtacctcaagtacaaccacgccgacgcggagtttcaggagcgccttaaagaagatacgtcttttgggggcaacctcggacgagcagtattccaggcgaaaaagagggttcttgaacctctgggcctggttgtggagcctgttaagacggctccgggaaaaaagaggccggtagagcactctcctgtggagccagactcctcctcgggaaccggaaaagcgggccagcagcctgcgagaaagagattgaattttgatcagactggagacgcagactccgtacctgacccccagcctctcggacagccaccagcagcccccacaagtttgggatctactacaatggctacaggcagtggcgcaccaatggcagacaataacgagggtgccgatggagtgggtaattcctcaggaaattggcattgcgattcccaatggtcgggcgacagagtcatcaccaccagcacccgaacctgggccctgcccacctacaacaaccacctctacaagcaaatctccagccgatcaggagccagcaacgacaaccactactttggctacagcaccccctgggggtattttgacttcaacggattccactgccacttttcaccacgtgactggcaaagactcatcaacaacaactggggattccgacccaagagactcaacttcaagctctttaacattcaagtcaaagaggtcacgcagaatgacggtacgacgacgattgccaataaccttaccagcacggttcaggtgtttactgactcggagtaccagctcccgcacgtcctcggctcggcgcatcaaggatgcctcccgccgtttccagcggacgtcttcatggtcccacagtatggatacctcaccctgaacaacgggagtcaggcggtaggacgctcttccttttactgcccggggtactttccttctcagatgcttcgtaccggaaacaactttaccttcagttacacctttgaagacgttcctttccacagcagctacgctcacagtcaaagtctggaccggctgatgaatcctcttatcgaccagtacctgtattatctaaacaaaacacaatcaaatagtggaactcttcagcagtctcggctactgtttagtcaagctggacctaccagcatgtctcttcaagctaaaaactggctgcctggaccttgctacagacaacagcgtctgtcaaagcaggcaaacggcaacaacaacagcaactttccctggactgcggctacaaagtatcatctaaatggccgggactcgttggttaatccaggaccagctatggccagccacaaagacgatgaagaaaagtttttccccatgcatggaaccctgatatttggcaaacaaggaacaaatgctaacgacgcggatttggacaatgtcatgattacagatgaagaagaaatccgtaccaccaatcccgtggctacggagcagtacgggactgtgtcaaataatttgcaaaactcaaatactggtccaactactggaactgtcaatcaccaaggagcgttacctggtatggtgtggcaggatcgagacgtgtaccttcagggacccatttgggccaagattcctcacaccgatggacactttcacccttctccgctgatgggaggttttggactcaaacacccgcctcctcagatcatgatcaaaaacactcccgttccagccaatcctcccacaaacttcagttctgccaagtttgcttctttcatcacacagtattccacgggacaggttagcgtggagatcgagtgggagctgcagaaggagaacagcaaacgctggaaccccgagatccagtacacttccaactacaacaagtctgttaatgtggactttactgtggacactaatggtgtgtattcagagcctcgccccattggcaccagatacctgactcgtaatctgtaa

SEQ ID NO: 3766 - DNA, 2208 bp, Artificial Sequence
  Description of Artificial Sequence: Synthetic polynucleotide
atggctgccgatggttatcttccagattggctcgaggacattctctctgaaggaataagacagtggtggaagctcaaacctggcccaccaccaccaaagcccgcagagcggcataaggacgacagcaggggtcttgtgcttcctgggtacaagtacctcggacccttcaacggactcgacaaaggagagccggtcaacgaggcagacgccgcggccctcgagcacgacaaggcctacgaccggcagctcgacagcggagacaacccgtacctcaagtacaaccacgccgacgcggagtttcaggggcgtcttaaagaagatacgtcttttgggggcaacctcggacgagcagtcttccaggcaaaaaagagggttcttgaacctctgggcctggttgaggaacctgttaagacggctccgggaaaaaagaggccggtagagcaatctcctgcggagccagactcctcctcgggaaccggaaaggcgggcaaccagcctgcaagaaagagattgaattttggtcagactggagacgcagactccgtacctgacccccagcctctcggacagccaccagcagccccctctggtctgggatctactacaatggctacaggcagtggcgcaccaatggcagacaataacgagggtgccgatggagtgggtaattcctcaggaaattggcattgcgattcccaatggttgggcgacagagtcatcaccaccagcacccgaacctgggccctgcccacctacaacaatcacctctacaagcaaatctccagccaatcaggagccagcaacgacaaccactactttggctacagcaccccctgggggtattttgacttcaacagattccactgccacttttcaccacgtgactggcaaagactcatcaacaacaactggggattccgacccaaaagactcaacttcaagctctttaacattcaagtcaaagaggtcacgcagaatgacggtacgacgacgattgccaataaccttaccagcacggttcaggtgtttactgactcggagtaccagctcccgtacgtcctcggctcggcgcatcaaggatgcctcccgccgtttccagcggacgtcttcatggtcccacagtatggatacctcaccctgaacaacgggagtcaggcggtaggacgctcttccttttactgcctggagtactttccttctcagatgcttcgtaccggaaacaactttaccttcagttacacctttgaagacgttcctttccacagcagctacgctcacagtcaaagtctggaccggctgatgaatcctctgatagaccagtacctgtattatctaaacaaaacacaatcaaatagtggaactcttcagcagtctcggctactgtttagtcaagctggacccaccagcatgtctcttcaagctaaaaactggctgcctggaccttgctacagacaacagcgtctgtcaaagcaggcaaacgacaacaacaacagcaactttccctggactgcggctacaaagtatcatctaaatggccgggactcgttggttaatccaggaccagctatggccagccacaaagacgatgaagaaaagtttttccccatgcatggaaccctgatatttggtaaacaaggaacaaatgctaacgacgcggatttggacaatgtcatgattacagatgaagaagaaatccgcaccaccaatcccgtggctacggagcagtacgggactgtgtcaaataatttgcaaaactcaaatactggtccaactactggaactgtcaatcaccaaggagcgttacctggtatggtgtggcaggatcgagacgtgtaccttcagggacccatttgggccaagattcctcacaccgatggacactttcatccttctccactgatgggaggttttggactcaaacacccgcctcctcagatcatgatcaaaaacactcccgttccagccaatcctcctacaaacttcagttctgccaagtttgcttctttcatcacacagtattccacggggcaggtcagcgtggagatagagtgggagctgcagaaggagaacagcaaacgctggaaccccgagatccagtatacttccaactacaacaagtctgttaatgtggactttactgtggacactaatggtgtgtattcagagcctcgccccattggcaccagatacctgactcgtaatctgtaa

SEQ ID NO: 3767 - DNA, 2208 bp, Artificial Sequence
  Description of Artificial Sequence: Synthetic polynucleotide
atggctgccgatggttatcttccagattggctcgaggacattctctctgaaggaataagacagtggtggaagctcaaacctggcccaccaccaccaaagcccgcagagcggcataaggacgacagcaggggtcttgtgcttcctgggtacaagtacctcggacccttcaacggactcgacaaaggagagccggtcaacgaggcagacgccgcggccctcgagcacgacaaggcctacgaccggcagctcgacagcggagacaacccgtacctcaagtacaaccacgccgacgcggagtttcaggagcgtcttaaagaagatacgtcttttgggggcaacctcggacgagcagtcttccaggcaaaaaagagggctcttgaacctctgggcctggttgaggaacctgttaagacggctccgggaaaaaagaggccggtagagcaatctcctgcggagccagactcctcctcgggaaccggaaaggcgggcaaccagcctgcaagaaagagatcgaattttggtcagactggagacgcagactccgtacctgacccccagcctctcggacagccaccagcagccccctctggtctgggatctactacaatggctacaggcagtggcgcaccaatggcagacaataacgagggtgccgatggagtgggtaattcctcaggaaattggcattgcgattcccaatggttgggcgacagagtcatcaccaccagcacccgaacctgggccctgcccacctacaacaatcacctctacaagcaaatctccagccaatcaggagccagcaacgacaaccactactttggctacagcaccccctgggggtattttgacttcaacagattccactgccacttttcaccacgtgactggcaaagactcatcaacaacaactggggattccgacccaaaagactcaacttcaagctctttaacattcaagtcaaagaggtcacgcagaatgacggtacgacgacgattgccaataaccttaccagcacggttcaggtgtttactgactcggagtaccagctcccgtacgtcctcggctcggcgcatcaaggatgcctcccgccgtttccagcggacgtcttcatggtcccacagtatggatacctcaccctgaacaacggaagtcaggcggtaggacgctcttccttttactgcctggagtactttccttctcagatgcttcgtaccggaaacaactttaccttcagttacacctttgaagacgttcctttccacagcagctacgctcacagtcaaagtctggaccggctgatgaatcctctgataggccagtacctgtattatctaaacaaaacacaatcaaatagtggaactcttcagcagtctcggctactgtttagtcaagctggacccaccagcatgtctcttcaagctaaaaactggctgcctggaccttgctacagacaacagcgtctgtcaaagcaggcaaacgacaacaacaacagcaactttccctggactgcggctacaaagtatcatctaaatggccgggactcgttggttaatccaggaccagctatggccagccacaaagacgatgaagaaaagtttttccccatgcatggaaccctgatatttggtaaacaaggaacaaatgctaacgacgcggatttggacaatgtcatgattacagatgaagaagaaatccgcaccaccaatcccgtggctacggagcagtacgggactgtgtcaaataatttgcaaaactcaaatactggtccaactactggaactgtcaatcaccaaggagcgttacctggtatggtgtggcaggatcgagacgtgtaccttcagggacccatttgggccaagattcctcacaccgatggacactttcatccttctccactgatgggaggttttggactcaaacacccgcctcctcagatcatgatcaaaaacactcccgttccagccaatcctcctacaaacttcagttctgccaagtttgcttctttcatcacacagtattccacggggcaggtcagcgtggagatagagtgggagctgcagaaggagaacagcaaacgctggaaccccgagatccagtatacttccaactacaacaagtctgttaatgtggactttactgtggacactaatggtgtgtattcagagcctcgccccattggcaccagatacctgactcgtaatctgtaa

SEQ ID NO: 3768 - DNA, 2217 bp, Artificial Sequence
  Description of Artificial Sequence: Synthetic polynucleotide
atggctgccgatggttatctcccagattggctcgaggacaacctctctgagggcattcgcgagtggtgggcactgaaacctggagccccgaagcccaaagccaaccagcaaaagcaggacgacggccggggtctggtgcttcctggctacaagtacctcggacccttcaacggactcgacaagggggagcccgtcaacgcggcggacgcggcggccctcgagcacgacaaggcctacgaccagcagctgcaggcgggtgacaatccgtacctgcggtataaccacgccgacgccgagtttcaggagcgtctgcaagaagatacgtcttttgggggcaacctcgggcgagcagtcttccaggccaagaagcgggttctcgaacctctcggtctggttgaggaaggcgctaagacggctcctggaaaggagagaccggtagagccatcaccccagcgttctccagactcctctacgggcatcggcaaggaaggccaacagcctgccagaaaaagactcaattttggtcagactggcgactcagagtcagttccagaccctcaacctctcggagaacctccagcagcgccctctggtgtgggacctaatacaatggctgcaggcggtggcgcaccaatggcagacaataacgaaggcgccgacggagtgggtagttcctcgggaaattggcattgcgattccacatggctgggcgacagagtcatcaccaccagcacccgaacctgggccctgcccacctacaacaaccacctctacaagcaaatctccaacgggacatcgggaggagccaccaacgacaacacctacttcggctacagcaccccctgggggtattttgactttaacagattccactgccacttttcaccacgtgactggcagcgactcatcaacaacaactggggattccggcccaagagactcagcttcaagctcttcaacatccaggtcaaggaggtcacgcagaatgaaggcaccaagaccaccgccaataacctcaccagcaccatccaggtgtttacggactcggagtaccagctgccgtacgttctcggctctgcccaccagggctgcctgcctccgttcccggcggacgtgttcacgattccccagtacggctacctaacactcaacaacggtagtcaggccgtgggacgctcctccttctactgcctggaatactttccttcgcagatgctgagaaccggcaacaacttccagtttacttacaccttcgaggacgtgcctttccacagcagctacgcccacagccagagcttggaccggctgatgaatcctctgattgaccagtacctgtactacttgtctcggattcaaacaacaggaggcacggcaaatacgcagactctgggcttcagccaaggtgggcctaatacaatggccaatcaggcaaagaactggctgccaggaccctgttaccgccaacaacgcgtctcaacgacaaccgggcaaaacaacaatagcaactttgcctggactgctgggaccaaataccatctgaatggaagaaattcattggctaatcctggcatcgctatggcaacacacaaagacgacgaggagcgtttttttcccagtaacgggatcctgatttttggcaaacaaaatgctgccagagacaatgcggattacagcgatgtcatgcccaccagcgaggaagaaatcaaaaccactaaccctgtggccacagaggaatacggtatcgtggcagataacttgcagcagcaaaacacggctcctcaaattggaactgtcaacagccagggggccttacccggtatggtctggcagaaccgggacgtgtacctgcagggtcccatctgggccaagattcctcacacggacggcaacttccacccgtctccgctgatgggcggctttggcctgaaacatcctccgcctcagatcctgatcaagaacacgcctgtacctgcggatcctccgaccaccttcaaccagtcaaagctgaactctttcatcacgcaatacagcaccggacaggtcagcgtggaaattgaatgggagctgcagaaggaaaacagcaagcgctggaaccccgagatccagtacacctccaactactacaaatctacaagtgtggactttgctgttaatacagaaggcgtgtactctgaaccccgccccattggcacccgttacctcactcgtaatctgtaa

SEQ ID NO: 3769 - DNA, 2217 bp, Artificial Sequence
  Description of Artificial Sequence: Synthetic polynucleotide
atggctgccgatggttatcttccagattggctcgaggacaacctctctgagggcattcgcgagtggtgggcgctgaaacctggagccccgaagcccaaagccaaccagcaaaagcaggacgacggccggggtctggtgcttcctggctacaagtacctcggacccttcaacggactcgacaagggggagcccgtcaacgcggcggacgcggcggccctcgagcacgacaaggcctacgaccagcagctgcaggcgggtgacaatccgtacctgcggtataaccacgccgacgccgagtttcaggagcgtctgcaagaagatacgtcttttgggggcaacctcgggcgagcagtcttccaggccaagaagcgggttctcgaacctctcggtctggttgaggaaggcgctaagacggctcctggaaagaagagaccggtagagccatcaccccagcgttctccagactcctctacgggcatcggcaaggggggccaacagcccgccagaaaaagactcaattttggtcagactggcgactcagagtcagttccagaccctcaacctctcggagaacctccagcagcgccctctggtgtgggacctaatacaatggctgcaggcggtggcgcaccaatggcagacaataacgaaggcgccgacggagtgggtagttcctcgggaaattggcattgcgattccacatggctgggcgacagagtcatcaccaccagcacccgaacctgggccctgcccacctacaacaaccacctctacaagcaaatctccaacgggacatcgggaggagccaccaacgacaacacctacttcggctacagcaccccctgggggtattttgactttaacagattccactgccacttttcaccacgtgactggcagcgactcatcaacaacaactggggattccggcccaagagactcagcttcaagctcttcaacatccaggtcaaggaggtcacgcagaatgaaggcaccaagaccatcgccaataacctcaccagcaccatccaggtgtttacggactcggagtaccagctgccgtacgttctcggctctgcccaccagggctgcctgcctccgttcccggcggacgtgttcacgattccccagtacggctacctaacactcaacaacggtagtcaggccgtgggacgctcctccttctactgcctggaatactttccttcgcagatgctgagaaccggcaacaacttccagtttacttacaccttcgaggacgtgcctttccacagcagctacgcccacagccagagcttggaccggctgatgaatcctctgattgaccagtacctgtactacttgtctcggattcaaacaacaggaggcacggcaaatacgcagactctgggcttcagccaaggtgggcctaatacaatggccaatcaggcaaagaactggctgccaggaccctgttaccgccaacaacgcgtctcaacgacaaccgggcaaaacaacaatagcaactttgcctggactgctgggaccaaataccatctgaatggaagaaattcattggctaatcctggcatcgctatggcaacacacaaagacgacgaggagcgtttttttcccagtaacgggatcctgatttttggcaaacaaaatgctgccagagacaatgcggattacagcgatgtcatgcccaccagcgaggaagaaatcaaaaccactaaccctgtggccacagaggaatacggtatcgtggcagataacttgcagcagcaaaacacggctcctcaaattggaactgtcaacagccagggggccttacccggtatggtctggcagaaccgggacgtgtacctgcagggtcccatctgggccaagattcctcacacggacggcaacttccacccgtctccgctgatgggcggctttggcctgaaacatcctccgcctcagatcctgatcaagaacacgcctgtacctgcggatcctccgaccaccttcaaccagtcaaagctgaactctttcatcacgcaatacagtaccggacaggtcagcgtggaaattgaatgggagctgcagaaggaaaacagcaagcgctggaaccccgagatccagtacacctccaactactacaaatctacaagtgtggactttgctgttaatacagaaggcgtgtactctgaaccccgccccattggcacccgttacctcacccgtaatctgtaa

SEQ ID NO: 3770 - DNA, 2217 bp, Artificial Sequence
  Description of Artificial Sequence: Synthetic polynucleotide
atggctgccgatggttatctcccagattggctcgaggacaacctctctgagggcattcgcgagtggtgggcactgaaacctggagccccgaagcccaaagccaaccagcaaaagcaggacgacggccggggtctggtgcttcctggctacaagtacctcggacccttcaacggactcgacaagggggagcccgtcaacgcggcggacgcggcggccctcgagcacgacaaggcctacgaccagcagctgcaggcgggtgacaatccgtacctgcggtataaccacgccgacgccgagtttcaggagcgtctgcaagaagatacgtcttttgggggcaacctcgggcgagcagtcttccaggccaagaagcgggttctcgaacctctcggtctggttgaggaaggcgctaagacggctcctggaaaggagagaccggtagagccatcaccccagcgttctccagactcctctacgggcatcggcaagaagggccaacagcctgccagaaaaagactcaattttggtcagactggcgactcagagtcagttccagaccctcaacctctcggagaacctccagcagcgccctctggtgtgggacctaatacaatggctgcaggcggtggcgcaccaatggcagacaataacgaaggcgccgacggagtgggtagttcctcgggaaattggcattgcgattccacatggctgggcgacagagtcatcaccaccagcacccgaacctgggccctgcccacctacaacaaccacctctacaagcaaatctccaacgggacatcgggaggagccaccaacgacaacacctacttcggctacagcaccccctgggggtattttgactttaacagattccactgccacttttcaccacgtgactggcagcgactcatcaacaacaactggggattccggcccaagagactcagcttcaagctcttcaacatccaggtcaaggaggtcacgcagaatgaaggcaccaagaccaccgccaataacctcaccagcaccatccaggtgtttacggactcggagtaccagctgccgtacgttctcggctctgcccaccagggctgcctgcctccgttcccggcggacgtgttcacgattccccagtacggctacctaacactcaacaacggtagtcaggccgtgggacgctcctccttctactgcctggaatactttccttcgcagatgctgagaaccggcaacaacttccagtttacttacaccttcgaggacgcgcctttccacagcagctacgcccacagccagagcttggaccggctgatgaatcctctgattgaccagtacctgtactacttgtctcggattcaaacaacaggaggcacggcaaatacgcagactctgggcttcagccaaggtgggcctaatacaatggccaatcaggcaaagaactggctgccaggaccctgttaccgccaacaacgcgtctcaacgacaaccgggcaaaacaacaatagcaactttgcctggactgctgggaccaaataccatctgaatggaagaaattcattggctaatcctggcatcgctatggcaacacacaaagacgacgaggagcgtttttttcccagtaacgggatcctgatttttggcaaacaaaatgctgccagagacaatgcggattacagcgatgtcatgcccaccagcgaggaagaaatcaaaaccactaaccctgtggccacagaggaatacggtatcgtggcagataacttgcagcagcaaaacacggctcctcaaattggaactgtcaacagccagggggccttacccggtatggtctggcagaaccgggacgtgtacctgcagggtcccatctgggccaagattcctcacacggacggcaacttccacccgtctccgctgatgggcggctttggcctgaaacatcctccgcctcagatcctgatcaagaacacgcctgtacctgcggatcctccgaccaccttcaaccagtcaaagctgaactctttcatcacgcaatacagcaccggacaggtcagcgtggaaattgaatgggagctgcagaaggaaaacagcaagcgctggaaccccgagatccagtacacctccaactactacaaatctacaagtgtggactttgctgttaatacagaaggcgtgtactctgaaccccgccccattggcacccgttacctcactcgtaatctgtaa

SEQ ID NO: 3771 - DNA, 2217 bp, Artificial Sequence
  Description of Artificial Sequence: Synthetic polynucleotide
atggctgccgatggttatcttccagattggctcgaggacaacctctctgagggcattcgcgagtggtgggcgctgaaacctggagccccgaagcccaaagccaaccagcaaaagcaggacgacggccggggtctggtgcttcctggctacaagtacctcggacccttcaacggactcgacaagggggagcccgtcaacgcggcggacgcggcggccctcgagcacgacaaggcctacgaccagcagctgcaggcgggtgacaatccgtacctgcggtataaccacgccgacgccgagtttcaggagcgtctgcaagaagatacgtcttttgggggcaacctcgggcgagcagtcttccaggccaagaagcgggttctcgaacctctcggtctggttgaggaaggcgctaagacggctcctggaaagaagagaccggtagagccatcaccccagcgttctccagactcctctacgggcatcggcaaggagggccaacagcccgccagaaaaagactcaattttggtcagactggcgactcagagtcagttccagaccctcaacctctcggagaacctccagcagcgccctctggtgtgggacctaatacaatggctgcaggcggtggcgcaccaatggcagacaataacgaaggcgccgacggagtgggtagttcctcgggaaattggcattgcgattccacatggctgggcgacagagtcatcaccaccagcacccgaacctgggccctgcccacctacaacaaccacctctacaagcaaatctccaacgggacatcgggaggagccaccaacgacaacacctacttcggctacagcaccccctgggggtattttgactttaacagattccactgccacttttcaccacgtgactggcagcgactcatcaacaacaactggggattccggcccaagagactcagcttcaagctcttcaacatccaggtcaaggaggtcacgcagaatgaaggcaccaagaccatcgccaataacctcaccagcaccatccaggtgtttacggactcggagtaccagctgccgtacgttctcggctctgcccaccagggctgcctgcctccgttcccggcggacgtgttcacgattccccagtacggctacctaacactcaacaacggtagtcaggccgtgggacgctcctccttctactgcctggaatactttccttcgcagatgctgagaaccggcaacaacttccagtttacttacaccttcgaggacgtgcctttccacagcagctacgcccacagccagagcttggaccggctgatgaatcctctgattgaccagtacctgtactacttgtctcggattcaaacaacaggaggcacggcaaatacgcagactctgggcttcagccaaggtgggcctaatacaatggccaatcaggcaaagaactggctgccaggaccctgttaccgccaacaacgcgtctcaacgacaaccgggcaaaacaacaatagcaactttgcctggactgctgggaccaaataccatctgaatggaagaaattcattggctaatcctggcatcgctatggcaacacacaaagacgacgaggagcgtttttttcccagtaacgggatcctgatttttggcaaacaaaatgctgccagagacaatgcggattacagcgatgtcatgcccaccagcgaggaagaaatcaaaaccactaaccctgtggccacagaggaatacggtatcgtggcagataacttgcagcagcaaaacacggctcctcaaattggaactgtcaacagccagggggccttacccggtatggtctggcagaaccgggacgtgtacctgcagggtcccatctgggccaagattcctcacacggacggcaacttccacccgtctccgctgatgggcggctttggcctgaaacatcctccgcctcagatcctgatcaagaacacgcctgtacctgcggatcctccgaccaccttcaaccagtcaaagctgaactctttcatcacgcaatactgtaccggacaggtcagcgtggaaattgaatgggagctgcagaaggaaaacagcaagcgctggaaccccgagatccagtacacctccaactactacaaatctacaagtgtggactttgctgttaatacagaaggcgtgtactctgaaccccgccccattggcacccgttacctcactcgtaatctgtaa

SEQ ID NO: 3772 - DNA, 2217 bp, Artificial Sequence
  Description of Artificial Sequence: Synthetic polynucleotide
atggctgccgatggttatcttccagattggctcgaggacaacctctctgagggcattcgcgagtggtgggcgctgaaacctggagccccgaagcccaaagccaaccagcaaaagcaggacgacggccggggtctggtgcttcctggctacaagtacctcggacccttcaacggactcgacaagggggagcccgtcaacgcggcggacgcggcggccctcgagcacgacaaggcctacgaccagcagctgcaggcgggtgacaatccgtacctgcggtataaccacgccgacgccgagtttcaggagcgtctgcaagaagatacgtcttttgggggcaacctcgggcgagcagtcttccaggccaagaagcgggttctcgaacctctcggtctggttgaggaaggcgctaagacggctcctggaaagaagagaccggtagagccatcaccccagcgttctccagactcctctacgggcatcggcaaggagggccaacagcccgccagaaaaagactcaattttggtcagactggcgactcagagtcagttccagaccctcaacctctcggagaacctccagcagcgccctctggtgtgggacctaatacaatggctgcaggcggtggcgcaccaatggcagacaataacgaaggcgccgacggagtgggtagttcctcgggaaattggcattgcgattccacatggctgggcgacagagtcatcaccaccagcacccgaacctgggccctgcccacctacaacaaccacctctacaagcaaatctccaacgggacatcgggaggagccaccaacgacaacacctacttcggctacagcaccccctgggggtattttgactttaacagattccactgccacttttcaccacgtgactggcagcgactcatcaacaacaactggggattccggcccaagagactcagcttcaagctcttcaacatccaggtcaaggaggtcacgcagaatgaaggcaccaagaccatcgccaataacctcaccagcaccatccaggtgtttacggactcggagtaccagctgccgtacgttctcggctctgcccaccagggctgcctgcctccgttcccggcggacgtgttcacgattccccagtacggctacctaacactcaacaacggtagtcaggccgtgggacgctcctccttctactgcctggaatactttccttcgcagatgctgagaaccggcaacaacttccagtttacttacaccttcgaggacgtgcctttccacagcagctacgcccacagccagagcttggaccggctgatgaatcctctgattgaccagtacctgtactacttgtctcggattcaaacaacaggaggcacggcaaatacgcagactctgggcttcagccaaggtgggcctaatacaatggccaatcaggcaaagaactggctgccaggaccctgttaccgccaacaacgcgtctcaacgacaaccgggcaaaacaacaatagcaactttgcctggactgctgggaccaaataccatctgaatggaagaaattcattggctaatcctggcatcgctatggcaacacacaaagacgacgaggagcgtttttttcccagtaacgggatcctgatttttggcaaacaaaatgctgccagagacaatgcggattacagcgatgtcatgcccaccagcgaggaagaaatcaaaaccactaaccctgtggccacagaggaatacggtatcgtggcagataacttgcagcagcaaaacacggctcctcaaattggaactgtcaacagccagggggccttacccggtatggtctggcagaaccgggacgtgtacctgcagggtcccatctgggccaagattcctcacacggacggcaacttccacccgtctccgctgatgggcggctttggcctgaaacatcctccgcctcagatcctgatcaagaacacgcctgtacctgcggatcctccgaccaccttcaaccagtcaaagctgaactctttcatcacgcaatacagcaccggacaggtcagcgtggaaattgaatgggagctgcagaaggaaaacagcaagcgctggaaccccgagatccagtacacctccaactactacaaatctacaagtgtggactttgctgttaatacagaaggcgtgtactctgaaccccgccccattggcacccgttacctcacccgtaatctgtaa

SEQ ID NO: 3773 - DNA, 2217 bp, Artificial Sequence
  Description of Artificial Sequence: Synthetic polynucleotide
atggctgccgatggttatctcccagattggctcgaggacaacctctctgagggcattcgcgagtggtgggcactgaaacctggagccccgaagcccaaagccaaccagcaaaagcaggacgacggccggggtctggtgcttcctggctacaagtacctcggacccttcaacggactcgacaagggggagcccgtcaacgcggcggacgcggcggccctcgagcacgacaaggcctacgaccagcagctgcaggcgggtgacaatccgtacctgcggtataaccacgccgacgccgagtttcaggagcgtctgcaagaagatacgtcttttgggggcaacctcgggcgagcagtcttccaggccaagaagcgggttctcgaacctctcggtctggttgaggaaggcgctaagacggctcctggaaaggagagaccggtagagccatcaccccagcgttctccagactcctctacgggcatcggcaagaagggccaacagcctgccagaaaaagactcaattttggtcagactggcgactcagagtcagttccagaccctcaacctctcggagaacctccagcagcgccctctggtgtgggacctaatacaatggctgcaggcggtggcgcaccaatggcagacaataacgaaggcgccgacggagtgggtagttcctcgggaaattggcattgcgattccacatggctgggcgacagagtcatcaccaccagcacccgaacctgggccctgcccacctacaacaaccacctctacaagcaaatccccaacgggacatcgggaggagccaccaacgacaacacctacttcggctacagcaccccctgggggtattttgactttaacagattccactgccacttttcaccacgtgactggcagcgactcatcaacaacaactggggattccggcccaagagactcagcttcaagctcttcaacatccaggtcaaggaggtcacgcagaatgaaggcaccaagaccaccgccaataacctcaccagcaccatccaggtgtttacggactcggagtaccagctgccgtacgttctcggctctgcccaccagggctgcctgcctccgttcccggcggacgtgttcacgattccccagtacggctacctaacactcaacaacggtagtcaggccgtgggacgctcctccttctactgcctggaatactttccttcgcagatgctgagaaccggcaacaacttccagtttacttacaccttcgaggacgtgcctttccacagcagctacgcccacagccagagcttggaccggctgatgaatcctctgattgaccagtacctgtactacttgtctcggattcaaacaacaggaggcacggcaaatacgcagactctgggcttcagccaaggtgggcctaatacaatggccaatcaggcaaagaactggctgccaggaccctgttaccgccaacaacgcgtctcaacgacaaccgggcaaaacaacaatagcaactttgcctggactgctgggaccaaataccatctgaatggaagaaattcattggctaatcctggcatcgctatggcaacacacaaagacgacgaggagcgtttttttcccagtaacgggatcctgatttttggcaaacaaaatgctgccagagacaatgcggattacagcgatgtcatgcccaccagcgaggaagaaatcaaaaccactaaccctgtggccacagaggaatacggtatcgtggcagataacttgcagcagcaaaacacggctcctcaaattggaactgtcaacagccagggggccttacccggtatggtctggcagaaccgggacgtgtacctgcagggtcccatctgggccaagattcctcacacggacggcaacttccacccgtctccgctgatgggcggctttggcctgaaacatcctccgcctcagatcctgatcaagaacacgcctgtacctgcggatcctccgaccaccttcaaccagtcaaagctgaactctttcatcacgcaatacagcaccggacaggtcagcgtggaaattgaatgggagctgcagaaggaaaacagcaagcgctggaaccccgagatccagtacacctccaactactacaaatctacaagtgtggactttgctgttaatacagaaggcgtgtactctgaaccccgccccattggcacccgttacctcacccgtaatctgtaa

SEQ ID NO: 3774 - DNA, 2217 bp, Artificial Sequence
  Description of Artificial Sequence: Synthetic polynucleotide
atggctgccgatggttatcttccagattggctcgaggacaacctctctgagggcattcgcgagtggtgggcgctgaaacctggagccccgaagcccaaagccaaccagcaaaagcaggacgacggccggggtctggtgcttcctggctacaagtacctcggacccttcaacggactcgacaagggggagcccgtcaacgcggcggacgcggcggccctcgagcacgacaaggcctacgaccagcagctgcaggcgggtgacaatccgtacctgcggtataaccacgccgacgccgagtttcaggagcgtctgcaagaagatacgtcttttgggggcaacctcgggcgagcagtcttccaggccaagaagcgggttctcgaacctctcggtctggttgaggaaggcgctaagacggctcctggaaagaagagaccggtagagccatcaccccagcgttctccagactcctctacgggcatcggcaaggagggccaacagcccgccagaaaaagactcaattttggtcagactggcgactcagagtcagttccagaccctcaacctctcggagaacctccagcagcgccctctggtgtgggacctaatacaatggctgcaggcggtggcgcaccaatggcagacaataacgaaggcgccgacggagtgggtagttcctcgggaaattggcattgcgattccacatggctgggcgacagagtcatcaccaccagcacccgaacctgggccctgcccacctacaacaaccacctctacaagcaaatctccaacgggacatcgggaggagccaccaacgacaacacctacttcggctacagcaccccctgggggtattttgactttaacagattccactgccacttttcaccacgtgactggcagcgactcatcaacaacaactggggattccggcccaagagactcagcttcaagctcttcaacatccaggtcaaggaggtcacgcagaatgaaggcaccaagaccaccgccaataacctcaccagcaccatccaggtgtttacggactcggagtaccagctgccgtacgttctcggctctgcccaccagggctgcctgcctccgttcccggcggacgtgttcacgattccccagtacggctacctaacactcaacaacggtagtcaggccgtgggacgctcctccttctactgcctggaatactttccttcgcagatgctgagaaccggcaacaacttccagtttacttacaccttcgaggacgtgcctttccacagcagctacgcccacagccagagcttggaccggctgatgaatcctctgattgaccagtacctgtactacttgtctcggattcaaacaacaggaggcacggcaaatacgcagactctgggcttcagccaaggtgggcctaatacaatggccaatcaggcaaagaactggctgccaggaccctgttaccgccaacaacgcgtctcaacgacaaccgggcaaaacaacaatagcaactttgcctggactgctgggaccaaataccatctgaatggaagaaattcattggctaatcctggcatcgctatggcaacacacaaagacgacgaggagcgtttttttcccagtaacgggatcctgatttttggcaaacaaaatgctgccagagacaatgcggattacagcgatgtcatgcccaccagcgaggaagaaatcaaaaccactaaccctgtggccacagaggaatacggtatcgtggcagataacttgcagcagcaaaacacggctcctcaaattggaactgtcaacagccagggggccttacccggtatggtctggcagaaccgggacgtgtacctgcagggtcccatctgggccaagattcctcacacggacggcaacttccacccgtctccgctgatgggcggctttggcctgaaacatcctccgcctcagatcctgatcaagaacacgcctgtacctgcggatcctccgaccaccttcaaccagtcaaagctgaactctttcatcacgcaatacagcaccggacaggtcagcgtggaaattgaatgggagctgcagaaggaaaacagcaagcgctggaaccccgagatccagtacacctccaactactacaaatctacaagtgtggactttgctgttaatacagaaggcgtgtactctgaaccccgccccattggcacccgttacctcacccgtaatctgtaa

SEQ ID NO: 3775 - DNA, 2217 bp, Artificial Sequence
  Description of Artificial Sequence: Synthetic polynucleotide
atggctgccgatggttatctcccagattggctcgaggacaacctctctgagggcattcgcgagtggtgggcactgaaacctggagccccgaagcccaaagccaaccagcaaaagcaggacgacggccggggtctggtgcttcctggctacaagtacctcggacccttcaacggactcgacaagggggagcccgtcaacgcggcggacgcggcggccctcgagcacgacaaggcctacgaccagcagctgcaggcgggtgacaatccgtacctgcggtataaccacgccgacgccgagtttcaggagcgtctgcaagaagatacgtcttttgggggcaacctcgggcgagcagtcttccaggccaagaagcgggttctcgaacctctcggtctggttgaggaaggcgctaagacggctcctggaaaggagagaccggtagagccatcaccccagcgttctccagactcctctacgggcatcggcaagaagggccaacagcctgccagaaaaagactcaattttggtcagactggcgactcagagtcagttccagaccctcaacctctcggagaacctccagcagcgccctctggtgtgggacctaatacaatggctgcaggcggtggcgcaccaatggcagacaataacgaaggcgccgacggagtgggtagttcctcgggaaattggcattgcgattccacatggctgggcgacagagtcatcaccaccagcacccgaacctgggccctgcccacctacaacaaccacctctacaagcaaatctccaacgggacatcgggaggagccaccaacgacaacacctacttcggctacagcaccccctgggggtattttgactttaacagattccactgccacttttcaccacgtgactggcagcgactcatcaacaacaactggggattccggcccaagagactcagcttcaagctcttcaacatccaggtcaaggaggtcacgcagaatgaaggcaccaagaccaccgccaataacctcaccagcaccatccaggtgtttacggactcggagtaccagctgccgtacgttctcggctctgcccaccagggctgcctgcctccgttcccggcggacgtgttcacgattccccagtacggctacctaacactcaacaacggtagtcaggccgtgggacgctcctccttctactgcctggaatactttccttcgcagatgctgagaaccggcaacaacttccagtttacttacaccttcgaggacgtgcctttccacagcagctacgcccacagccagagcttggaccggctgatgaatcctctgattgaccagtacctgtactacttgtctcggattcaaacaacaggaggcacggcaaatacgcagactctgggcttcagccaaggtgggcctaatacaatggccaatcaggcaaagaactggctgccaggaccctgttaccgccaacaacgcgtctcaacgacaaccgggcaaaacaacaatagcaactttgcctggactgctgggaccaaataccatctgaatggaagaaattcattggctaatcctggcatcgctatggcaacacacaaagacgacgaggagcgtttttttcccagtaacgggatcctgatttttggcaaacaaaatgctgccagagacaatgcggattacagcgatgtcatgcccaccagcgaggaagaaatcaaaaccactaaccctgtggccacagaggaatacggtatcgtggcagataacttgcagcagcaaaacacggctcctcaaattggaactgtcaacagccagggggccttacccggtatggtctggcagaaccgggacgtgtacctgcagggtcccatctgggccaagattcctcacacggacggcaacttccacccgtctccgctgatgggcggctttggcctgaaacatcctccgcctcagatcctgatcaagaacacgcctgtacctgcggatcctccgaccaccttcaaccagtcaaagctgaactctttcatcacgcaatacagtaccggacaggtcagcgtggaaattgaatgggagctgcagaaggaaaacagcaagcgctggaaccccgagatccagtacacctccaactactacaaatctacaagtgtggactttgctgttaatacagaaggcgtgtactctgaaccccgccccattggcacccgttacctcacccgtaatctgtaa

SEQ ID NO: 3776 - DNA, 2217 bp, Artificial Sequence
  Description of Artificial Sequence: Synthetic polynucleotide
atggctgccgatggttatctcccagattggctcgaggacaacctctctgagggcattcgcgagtggtgggcactgaaacctggagccccgaagcccaaagccaaccagcaaaagcaggacgacggccggggtctggtgcttcctggctacaagtacctcggacccttcaacggactcgacaagggggagcccgtcaacgcggcggacgcggcggccctcgagcacgacaaggcctacgaccagcagctgcaggcgggtgacaatccgtacctgcggtataaccacgccgacgccgagtttcaggagcgtctgcaagaagatacgtcttttgggggcaacctcgggcgagcagtcttccaggccaagaagcgggttctcgaacctctcggtctggttgaggaaggcgctaagacggctcctggaaaggagagaccggtagagccatcaccccagcgttctccagactcctctacgggcatcggcaagaagggccaacagcctgccagaaaaagactcaattttggtcagactggcgactcagagtcagttccagaccctcaacctctcggagaacctccagcagcgccctctggtgtgggacctaatacaatggctgcaggcggtggcgcaccaatggcagacaataacgaaggcgccgacggagtgggtagttcctcgggaaattggcattgcgattccacatggctgggcgacagagtcatcaccaccagcacccgaacctgggccctgcccacctacaacaaccacctctacaagcaaatctccaacgggacatcgggaggagccaccaacgacaacacctacttcggctacagcaccccctgggggtattttgactttaacagattccactgccacttttcaccacgtgactggcagcgactcatcaacaacaactggggattccggcccaagagactcagcttcaagctcttcaacatccaggtcaaggaggtcacgcagaatgaaggcaccaagaccatcgccaataacctcaccagcaccatccaggtgtttacggactcggagtaccagctgccgtacgttctcggctctgcccaccagggctgcctgcctccgttcccggcggacgtgttcacgattccccagtacggctacctaacactcaacaacggtagtcaggccgtgggacgctcctccttctactgcctggaatactttccttcgcagatgctgagaaccggcaacaacttccagtttacttacaccttcgaggacgtgcctttccacagcagctacgcccacagccagagcttggaccggctgatgaatcctctgattgaccagtacctgtactacttgtctcggattcaaacaacaggaggcacggcaaatacgcagactctgggcttcagccaaggtgggcctaatacaatggccaatcaggcaaagaactggctgccaggaccctgttaccgccaacaacgcgtctcaacgacaaccgggcaaaacaacaatagcaactttgcctggactgctgggaccaaataccatctgaatggaagaaattcattggctaatcctggcatcgctatggcaacacacaaagacgacgaggagcgtttttttcccagtaacgggatcctgatttttggcaaacaaaatgctgccagagacaatgcggattacagcgatgtcatgcccaccagcgaggaagaaatcaaaaccactaaccctgtggccacagaggaatacggtatcgtggcagataacttgcagcagcaaaacacggctcctcaaattggaactgtcaacagccagggggccttacccggtatggtctggcagaaccgggacgtgtacctgcagggtcccatctgggccaagattcctcacacggacggcaacttccacccgtctccgctgatgggcggctttggcctgaaacatcctccgcctcagatcctgatcaagaacacgcctgtacctgcggatcctccgaccaccttcaaccagtcaaagctgaactctttcatcacgcaatacagtaccggacaggtcagcgtggaaattgaatgggagctgcagaaggaaaacagcaagcgctggaaccccgagatccagtacacctccaactactacaaatctacaagtgtggactttgctgttaatacagaaggcgtgtactctgaaccccgccccattggcacccgttacctcacccgtaatctgtaa

SEQ ID NO: 3777 - DNA, 2217 bp, Artificial Sequence
  Description of Artificial Sequence: Synthetic polynucleotide
atggctgccgatggttatcttccagattggctcgaggacaacctctctgagggcattcgcgagtggtgggcgctgaaacctggagccccgaagcccaaagccaaccagcaaaagcaggacgacggccggggtctggtgcttcctggctacaagtacctcggacccttcaacggactcgacaagggggagcccgtcaacgcggcggacgcggcggccctcgagcacgacaaggcctacgaccagcagctgcaggcgggtgacaatccgtacctgcggtataaccacgccgacgccgagtttcaggagcgtctgcaagaagatacgtcttttgggggcaacctcgggcgagcagtcttccaggccaagaagcgggttctcgaacctctcggtctggttgaggaaggcgctaagacggctcctggaaagaagagaccggtagagccatcaccccagcgttctccagactcctctacgggcatcggcaagaagggccaacagcccgccagaaaaagactcaattttggtcagactggcgactcagagtcagttccagaccctcaacctctcggagaacctccagcagcgccctctggtgtgggacctaatacaatggctgcaggcggtggcgcaccaatggcagacaataacgaaggcgccgacggagtgggtagttcctcgggaaattggcattgcgattccacatggctgggcgacagagtcatcaccaccagcacccgaacctgggccctgcccacctacaacaaccacctctacaagcaaatctccaacgggacatcgggaggagccaccaacgacaacacctacttcggctacagcaccccctgggggtattttgactttaacagattccactgccacttttcaccacgtgactggcagcgactcatcaacaacaactggggattccggcccaagagactcagcttcaagctcttcaacatccaggtcaaggaggtcacgcagaatgaaggcaccaagaccatcgccaataacctcaccagcaccatccaggtgtttacggactcggagtacccgctgccgtacgttctcggctctgcccaccagggctgcctgcctccgttcccggcggacgtgttcacgattccccagtacggctacctaacactcaacaacggtagtcaggccgtgggacgctcctccttctactgcctggaatactttccttcgcagatgctgagaaccggcaacaacttccagtttacttacaccttcgaggacgtgcctttccacagcagctacgcccacagccagagcttggaccggctgatgaatcctctgattgaccagtacctgtactacttgtctcggattcaaacaacaggaggcacggcaaatacgcagactctgggcttcagccaaggtgggcctaatacaatggccaatcaggcaaagaactggctgccaggaccctgttaccgccaacaacgcgtctcaacgacaaccgggcaaaacaacaatagcaactttgcctggactgctgggaccaaataccatctgaatggaagaaattcattggctaatcctggcatcgctatggcaacacacaaagacgacgaggagcgtttttttcccagtaacgggatcctgatttttggcaaacaaaatgctgccagagacaatgcggattacagcgatgtcatgcccaccagcgaggaagaaatcaaaaccactaaccctgtggccacagaggaatacggtatcgtggcagataacttgcagcagcaaaacacggctcctcaaattggaactgtcaacagccagggggccttacccggtatggtctggcagaaccgggacgtgtacctgcagggtcccatctgggccaagattcctcacacggacggcaacttccacccgtctccgctgatgggcggctttggcctgaaacatcctccgcctcagatcctgatcaagaacacgcctgtacctgcggaccctccgaccaccttcaaccagtcaaagctgaactctttcatcacgcaatacagcaccggacaggtcagcgtggaaattgaatgggagctgcagaaggaaaacagcaagcgctggaaccccgagatccagtacacctccaactactacaaatctacaagtgtggactttgctgttaatacagaaggcgtgtactctgaaccccgccccattggcacccgttacctcacccgtaatctgtaa

SEQ ID NO: 3778 - DNA, 2217 bp, Artificial Sequence
  Description of Artificial Sequence: Synthetic polynucleotide
atggctgccgatggttatcttccagattggctcgaggacaacctctctgagggcattcgcgagtggtgggcgctgaaacctggagccccgaagcccaaagccaaccagcaaaagcaggacgacggccggggtctggtgcttcctggctacaagtacctcggacccttcaacggactcgacaagggggagcccgtcaacgcggcggacgcggcggccctcgagcacgacaaggcctacgaccagcagctgcaggcgggtgacaatccgtacctgcggtataaccacgccgacgccgagtttcaggagcgtctgcaagaagatacgtcttttgggggcaacctcgggcgagcagtcttccaggccaagaagcgggttctcgaacctctcggtctggttgaggaaggcgctaagacggctcctggaaagaagagaccggtagagccatcaccccagcgttctccagactcctctacgggcatcggcaagaagggccaacagcccgccagaaaaagactcaattttggtcagactggcgactcagagtcagttccagaccctcaacctctcggagaacctccagcagcgccctctggtgtgggacctaatacaatggctgcaggcggtggcgcaccaatggcagacaataacgaaggcgccgacggagtgggtagttcctcgggaaattggcattgcgattccacatggctgggcgacagagtcatcaccaccagcacccgaacctgggccctgcccacctacaacaaccacctctacaagcaaatctccaacgggacatcgggaggagccaccaacgacaacacctacttcggctacagcaccccctgggggtattttgactttaacagattccactgccacttttcaccacgtgactggcagcgactcatcaacaacaactggggattccggcccaagagactcagcttcaagctcttcaacatccaggtcaaggaggtcacgcagaatgaaggcaccaagaccatcgccaataacctcaccagcaccatccaggtgtttacggactcggagtaccagctgccgtacgttctcggctctgcccaccagggctgcctgcctccgttcccggcggacgtgttcacgattccccagtacggctacctaacactcaacaacggtagtcaggccgtgggacgctcctccttctactgcctggaatactttccttcgcagatgctgagaaccggcaacaacttccagtttacttacaccttcgaggacgtgcctttccacagcagctacgcccacagccagagcttggaccggctgatgaatcctctgattgaccagtacctgtactacttgtctcggattcaaacaacaggaggcacggcaaatacgcagactctgggcttcagccaaggtgggcctaatacaatggccaatcaggcaaagaactggctgccaggaccctgttaccgccaacaacgcgtctcaacgacaaccgggcaaaacaacaatagcaactttgcctggactgctgggaccaaataccatctgaatggaagaaattcattggctaatcctggcatcgctatggcaacacacaaagacgacgaggagcgtttttttcccagtaacgggatcctgatttttggcaaacaaaatgctgccagagacaatgcggattacagcgatgtcatgcccaccagcgaggaagaaatcaaaaccactaaccctgtggccacagaggaatacggtatcgtggcagataacttgcagcagcaaaacacggctcctcaaattggaactgtcaacagccagggggccttacccggtatggtctggcagaaccgggacgtgtacctgcagggtcccatctgggccaagattcctcacacggacggcaacttccacccgtctccgctgatgggcggctttggcctgaaacatcctccgcctcagatcctgatcaagaacacgcctgtacctgcggatcctccgaccaccttcaaccagtcaaagctgaactctttcatcacgcaatacggcaccggacaggtcagcgtggaaattgaatgggagctgcagaaggaaaacagcaagcgctggaaccccgagatccagtacacctccaactactacaaatctacaagtgtggactttgctgttaatacagaaggcgtgtactctgaaccccgccccattggcacccgttacctcacccgtaatctgtaa

SEQ ID NO: 3779 - DNA, 2217 bp, Artificial Sequence
  Description of Artificial Sequence: Synthetic polynucleotide
atggctgccgatggttatcttccagattggctcgaggacaacctctctgagggcattcgcgagtggtgggcgctgaaacctggagccccgaagcccaaagccaaccagcaaaagcaggacgacggccggggtctggtgcttcctggctacaagtacctcggacccttcaacggactcgacaagggggagcccgtcaacgcggcggacgcggcggccctcgagcacgacaaggcctacgaccagcagctgcaggcgggtgacaatccgtacctgcggtataaccacgccgacgccgagtttcaggagcgtctgcaagaagatacgtcttttgggggcaacctcgggcgagcagtcttccaggccaagaagcgggttctcgaacctctcggtctggttgaggaaggcgctaagacggctcctggaaagaagagaccggtagagccatcaccccagcgttctccagactcctctacgggcatcggcaagaagggccaacagcccgccagaaaaagactcaattttggtcagactggcgactcagagtcagttccagaccctcaacctctcggagaacctccagcagcgccctctggtgtgggacctaatacaatggctgcaggcggtggcgcaccaatggcagacaataacgaaggcgccgacggagtgggtagttcctcgggaaattggcattgcgattccacatggctgggcgacagagtcatcaccaccagcacccgaacctgggccctgcccacctacaacaaccacctctacaagcaaatctccaacgggacatcgggaggagccaccaacgacaacacctacttcggctacagcaccccctgggggtattttgactttaacagattccactgccacttttcaccacgtgactggcagcgactcatcaacaacaactggggattccggcccaagagactcagcttcaagcccttcaacatccaggtcaaggaggtcacgcagaatgaaggcaccaagaccatcgccaataacctcaccagcaccatccaggtgtttacggactcggagtaccagctgccgtacgttctcggctctgcccaccagggctgcctgcctccgttcccggcggacgtgttcacgattccccagtacggctacctaacactcaacaacggtagtcaggccgtgggacgctcctccttctactgcctggaatactttccttcgcagatgctgagaaccggcaacaacttccagtttacttacaccttcgaggacgtgcctttccacagcagctacgcccacagccagagcttggaccggctgatgaatcctctgattgaccagtacctgtactacttgtctcggattcaaacaacaggaggcacggcaaatacgcagactctgggcttcagccaaggtgggcctaatacaatggccaatcaggcaaagaactggctgccaggaccctgttaccgccaacaacgcgtctcaacgacaaccgggcaaaacaacaatagcaactttgcctggactgctgggaccaaataccatctgaatggaagaaattcattggctaatcctggcatcgctatggcaacacacaaagacgacgaggagcgtttttttcccagtaacgggatcctgatttttggcaaacaaaatgctgccagagacaatgcggattacagcgatgtcatgcccaccagcgaggaagaaatcaaaaccactaaccctgtggccacagaggaatacggtatcgtggcagataacttgcagcagcaaaacacggctcctcaaattggaactgtcaacagccagggggccttacccggtatggtctggcagaaccgggacgtgtacctgcagggtcccatctgggccaagattcctcacacggacggcaacttccacccgtctccgctgatgggcggctttggcctgaaacatcctccgcctcagatcctgatcaagaacacgcctgtacctgcggatcctccgaccaccttcaaccagtcaaagctgaactctttcatcacgcaatacagcaccggacaggtcagcgtggaaattgaatgggagctgcagaaggaaaacagcaagcgctggaaccccgagatccagtacacctccaactactacaaatctacaagtgtggactttgctgttaatacagaaggcgtgtactctgaaccccgccccattggcacccgttacctcacccgtaatctgtaa

SEQ ID NO: 3780 - DNA, 2217 bp, Artificial Sequence
  Description of Artificial Sequence: Synthetic polynucleotide
atggctgccgatggttatcttccagattggctcgaggacaacctctctgagggcattcgcgagtggtgggcgctgaaacctggagccccgaagcccaaagccaaccagcaaaagcaggacgacggccggggtctggtgcttcctggctacaagtacctcggacccttcaacggactcgacaagggggagcccgtcaacgcggcggacgcggcggccctcgagcacgacaaggcctacgaccagcagctgcaggcgggtgacaatccgtacctgcggtataaccacgccgacgccgagtttcaggagcgtctgcaagaagatacgtcttttgggggcaacctcgggcgagcagtcttccaggccaagaagcgggttctcgaacctctcggtctggttgaggaaggcgctaagacggctcctggaaagaagagaccggtagagccatcaccccagcgttctccagactcctctacgggcatcggcaagaagggccaacagcccgccagaaaaagactcaattttggtcagactggcgactcagagtcagttccagaccctcaacctctcggagaacctccagcagcgccctctggtgtgggacctaatacaatggctgcaggcggtggcgcaccaatggcagacaataacgaaggcgccgacggagtgggtagttcctcgggaaattggcattgcgattccacatggctgggcgacagagtcatcaccaccagcacccgaacctgggccctgcccacctacaacaaccacctctacaagcaaatctccaacgggacatcgggaggagccaccaacgacaacacctacttcggctacagcaccccctgggggtattttgactttaacagattccactgccacttttcaccacgtgactggcagcgactcatcaacaacaactggggattccggcccaagagactcagcttcaagctcttcaacatccaggtcaaggaggtcacgcagaatgaaggcaccaagaccatcgccaataacctcaccagcaccatccaggtgtttacggactcggagtaccagctgccgtacgttctcggctctgcccaccagggctgcctgcctccgttcccggcggacgtgttcacgattccccagtacggctacctaacactcaacaacggtagtcaggccgtgggacgctcctccttctactgcctggaatactttccttcgcagatgctgagaaccggcaacaacttccagtttacttacaccttcgaggacgtgcctttccacagcagctacgcccacagccagagcttggaccggctgatgaatcctctgattgaccagtacctgtactacttgtctcggattcaaacaacaggaggcacggcaaatacgcaggctctgggcttcagccaaggtgggcctaatacaatggccaatcaggcaaagaactggctgccaggaccctgttaccgccaacaacgcgtctcaacgacaaccgggcaaaacaacaatagcaactttgcctggactgctgggaccaaataccatctgaatggaagaaattcattggctaatcctggcatcgctatggcaacacacaaagacgacgaggagcgtttttttcccagtaacgggatcctgatttttggcaaacaaaatgctgccagagacaatgcggattacagcgatgtcatgcccaccagcgaggaagaaatcaaaaccactaaccctgtggccacagaggaatacggtatcgtggcagataacttgcagcagcaaaacacggctcctcaaattggaactgtcaacagccagggggccttacccggtatggtctggcagaaccgggacgtgtacctgcagggtcccatctgggccaagattcctcacacggacggcaacttccacccgtctccgctgatgggcggctttggcctgaaacatcctccgcctcagatcctgatcaagaacacgcctgtacctgcggatcctccgaccaccttcaaccagtcaaagctgaactctttcatcacgcaatacagcaccggacaggtcagcgtggaaattgaatgggagctgcagaaggaaaacagcaagcgctggaaccccgagatccagtacacctccaactactacaaatctacaagtgtggactttgctgttaatacagaaggcgtgtactctgaaccccgccccattggcacccgttacctcacccgtaatctgtaa

SEQ ID NO: 3781 - DNA, 2217 bp, Artificial Sequence
  Description of Artificial Sequence: Synthetic polynucleotide
atggctgccgatggttatcttccagattggctcgaggacaacctctctgagggcattcgcgagtggtgggcgctgaaacctggagccccgaagcccaaagccaaccagcaaaagcaggacgacggccggggtctggtgcttcctggctacaagtacctcggacccttcaacggactcgacaagggggagcccgtcaacgcggcggacgcggcggccctcgagcacgacaaggcctacgaccagcagctgcaggcgggtgacaatccgtacctgcggtataaccacgccgacgccgagtttcaggagcgtctgcaagaagatacgtcttttgggggcaacctcgggcgagcagtcttccaggccaagaagcgggttctcgaacctctcggtctggttgaggaaggcgctaagacggctcctggaaagaagagaccggtagagccatcaccccagcgttctccagactcctctacgggcatcggcaagaagggccaacagcccgccagaaaaagactcaattttggtcagactggcgactcagagtcagttccagaccctcaacctctcggagaacctccagcagcgccctctggtgtgggacctaatacaatggctgcaggcggtggcgcaccaatggcagacaataacgaaggcgccgacggagtgggtagttcctcgggaaattggcattgcgattccacatggctgggcgacagagtcatcaccaccagcacccgaacctgggccctgcccacctacaacaaccacctctacaagcaaatctccaacgggacatcgggaggagccaccaacgacaacacctacttcggctacagcaccccctgggggtattttgactttaacagattccactgccacttttcaccacgtgactggcagcgactcatcaacaacaactggggattccggcccaagagactcagcttcaagctcttcaacatccaggtcaaggaggtcacgcagaatgaaggcaccaagaccatcgccaataacctcaccagcaccatccaggtgtttacggactcggagtaccagctgccgtacgttctcggctctgcccaccagggctgcctgcctccgttcccggcggacgtgttcacgattccccagtacggctacctaacactcaacaacggtagtcaggccgtgggacgctcctccttctactgcctggaatactttccttcgcagatgctgagaaccggcaacaacttccagtttacttacaccttcgaggacgtgcctttccacagcagctacgcccacagccagagcttggaccggctgatgaatcctctgattgaccagtacctgtactacttgtctcggattcaaacaacaggaggcacggcaaatacgcagactctgggcttcagccaaggtgggcctaatacaatggccaatcaggcaaagaactggctgccaggaccctgttaccgccaacaacgcgtctcaacgacaaccgggcaaaacaacaatagcaactttgcctggactgctgggaccaaataccatctgaatggaagaaattcattggctaatcctggcatcgctatggcaacacacaaagacgacgaggagcgtttttttcccagtaacgggatcctgatttttggcaaacaaaatgctgccagagacaatgcggattacagcgatgtcatgcccaccagcgaggaagaaatcaaaaccactaaccctgtggccacagagggatacggtatcgtggcagataacttgcagcagcaaaacacggctcctcaaattggaactgtcaacagccagggggccttacccggtatggtctggcagaaccgggacgtgtacctgcagggtcccatctgggccaagattcctcacacggacggcaacttccacccgtctccgctgatgggcggctttggcctgaaacatcctccgcctcagatcctgatcaagaacacgcctgtacctgcggatcctccgaccaccttcaaccagtcaaagctgaactctttcatcacgcaatacagcaccggacaggtcagcgtggaaattgaatgggagctgcagaaggaaaacagcaagcgctggaaccccgagatccagtacacctccaactactacaaatctacaagtgtggactttgctgttaatacagaaggcgtgtactctgaaccccgccccattggcacccgttacctcacccgtaatctgtaa

SEQ ID NO: 3782 - DNA, 2217 bp, Artificial Sequence
  Description of Artificial Sequence: Synthetic polynucleotide
atggctgccgatggttatcttccagattggctcgaggacaacctctctgagggcattcgcgagtggtgggcgctgaaacctggagccccgaagcccaaagccaaccagcaaaagcaggacgacggccggggtctggtgcttcctggctacaagtacctcggacccttcaacggactcgacaagggggagcccgtcaacgcggcggacgcggcggccctcgagcacgacaaggcctacgaccagcagctgcaggcgggtgacaatccgtacctgcggtataaccacgccgacgccgagtttcaggagcgtctgcaagaagatacgtcttttgggggcaacctcgggcgagcagtcttccaggccaagaagcgggttctcgaacctctcggtctggttgaggaaggcgctaagacggctcctggaaagaagagaccggtagagccatcaccccagcgttctccagactcctctacgggcatcggcaagaagggccaacagcccgccagaaaaagactcaattttggtcagactggcgactcagagtcagttccagaccctcaacctctcggagaacctccagcagcgccctctggtgtgggacctaatacaatggctgcaggcggtggcgcaccaatggcagacaataacgaaggcgccgacggagtgggtagttcctcgggaaattggcattgcgattccacatggctgggcgacagagtcatcaccaccagcacccgaacctgggccctgcccacctacaacaaccacctctacaagcaaatctccaacgggacatcgggaggagccaccaacgacaacacctacttcggctacagcaccccctgggggtattttgactttaacagattccactgccacttttcaccacgtgactggcagcgactcatcaacaacaactggggattccggcccaagagactcagcttcaagctcttcaacatccaggtcaaggaggtcacgcagaatgaaggcaccaagaccatcgccaataacctcaccagcaccatccaggtgtttacggactcggagtaccagctgccgtacgttctcggctctgcccaccagggctgcctgcctccgttcccggcggacgtgttcacgattccccagtacggctacctaacactcaacaacggtagtcaggccgtgggacgctcctccttctactgcctggaatactttccttcgcagatgctgagaaccggcaacaacttccagtttacttacaccttcgaggacgtgcctttccacagcagctacgcccacagccagagcttggaccggctgatgaatcctctgattgaccagtacctgtactacttgtctcggattcaaacaacaggaggcacggcaaatacgcagactctgggcttcagccaaggtgggcctaatacaatggccaatcaggcaaagaactggctgccaggaccctgttaccgccaacaacgcgtctcaacgacaaccgggcaaaacaacaatagcaactttgcctggactgctgggaccaaataccatctgaatggaagaaattcattggctaatcctggcatcgctatggcaacacgcaaagacgacgaggagcgtttttttcccagtaacgggatcctgatttttggcaaacaaaatgctgccagagacaatgcggattacagcgatgtcatgcccaccagcgaggaagaaatcaaaaccactaaccctgtggccacagaggaatacggtatcgtggcagataacttgcagcagcaaaacacggctcctcaaattggaactgtcaacagccagggggccttacccggtatggtctggcagaaccgggacgtgtacctgcagggtcccatctgggccaagattcctcacacggacggcaacttccacccgtctccgctgatgggcggctttggcctgaaacatcctccgcctcagatcctgatcaagaacacgcctgtacctgcggatcctccgaccaccttcaaccagtcaaagctgaactctttcatcacgcaatacagcaccggacaggtcagcgtggaaattgaatgggagctgcagaaggaaaacagcaagcgctggaaccccgagatccagtacacctccaactactacaaatctacaagtgtggactttgctgttaatacagaaggcgtgtactctgaaccccgccccattggcacccgttacctcacccgtaatctgtaa

SEQ ID NO: 3783 - DNA, 2217 bp, Artificial Sequence
  Description of Artificial Sequence: Synthetic polynucleotide
atggctgccgatggttatcttccagattggctcgaggacaacctctctgagggcattcgcgagtggtgggcgctgaaacctggagccccgaagcccaaagccaaccagcaaaagcaggacgacggccggggtctggtgcttcctggctacaagtacctcggacccttcaacggactcgacaagggggagcccgtcaacgcggcggacgcggcggccctcgagcacgacaaggcctacgaccagcagctgcaggcgggtgacaatccgtacctgcggtataaccacgccgacgccgagtttcaggagcgtctgcaagaagatacgtcttttgggggcaacctcgggcgagcagtcttccaggccaagaagcgggttctcgaacctctcggtctggttgaggaaggcgctaagacggctcctggaaagaagagaccggtagagccatcaccccagcgttctccagactcctctacgggcatcggcaagaagggccaacagcccgccagaaaaagactcaattttggtcagactggcgactcagagtcagttccagaccctcaacctctcggagaacctccagcagcgccctctggtgtgggacctaatacaatggctgcaggcggtggcgcaccaatggcagacaataacgaaggcgccgacggagtgggtagttcctcgggaaattggcattgcgattccacatggctgggcgacagagtcatcaccaccagcacccgaacctgggccctgcccacctacaacaaccacctctacaagcaaatctccaacgggacatcgggaggagccaccaacgacaacacctacttcggctacagcaccccctgggggtattttgactttaacagattccactgccacttttcaccacgtgactggcagcgactcatcaacaacaactggggattccggcccaagagactcagcttcaagctcttcaacatccaggtcaaggaggtcacgcagaatgaaggcaccaagaccatcgccaataacctcaccagcaccatccaggtgtttacggactcggagtaccagctgccgtacgttctcggctctgcccaccagggctgcctgcctccgttcccggcggacgtgttcacgattccccagtacggctacctaacactcaacaacggtagtcaggccgtgggacgctcctccttctactgcctggaatactttccttcgcagatgctgagaaccggcaacaacttccagtttacttacaccttcgaggacgtgcctttccacagcagctacgcccacagccagagcttggaccggctgatgaatcctctgattgaccagtacctgtactacttgtctcggattcaaacaacaggaggcacggcaaatacgcagactctgggcttcagccaaggtgggcctaatacaatggccaatcaggcaaagaactggctgccaggaccctgttaccgccaacaacgcgtctcaacgacaaccgggcaaaacaacaatagcaactttgcctggactgctgggaccaaataccatctgaatggaagaaattcattggctaatcctggcatcgctatggcaacacacaaagacgacgaggagcgtttttttcccagtaacgggatcctgatttttggcaaacaaaatgctgccagagacaatgcggattacagcgatgtcatgcccaccagcgaggaagaaatcaaaaccactaaccctgtggccacagaggaatacggtatcgtggcagataacttgcagcagcaaaacacggctcctcaaattggaactgtcaacagccagggggccttacccggtatggtctggcagaaccgggacgtgtacctgcagggtcccatctgggccaagattcctcacacggacggcaacttccacccgtctccgctgatgggcggctttggcctgaaacatcctccgcctcagatcctgatcaagaacacgcctgtacctgcggatcctccgaccaccttcaaccagtcaaagccgaactctttcatcacgcaatacagcaccggacaggtcagcgtggaaattgaatgggagctgcagaaggaaaacagcaagcgctggaaccccgagatccagtacacctccaactactacaaatctacaagtgtggactttgctgttaatacagaaggcgtgtactctgaaccccgccccattggcacccgttacctcacccgtaatctgtaa

SEQ ID NO: 3784 - DNA, 2217 bp, Artificial Sequence
  Description of Artificial Sequence: Synthetic polynucleotide
atggctgccgatggttatcttccagattggctcgaggacaacctctctgagggcattcgcgagtggtgggcgctgaaacctggagccccgaagcccaaagccaaccagcaaaagcaggacgacggccggggtctggtgcttcctggctacaagtacctcggacccttcaacggactcgacaagggggagcccgtcaacgcggcggacgcggcggccctcgagcacgacaaggcctacgaccagcagctgcaggcgggtgacaatccgtacctgcggtataaccacgccgacgccgagtttcaggagcgtctgcaagaagatacgtcttttgggggcaacctcgggcgagcagtcttccaggccaagaagcgggttctcgaacctctcggtctggttgaggaaggcgctaagacggctcctggaaagaagagaccggtagagccatcaccccagcgttctccagactcctctacgggcatcggcaagaagggccaacagcccgccagaaaaagactcaattttggtcagactggcgactcagagtcagttccagaccctcaacctctcggagaacctccagcagcgccctctggtgtgggacctaatacaatggctgcaggcggtggcgcaccaatggcagacaataacgaaggcgccgacggagtgggtagttcctcgggaaattggcattgcgattccacatggctgggcgacagagtcatcaccaccagcacccgaacctgggccctgcccacctacaacaaccacctctacaagcaaatctccaacgggacatcgggaggagccaccaacgacaacacctacttcggctacagcaccccctgggggtattttgactttaacagattccactgccacttttcaccacgtgactggcagcgactcatcaacaacaactggggattccggcccaagagactcagcttcaagctcttcaacatccaggtcaaggaggtcacgcagaatgaaggcaccaagaccatcgccaataacctcaccagcaccatccaggtgtttacggactcggagtaccagctgccgtacgttctcggctctgcccaccagggctgcctgcctccgttcccggcggacgtgttcacgattccccagtacggctacctaacactcaacaacggtagtcaggccgtgggacgctcctccttctactgcctggaatactttccttcgcagatgctgagaaccggcaacaacttccagtttacttacaccttcgaggacgtgcctttccacagcagctacgcccacagccagagcttggaccggctgatgaatcctctgattgaccagtacctgtactacttgtctcggattcaaacaacaggaggcacggcaaatacgcagactctgggcttcagccaaggtgggcctaatacaatggccaatcaggcaaagaactggctgccaggaccctgttaccgccaacaacgcgtctcaacgacaaccgggcaaaacaacaatagcaactttgcctggactgctgggaccaaataccatctgaatggaagaaattcattggctaatcctggcatcgctatggcaacacacaaagacgacgaggagcgttttttttccagtaacgggatcctgatttttggcaaacaaaatgctgccagagacaatgcggattacagcgatgtcatgcccaccagcgaggaagaaatcaaaaccactaaccctgtggccacagaggaatacggtatcgtggcagataacttgcagcagcaaaacacggctcctcaaattggaactgtcaacagccagggggccttacccggtatggtctggcagaaccgggacgtgtacctgcagggtcccatctgggccaagattcctcacacggacggcaacttccacccgtctccgctgatgggcggctttggcctgaaacatcctccgcctcagatcctgatcaagaacacgcctgtacctgcggatcctccgaccaccttcaaccagtcaaagctgaactctttcatcacgcaatacagcaccggacaggtcagcgtggaaattgaatgggagctgcagaaggaaaacagcaagcgctggaaccccgagatccagtacacctccaactactacaaatctacaagtgtggactttgctgttaatacagaaggcgtgtactctgaaccccgccccattggcacccgttacctcacccgtaatctgtaa

SEQ ID NO: 3785 - DNA, 2217 bp, Artificial Sequence
  Description of Artificial Sequence: Synthetic polynucleotide
atggctgccgatggttatcttccagattggctcgaggacaacctctctgagggcattcgcgagtggtgggcgctgaaacctggagccccgaagcccaaagccaaccagcaaaagcaggacgacggccggggtctggtgcttcctggctacaagtacctcggacccttcaacggactcgacaagggggagcccgtcaacgcggcggacgcggcggccctcgagcacgacaaggcctacgaccagcagctgcaggcgggtgacaatccgtacctgcggtataaccacgccgacgccgagtttcaggagcgtctgcaagaagatacgtcttttgggggcaacctcgggcgagcagtcttccaggccaagaagcgggttctcgaacctctcggtctggttgaggaaggcgctaagacggctcctggaaagaagagaccggtagagccatcaccccagcgttctccagactcctctacgggcatcggcaagaagggccaacagcccgccagaaaaagactcaattttggtcagactggcgactcagagtcagttccagaccctcaacctctcggagaacctccagcagcgccctctggtgtgggacctaatacaatggctgcaggcggtggcgcaccaatggcagacaataacgaaggcgccgacggagtgggtagttcctcgggaaattggcattgcgattccacatggctgggcgacagagtcatcaccaccagcacccgaacctgggccctgcccacctacaacaaccacctctacaagcaaatctccaacgggacatcgggaggagccaccaacgacaacacctacttcggctacagcaccccctgggggtattttgactttaacagattccactgccacttttcaccacgtgactggcagcgactcatcaacaacaactggggattccggcccaagagactcagcttcaagctcttcaacatccaggtcaaggaggtcacgcagaatgaaggcaccaagaccatcgccaataacctcaccagcaccatccaggtgtttacggactcggagtaccagctgccgtacgttctcggctctgcccaccagggctgcctgcctccgttcccggcggacgtgttcacgattccccagtacggctacctaacactcaacaacggtagtcaggccgtgggacgctcctccttctactgcctggaatactttccttcgcagatgctgagaaccggcaacaacttccagtttacttacaccttcgaggacgtgcctttccacagcagctacgcccacagccagagcttggaccggctgatgaatcctctgattgaccagtacctgtactacttgtctcggattcaaacaacaggaggcacggcaaatacgcagactctgggcttcagccaaggtgggcctaatacaatggccaatcaggcaaagaactggctgccaggaccctgttaccgccaacaacgcgtctcaacgacaaccgggcaaaacaacaatagcaactttgcctgggctgctgggaccaaataccatctgaatggaagaaattcattggctaatcctggcatcgctatggcaacacacaaagacgacgaggagcgtttttttcccagtaacgggatcctgatttttggcaaacaaaatgctgccagagacaatgcggattacagcgatgtcatgcccaccagcgaggaagaaatcaaaaccactaaccctgtggccacagaggaatacggtatcgtggcagataacttgcagcagcaaaacacggctcctcaaattggaactgtcaacagccagggggccttacccggtatggtctggcagaaccgggacgtgtacctgcagggtcccatctgggccaagattcctcacacggacggcaacttccacccgtctccgctgatgggcggctttggcctgaaacatcctccgcctcagatcctgatcaagaacacgcctgtacctgcggatcctccgaccaccttcaaccagtcaaagctgaaccctttcatcacgcaatacagcaccggacaggtcagcgtggaaattgaatgggagctgcagaaggaaaacagcaagcgctggaaccccgagatccagtacacctccaactactacaaatctacaagtgtggactttgctgttaatacagaaggcgtgtactctgaaccccgccccattggcacccgttacctcacccgtaatctgtaa

SEQ ID NO: 3786 - DNA, 2217 bp, Artificial Sequence
  Description of Artificial Sequence: Synthetic polynucleotide
atggctgccgatggttatcttccagattggctcgaggacaacctctctgagggcattcgcgagtggtgggcgctgaaacctggagccccgaagcccaaagccaaccagcaaaagcaggacgacggccggggtctggtgcttcctggctacaagtacctcggacccttcaacggactcgacaagggggagcccgtcaacgcggcggacgcggcggccctcgagcacgacaaggcctacgaccagcagctgcaggcgggtgacaatccgtacctgcggtataaccacgccgacgccgagtttcaggagcgtctgcaagaagatacgtcttttgggggcaacctcgggcgagcagtcttccaggccaagaagcgggttctcgaacctctcggtctggttgaggaaggcgctaagacggctcctggaaagaagagaccggtagagccatcaccccagcgttctccagactcctctacgggcatcggcaagaagggccaacagcccgccagaaaaagactcaattttggtcagactggcgactcagagtcagttccagaccctcaacctctcggagaacctccagcagcgccctctggtgtgggacctaatacaatggctgcaggcggtggcgcaccaatggcagacaataacgaaggcgccgacggagtgggtagttcctcgggaaattggcattgcgattccacatggctgggcgacagagtcatcaccaccagcacccgaacctgggccctgcccacctacaacaaccacctctacaagcaaatctccaacgggacatcgggaggagccaccaacgacaacacctacttcggctacagcaccccctgggggtattttgactttaacagattccactgccacttttcaccacgtgactggcagcgactcatcaacaacaactggggattccggcccaagagactcagcttcaagctcttcaacatccaggtcaaggaggtcacgcagaatgaaggcaccaagaccatcgccaataaccccaccagcaccatccaggtgtttacggactcggagtaccagctgccgtacgttctcggctctgcccaccagggctgcctgcctccgttcccggcggacgtgttcacgattccccagtacggctacctaacactcaacaacggtagtcaggccgtgggacgctcctccttctactgcctggaatactttccttcgcagatgctgagaaccggcaacaacttccagtttacttacaccttcgaggacgtgcctttccacagcagctacgcccacagccagagcttggaccggctgatgaatcctctgattgaccagtacctgtactacttgtctcggattcaaacaacaggaggcacggcaaatacgcagactctgggcttcagccaaggtgggcctaatacaatggccaatcaggcaaagaactggctgccaggaccctgttaccgccaacaacgcgtctcaacgacaaccgggcaaaacaacaatagcaactttgcctggactgctgggaccaaataccatctgaatggaagaaattcattggctaatcctggcatcgctatggcaacacacaaagacgacgaggagcgtttttttcccagtaacgggatcctgatttttggcaaacaaaatgctgccagagacaatgcggattacagcgatgtcatgcccaccagcgaggaagaaatcaaaaccactaaccctgtggccacagaggaatacggtatcgtggcggataacttgcagcagcaaaacacggctcctcaaattggaactgtcaacagccagggggccttacccggtatggtctggcagaaccgggacgtgtacctgcagggtcccatctgggccaagattcctcacacggacggcaacttccacccgtctccgctgatgggcggctttggcctgaaacatcctccgcctcagatcctgatcaagaacacgcctgtacctgcggatcctccgaccaccttcaaccagtcaaagctgaactctttcatcacgcaatacagcaccggacaggtcagcgtggaaattgaatgggagctgcagaaggaaaacagcaagcgctggaaccccgagatccagtacacctccaactactacaaatctacaagtgtggactttgctgttaatacagaaggcgtgtactctgaaccccgccccattggcacccgttacctcacccgtaatctgtaa

SEQ ID NO: 3787 - DNA, 2217 bp, Artificial Sequence
  Description of Artificial Sequence: Synthetic polynucleotide
atggctgccgatggttatcttccagattggctcgaggacaacctctctgagggcattcgcgagtggtgggcgctgaaacctggagccccgaagcccaaagccaaccagcaaaagcaggacgacggccggggtctggtgcttcctggctacaagtacctcggacccttcaacggactcgacaagggggagcccgtcaacgcggcggacgcggcggccctcgagcacgacaaggcctacgaccagcagctgcaggcgggtgacaatccgtacctgcggtataaccacgccgacgccgagtttcaggagcgtctgcaagaagatacgtcttttgggggcaacctcgggcgagcagtcttccaggccaagaagcgggttctcgaacctctcggtctggttgaggaaggcgctaagacggctcctggaaagaagagaccggtagagccatcaccccagcgttctccagactcctctacgggcatcggcaagaagggccaacagcccgccagaaaaagactcaattttggtcagactggcgactcagagtcagttccagaccctcaacctctcggagaacctccagcagcgccctctggtgtgggacctaatacaatggctgcaggcggtggcgcaccaatggcagacaataacgaaggcgccgacggagtgggtagttcctcgggaaattggcattgcgattccacatggctgggcgacagagtcatcaccaccagcacccgaacctgggccctgcccacctacaacaaccacctctacaagcaaatctccaacgggacatcgggaggagccaccaacgacaacacctacttcggctacagcaccccctgggggtattttgactttaacagattccactgccgcttttcaccacgtgactggcagcgactcatcaacaacaactggggattccggcccaagagactcagcttcaagctcttcaacatccaggtcaaggaggtcacgcagaatgaaggcaccaagaccatcgccaataacctcaccagcaccatccaggtgtttacggactcggagtaccagctgccgtacgttctcggctctgcccaccagggctgcctgcctccgttcccggcggacgtgttcacgattccccagtacggctacctaacactcaacaacggtagtcaggccgtgggacgctcctccttctactgcctggaatactttccttcgcagatgctgagaaccggcaacaacttccagtttacttacaccttcgaggacgtgcctttccacagcagctacgcccacagccagagcttggaccggctgatgaatcctctgattgaccagtacctgtactacttgtctcggattcaaacaacaggaggcacggcaaatacgcagactctgggcttcagccaaggtgggcctaatacaatggccaatcaggcaaagaactggctgccaggaccctgttaccgccaacaacgcgtctcaacgacaaccgggcaaaacaacaatagcaactttgcctggactgctgggaccaaataccatctgaatggaagaaattcattggctaatcctggcatcgctatggcaacacacaaagacgacgaggagcgtttttttcccagtaacgggatcctgatttttggcaaacaaaatgctgccagagacaatgcggattacagcgatgtcatgcccaccagcgaggaagaaatcaaaaccactaaccctgtggccacagaggaatacggtatcgtggcagataacttgcagcagcaaaacacggctcctcaaattggaactgtcaacagccagggggccttacccggtatggtctggcagaaccgggacgtgtacctgcagggtcccatctgggccaagattcctcacacggacggcaacttccacccgtctccgctgatgggcggctttggcctgaaacatcctccgcctcagatcctgatcaagaacacgcctgtacctgcggatcctccgaccaccttcaaccagtcaaagctgaactctttcatcacgcaatacagcaccggacaggtcagcgtggaaattgaatgggagctgcagaaggaaaacagcaagcgctggaaccccgagatccagtacacctccaactactacaaatctacaagtgtggactttgctgttaatacagaaggcgtgtactctgaaccccgccccattggcacccgttacctcacccgtaatctgtaa

SEQ ID NO: 3788 - DNA, 2217 bp, Artificial Sequence
  Description of Artificial Sequence: Synthetic polynucleotide
atggctgccgatggttatcttccagattggctcgaggacaacctctctgagggcattcgcgagtggtgggcgctgaaacctggagccccgaagcccaaagccaaccagcaaaagcaggacgacggccggggtctggtgcttcctggctacaagtacctcggacccttcaacggactcgacaagggggagcccgtcaacgcggcggacgcggcggccctcgagcacgacaaggcctacgaccagcagctgcaggcgggtgacaatccgtacctgcggtataaccacgccgacgccgagtttcaggagcgtctgcaagaagatacgtcttttgggggcaacctcgggcgagcagtcttccaggccaagaagcgggttctcgaacctctcggtctggttgaggaaggcgctaagacggctcctggaaagaagagaccggtagagccatcaccccagcgttctccagactcctctacgggcatcggcaagaagggccaacagcccgccagaaaaagactcaattttggtcagactggcgactcagagtcagttccagaccctcaacctctcggagaacctccagcagcgccctctggtgtgggacctaatacaatggctgcaggcggtggcgcaccaatggcagacaataacgaaggcgccgacggagtgggtagttcctcgggaaattggcattgcgattccacatggctgggcgacagagtcatcaccaccagcacccgaacctgggccctgcccacctacaacaaccacctctacaagcaaatctccaacgggacatcgggaggagccaccaacgacaacacctacttcggctacagcaccccctgggggtattttgactttaacagattccactgccacttttcaccacgtgactggcagcgactcatcaacaacaactggggattccggcccaagagactcagcttcaagctcttcaacatccaggtcaaggaggtcacgcagaatgaaggcaccaagaccatcgccaataacctcaccagcaccatccaggtgtttacggactcggagtaccagctgccgtacgttctcggctctgcccaccagggctgcctgcctccgttcccggcggacgtgttcacgattccccagtacggctacctaacactcaacaacggtagtcaggccgtgggacgctcctccttctactgcctggaatactttccttcgcagatgctgagaaccggcaacaacttccagtttacttacaccttcgaggacgtgcctttccacagcagctacgcccacagccagagcttggaccggctgatgaatcctctgattgaccagtacctgtactacttgtctcggattcaaacaacaggaggcacggcaaatacgcagactctgggcttcagccaaggtgggcctaatacaatggccaatcaggcaaagaactggctgccaggaccctgttaccgccaacaacgcgtctcaacgacaaccgggcaaaacaacaatagcaactttgcctggactgctgggaccaaataccatctgaatggaagaaattcattggctaatcctggcatcgctatggcaacacacaaagacgacgaggagcgtttttttcccagtaacgggatcctgatttttggcaaacaaaatgctgccagagacaatgcggattacagcgatgtcatgcccaccagcgaggaagaaatcaaaaccactaaccctgtggccacagaggaatacggtatcgtggcagataacttgcagcagcaaaacgcggctcctcaaattggaactgtcaacagccagggggccttacccggtatggtctggcagaaccgggacgtgtacctgcagggtcccatctgggccaagattcctcacacggacggcaacttccacccgtctccgctgatgggcggctttggcctgaaacatcctccgcctcagatcctgatcaagaacacgcctgtacctgcggatcctccgaccaccttcaaccagtcaaagctgaactctttcatcacgcaatacagcaccggacaggtcagcgtggaaattgaatgggagctgcagaaggaaaacagcaagcgctggaaccccgagatccagtacacctccaactactacaaatctacaagtgtggactttgctgttaatacagaaggcgtgtactctgaaccccgccccattggcacccgttacctcacccgtaatctgtaa

SEQ ID NO: 3789 - DNA, 2217 bp, Artificial Sequence
  Description of Artificial Sequence: Synthetic polynucleotide
atggctgccgatggttatcttccagattggctcgaggacaacctctctgagggcattcgcgagtggtgggcgctgaaacctggagccccgaagcccaaagccaaccagcaaaagcaggacgacggccggggtctggtgcttcctggctacaagtacctcggacccttcaacggactcgacaagggggagcccgtcaacgcggcggacgcggcggccctcgagcacgacaaggcctacgaccagcagctgcaggcgggtgacaatccgtacctgcggtataaccacgccgacgccgagtttcaggagcgtctgcaagaagatacgtcttttgggggcaacctcgggcgagcagtcttccaggccaagaagcgggttctcgaacctctcggtctggttgaggaaggcgctaagacggctcctggaaagaagagaccggtagagccatcaccccagcgttctccagactcctctacgggcatcggcaagaagggccaacagcccgccagaaaaagactcaattttggtcagactggcgactcagagtcagttccagaccctcaacctctcggagaacctccagcagcgccctctggtgtgggacctaatacaatggctgcaggcggtggcgcaccaatggcagacaataacgaaggcgccgacggagtgggtagttcctcgggaaattggcattgcgattccacatggctgggcgacagagtcatcaccaccagcacccgaacctgggccctgcccacctacaacaaccacctctacaagcaaatctccaacgggacatcgggaggagccaccaacgacaacacctacttcggctacagcaccccctgggggtattttgactttaacagattccactgccacttttcaccacgtgactggcagcgactcatcaacaacaactggggattccggcccaagagactcagcttcaagctcttcaacatccaggtcaaggaggtcacgcagaatgaaggcaccaagaccatcgccaatagcctcaccagcaccatccaggtgtttacggactcggagtaccagctgccgtacgttctcggctctgcccaccagggctgcctgcctccgttcccggcggacgtgttcacgattccccagtacggctacctaacactcaacaacggtagtcaggccgtgggacgctcctccttctactgcctggaatactttccttcgcagatgctgagaaccggcaacaacttccagtttacttacaccttcgaggacgtgcctttccacagcagctacgcccacagccagagcttggaccggctgatgaatcctctgattgaccagtacctgtactacttgtctcggattcaaacaacaggaggcacggcaaatacgcagactctgggcttcagccaaggtgggcctaatacaatggccaatcaggcaaagaactggctgccaggaccctgttaccgccaacaacgcgtctcaacgacaaccgggcaaaacaacaatagcaactttgcctggactgctgggaccaaataccatctgaatggaagaaattcattggctaatcctggcatcgctatggcaacacacaaagacgacgaggagcgtttttttcccagtaacgggatcctgatttttggcaaacaaaatgctgccagagacaatgcggattacagcgatgtcatgcccaccagcgaggaagaaatcaaaaccactaaccctgtggccacagaggaatacggtatcgtggcagataacttgcagcagcaaaacacggctcctcaaattggaactgtcaacagccagggggccttacccggtatggtctggcagaaccgggacgtgtacctgcagggtcccatctgggccaagattcctcacacggacggcaacttccacccgtctccgctgatgggcggctttggcctgaaacatcctccgcctcagatcctgatcaagaacacgcctgtacctgcggatcctccgaccaccttcaaccagtcaaagctgaactctttcatcacgcaatacagcaccggacaggtcagcgtggaaattgaatgggagctgcagaaggaaaacagcaagcgctggaaccccgagatccagtacacctccaactactacaaatctgcaagtgtggactttgctgttaatacagaaggcgtgtactctgaaccccgccccattggcacccgttacctcacccgtaatctgtaa

SEQ ID NO: 3790 - DNA, 2217 bp, Artificial Sequence
  Description of Artificial Sequence: Synthetic polynucleotide
atggctgccgatggttatcttccagattggctcgaggacaacctctctgagggcattcgcgagtggtgggcgctgaaacctggagccccgaagcccaaagccaaccagcaaaagcaggacgacggccggggtctggtgcttcctggctacaagtacctcggacccttcaacggactcgacaagggggagcccgtcaacgcggcggacgcggcggccctcgagcacgacaaggcctacgaccagcagctgcaggcgggtgacaatccgtacctgcggtataaccacgccgacgccgagtttcaggagcgtctgcaagaagatacgtcttttgggggcaacctcgggcgagcagtcttccaggccaagaagcgggttctcgaacctctcggtctggttgaggaaggcgctaagacggctcctggaaagaagagaccggtagagccatcaccccagcgttctccagactcctctacgggcatcggcaagaagggccaacagcccgccagaaaaagactcaattttggtcagactggcgactcagagtcagttccagaccctcaacctctcggagaacctccagcagcgccctctggtgtgggacctaatacaatggctgcaggcggtggcgcaccaatggcagacaataacgaaggcgccgacggagtgggtagttcctcgggaaattggcattgcgattccacatggctgggcgacagagtcatcaccaccagcacccgaacctgggccctgcccacctacaacaaccacctctacaagcaaatctccaacgggacatcgggaggagccaccaacgacaacacctacttcggctacagcaccccctgggggtattttgactttaacagattccactgccacttttcaccacgtgactggcagcgactcatcaacaacaactggggattccggcccaagagactcagcttcaagctcttcaacatccaggtcaaggaggtcacgcagaatgaaggcaccaagaccatcgccaataacctcaccagcaccatccaggtgtttacggactcggagtaccagctgccgtacgttctcggctctgcccaccagggctgcctgcctccgttcccggcggacgtgttcacgattccccagtacggctacctaacactcaacaacggtagtcaggccgtgggacgctcctccttctactgcctggaatactttccttcgcagatgctgagaaccggcaacaacttccagtttacttacaccttcgaggacgtgcctttccacagcagctacgcccacagccagagcttggaccggctgatgaatcctctgattgaccagtacctgtactacttgtctcggattcaaacaacaggaggcacggcaaatacgcagactctgggcttcagccaaggtgggcctaatacaatggccaatcaggcaaagaactggctgccaggaccctgttaccgccaacaacgcgtctcaacgacaaccgggcaaaacaacaatagcaactttgcctggactgctgggaccaaataccatctgaatggaggaaattcattggctaatcctggcatcgctatggcaacacacaaagacgacgaggagcgtttttttcccagtaacgggatcctgatttttggcaaacaaaatgctgccagagacaatgcggattacagcgatgtcatgcccaccagcgaggaagaaatcaaaaccactaaccctgtggccacagaggaatacggtatcgtggcagataacttgcagcagcaaaacacggctcctcaaattggaactgtcaacagccagggggccttacccggtatggtctggcagaaccgggacgtgtacctgcagggtcccatctgggccaagattcctcacacggacggcaacttccacccgtctccgctgatgggcggctttggcctgaaacatcctccgcctcagatcctgatcaagaacacgcctgtacctgcggatcctccgaccaccttcaaccagtcaaagctgaactctttcatcacgcaatacagcaccggacaggtcagcgtggaaattgaatgggagctgcagaaggaaaacagcaagcgctggaaccccgagatccagtacacctccaactactacaaatctacaagtgtggactttgctgttaatacagaaggcgtgtactctgaaccccgccccattggcacccgttacctcacccgtaatctgtaa

SEQ ID NO: 3791 - DNA, 2217 bp, Artificial Sequence
  Description of Artificial Sequence: Synthetic polynucleotide
atggctgccgatggttatcttccagattggctcgaggacaacctctctgagggcattcgcgagtggtgggcgctgaaacctggagccccgaagcccaaagccaaccagcaaaagcaggacgacggccggggtctggtgcttcctggctacaagtacctcggacccttcaacggactcgacaagggggagcccgtcaacgcggcggacgcggcggccctcgagcacgacaaggcctacgaccagcagctgcaggcgggtgacaatccgtacctgcggtataaccacgccgacgccgagtttcaggagcgtctgcaagaagatacgtcttttgggggcaacctcgggcgagcagtcttccaggccaagaagcgggttctcgaacctctcggtctggttgaggaaggcgctaagacggctcctggaaagaagagaccggtagagccatcaccccagcgttctccagactcctctacgggcatcggcaagaagggccaacagcccgccagaaaaagactcaattttggtcagactggcgactcagagtcagttccagaccctcaacctctcggagaacctccagcagcgccctctggtgtgggacctaatacaatggctgcaggcggtggcgcaccaatggcagacaataacgaaggcgccgacggagtgggtagttcctcgggaaattggcattgcgattccacatggctgggcgacagagtcatcaccaccagcacccgaacctgggccctgcccacctacaacaaccacctctacaagcaaatctccaacgggacatcgggaggagccaccaacgacaacacctacttcggctacagcaccccctgggggtattttgactttaacagattccactgccacttttcaccacgtgactggcagcgactcatcaacaacaactggggattccggcccaagagactcagcttcaagctcttcaacatccaggtcaaggaggtcacgcagaatgaaggcaccaagaccatcgccaataacctcaccagcaccatccaggtgtttacggactcggagtaccagctgccgtacgttctcggctctgcccaccagggctgcctgcctccgttcccggcggacgtgttcacgattccccagtacggctacctaacactcaacaacggtagtcaggccgtgggacgctcctccttctactgcctggaatactttccttcgcagatgctgagaaccggcaacaacttccagtttacttacaccttcgaggacgtgcctttccacagcagctacgcccacagccagagcttggaccggctgatgaatcctctgattgaccagtacctgtactacttgtctcggattcaaacaacaggaggcacggcaaatacgcagactctgggcttcagccaaggtgggcctaatacaatggccaatcaggcaaagaactggctgccaggaccctgttaccgccaacaacgcgtctcaacgacaaccgggcaaaacaacaatagcaactttgcctggactgctgggaccaaataccatctgaatggaagaaattcattggctaatcctggcatcgctatggcaacacacaaagacgacgaggagcgtttttttcccagtaacgggatcctgatttttggcaaacaaaatgctgccagagacaatgcggattacagcgatgtcatgcccaccagcgaggaagaaatcaaaaccactaaccctgtggccacagaggaatacggtatcgtggcagataacttgcagcagcaaaacacggctcctcaaattggaactgtcaacagccagggggccttacccggtatggtctggcagaaccgggacgtgtacctgcagggtcccatctgggccaagattcctcacacggacggcaacttccacccgtctccgctgatgggcggctttggcctgaaacatcctccgcctcagatcctgatcaagaacacgcctgtacctgcggatcctccgaccaccttcaaccagtcaaggctgaactctttcatcacgcaatacagcaccggacaggtcagcgtggaaattgaatgggagctgcagaaggaaaacagcaagcgctggaaccccgagatccagtacacctccaactactacaaatctacaagtgtggactttgctgttaatacagaaggcgtgtactctgaaccccgccccattggcacccgttacctcacccgtaatctgtaa

SEQ ID NO: 3792 - DNA, 2217 bp, Artificial Sequence
  Description of Artificial Sequence: Synthetic polynucleotide
atggctgccgatggttatcttccagattggctcgaggacaacctctctgagggcattcgcgagtggtgggcgctgaaacctggagccccgaagcccaaagccaaccagcaaaagcaggacgacggccggggtctggtgcttcctggctacaagtacctcggacccttcaacggactcgacaagggggagcccgtcaacgcggcggacgcggcggccctcgagcacgacaaggcctacgaccagcagctgcaggcgggtgacaatccgtacctgcggtataaccacgccgacgccgagtttcaggagcgtctgcaagaagatacgtcttttgggggcaacctcgggcgagcagtcttccaggccaagaagcgggttctcgaacctctcggtctggttgaggaaggcgctaagacggctcctggaaagaagagaccggtagagccatcaccccagcgttctccagactcctctacgggcatcggcaagaagggccaacagcccgccagaaaaagactcaattttggtcagactggcgactcagagtcagttccagaccctcaacctctcggagaacctccagcagcgccctctggtgtgggacctaatacaatggctgcaggcggtggcgcaccaatggcagacaataacgaaggcgccgacggagtgggtagttcctcgggaaattggcattgcgattccacatggctgggcgacagagtcatcaccaccagcacccgaacctgggccctgcccacctacaacaaccacctctacaagcaaatctccaacgggacatcgggaggagccgccaacgacaacacctacttcggctacagcaccccctgggggtattttgactttaacagattccactgccacttttcaccacgtgactggcagcgactcatcaacaacaactggggattccggcccaagagactcagcttcaagctcttcaacatccaggtcaaggaggtcacgcagaatgaaggcaccaagaccatcgccaataacctcaccagcaccatccaggtgtttacggactcggagtaccagctgccgtacgttctcggctctgcccaccagggctgcctgcctccgttcccggcggacgtgttcacgattccccagtacggctacctaacactcaacaacggtagtcaggccgtgggacgctcctccttctactgcctggaatactttccttcgcagatgctgagaaccggcaacaacttccagtttacttacaccttcgaggacgtgcctttccacagcagctacgcccacagccagagcttggaccggctgatgaatcctctgattgaccagtacctgtactacttgtctcggattcaaacaacaggaggcacggcaaatacgcagactctgggcttcagccaaggtgggcctaatacaatggccaatcaggcaaagaactggctgccaggaccctgttaccgccaacaacgcgtctcaacgacaaccgggcaaaacaacaatagcaactttgcctggactgctgggaccaaataccatctgaatggaagaaattcattggctaatcctggcatcgctatggcaacacacaaagacgacgaggagcgtttttttcccagtaacgggatcctgatttttggcaaacaaaatgctgccagagacaatgcggattacagcgatgtcatgcccaccagcgaggaagaaatcaaaaccactaaccctgtggccacagaggaatacggtatcgtggcagataacttgcagcagcaaaacacggctcctcaaattggaactgtcaacagccagggggccttacccggtatggtctggcagaaccgggacgtgtacctgcagggtcccatctgggccaagattcctcacacggacggcaacttccacccgtctccgctgatgggcggctttggcctgaaacatcctccgcctcagatcctgatcaagaacacgcctgtacctgcggatcctccgaccaccttcaaccagtcaaagctgaactctttcatcacgcaatacagcaccggacaggtcagcgtggaaattgaatgggagctgcagaaggaaaacagcaagcgctggaaccccgagatccagtacacctccaactactacaaatctacaagtgtggactttgctgttaatacagaaggcgtgtactctgaaccccgccccattggcacccgttacctcacccgtaatctgtaa

SEQ ID NO: 3793 - DNA, 2217 bp, Artificial Sequence
  Description of Artificial Sequence: Synthetic polynucleotide
atggctgccgatggttatcttccagattggctcgaggacaacctctctgagggcattcgcgagtggtgggcgctgaaacctggagccccgaagcccaaagccaaccagcaaaagcaggacgacggccggggtctggtgcttcctggctacaagtacctcggacccttcaacggactcgacaagggggagcccgtcaacgcggcggacgcggcggccctcgagcacgacaaggcctacgaccagcagctgcaggcgggtgacaatccgtacctgcggtataaccacgccgacgccgagtttcaggagcgtctgcaagaagatacgtcttttgggggcaacctcgggcgagcagtcttccaggccaagaagcgggttctcgaacctctcggtctggttgaggaaggcgctaagacggctcctggaaagaagagaccggtagagccatcaccccagcgttctccagactcctctacgggcatcggcaagaagggccaacagcccgccagaaaaagactcaattttggtcagactggcgactcagagtcagttccagaccctcaacctctcggagaacctccagcagcgccctctggtgtgggacctaatacaatggctgcaggcggtggcgcaccaatggcaggcaataacgaaggcgccgacggagtgggtagttcctcgggaaattggcattgcgattccacatggctgggcgacagagtcatcaccaccagcacccgaacctgggccctgcccacctacaacaaccacctctacaagcaaatctccaacgggacatcgggaggagccaccaacgacaacacctacttcggctacagcaccccctgggggtattttgactttaacagattccactgccacttttcaccacgtgactggcagcgactcatcaacaacaactggggattccggcccaagagactcagcttcaagctcttcaacatccaggtcaaggaggtcacgcagaatgaaggcaccaagaccatcgccaataacctcaccagcaccatccaggtgtttacggactcggagtaccagctgccgtacgttctcggctctgcccaccagggctgcctgcctccgttcccggcggacgtgttcacgattccccagtacggctacctaacactcaacaacggtagtcaggccgtgggacgctcctccttctactgcctggaatactttccttcgcagatgctgagaaccggcaacaacttccagtttacttacaccttcgaggacgtgcctttccacagcagctacgcccacagccagagcttggaccggctgatgaatcctctgattgaccagtacctgtactacttgtctcggattcaaacaacaggaggcacggcaaatacgcagactctgggcttcagccaaggtgggcctaatacaatggccaatcaggcaaagaactggctgccaggaccctgttaccgccaacaacgcgtctcaacgacaaccgggcaaaacaacaatagcaactttgcctggactgctgggaccaaataccatctgaatggaagaaattcattggctaatcctggcatcgctatggcaacacacaaagacgacgaggagcgtttttttcccagtaacgggatcctgatttttggcaaacaaaatgctgccagagacaatgcggattacagcgatgtcatgcccaccagcgaggaagaaatcaaaaccactaaccctgtggccacagaggaatacggtatcgtggcagataacttgcagcagcaaaacacggctcctcaaattggaactgtcaacagccagggggccttacccggtatggtctggcagaaccgggacgtgtacctgcagggtcccatctgggccaagattcctcacacggacggcaacttccacccgtctccgctgatgggcggctttggcctgaaacatcctccgcctcagatcctgatcaagaacacgcctgtacctgcggatcctccgaccaccttcaaccagtcaaagctgaactctttcatcacgcaatacagcaccggacaggtcagcgtggaaattgaatgggagctgcagaaggaaaacagcaagcgctggaaccccgagatccagtacacctccaactactacaaatctacaagtgtggactttgctgttaatacagaaggcgtgtactctgaaccccgccccattggcacccgttacctcacccgtaatctgtaa

SEQ ID NO: 3794 - DNA, 2217 bp, Artificial Sequence
  Description of Artificial Sequence: Synthetic polynucleotide
atggctgccgatggttatcttccagattggctcgaggacaacctctctgagggcattcgcgagtggtgggcgctgaaacctggagccccgaagcccaaagccaaccagcaaaagcaggacgacggccggggtctggtgcttcctggctacaagtacctcggacccttcaacggactcgacaagggggagcccgtcaacgcggcggacgcggcggccctcgagcacgacaaggcctacgaccagcagctgcaggcgggtgacaatccgtacctgcggtataaccacgccgacgccgagtttcaggagcgtctgcaagaagatacgtcttttgggggcaacctcgggcgagcagtcttccaggccaagaagcgggttctcgaacctctcggtctggttgaggaaggcgctaagacggctcctggaaagaagagaccggtagagccatcaccccagcgttctccagactcctctacgggcatcggcaggaagggccaacagcccgccagaaaaagactcaattttggtcagactggcgactcagagtcagttccagaccctcaacctctcggagaacctccagcagcgccctctggtgtgggacctaatacaatggctgcaggcggtggcgcaccaatggcagacaataacgaaggcgccgacggagtgggtagttcctcgggaaattggcattgcgattccacatggctgggcgacagagtcatcaccaccagcacccgaacctgggccctgcccacctacaacaaccacctctacaagcaaatctccaacgggacatcgggaggagccaccaacgacaacacctacttcggctacagcaccccctgggggtattttgactttaacagattccactgccacttttcaccacgtgactggcagcgactcatcaacaacaactggggattccggcccaagagactcagcttcaagctcttcaacatccaggtcaaggaggtcacgcagaatgaaggcaccaagaccatcgccaataacctcaccagcaccatccaggtgtttacggactcggagtaccagctgccgtacgttctcggctctgcccaccagggctgcctgcctccgttcccggcggacgtgttcacgattccccagtacggctacctaacactcaacaacggtagtcaggccgtgggacgctcctccttctactgcctggaatactttccttcgcagatgctgagaaccggcaacaacttccagtttacttacaccttcgaggacgtgcctttccacagcagctacgcccacagccagagcttggaccggctgatgaatcctctgattgaccagtacctgtactacttgtctcggattcaaacaacaggaggcacggcaaatacgcagactctgggcttcagccaaggtgggcctaatacaatggccaatcaggcaaagaactggctgccaggaccctgttaccgccaacaacgcgtctcaacgacaaccgggcaaaacaacaatagcaactttgcctggactgctgggaccaaataccatctgaatggaagaaattcattggctaatcctggcatcgctatggcaacacacaaagacgacgaggagcgtttttttcccagtaacgggatcctgatttttggcaaacaaaatgctgccagagacaatgcggattacagcgatgtcatgcccaccagcgaggaagaaatcaaaaccactaaccctgtggccacagaggaatacggtatcgtggcagataacttgcagcagcaaaacacggctcctcaaattggaactgtcaacagccagggggccttacccggtatggtctggcagaaccgggacgtgtacctgcagggtcccatctgggccaagattcctcacacggacggcaacttccacccgtctccgctgatgggcggctttggcctgaaacatcctccgcctcagatcctgatcaagaacacgcctgtacctgcggatcctccgaccaccttcaaccagtcaaagctgaactctttcatcacgcaatacagcaccggacaggtcagcgtggaaattgaatgggagctgcagaaggaaaacagcaagcgctggaaccccgagatccagtacacctccaactactacaaatctacaagtgtggactttgctgttaatacagaaggcgtgtactctgaaccccgccccattggcacccgttacctcacccgtaatctgtaa

SEQ ID NO: 3795 - DNA, 2217 bp, Artificial Sequence
  Description of Artificial Sequence: Synthetic polynucleotide
atggctgccgatggttatcttccagattggctcgaggacaacctctctgagggcattcgcgagtggtgggcgctgaaacctggagccccgaagcccaaagccaaccagcaaaagcaggacgacggccggggtctggtgcttcctggctacaagtacctcggacccttcaacggactcgacaagggggagcccgtcaacgcggcggacgcggcggccctcgagcacgacaaggcctacgaccagcagctgcaggcgggtgacaatccgtacctgcggtataaccacgccgacgccgagtttcaggagcgtctgcaagaagatacgtcttttgggggcaacctcgggcgagcagtcttccaggccaagaagcgggttctcgaacctctcggtctggttgaggaaggcgctaagacggctcctggaaagaagagaccggtagagccatcaccccagcgttctccagactcctctacgggcatcggcaagaagggccaacagcccgccagaaaaagactcaattttggtcagactggcgactcagagtcagttccagaccctcaacctctcggagaacctccagcagcgccctctggtgtgggacctaatacaatggctgcaggcggtggcgcaccaatggcagacaataacgaaggcgccgacggagtgggtagttcctcgggaaattggcattgcgattccacatggctgggcgacagagtcatcaccaccagcacccgaacctgggccctgcccacctacaacaaccacctctacaagcaaatctccaacgggacatcgggaggagccaccaacgacaacacctacttcggctacggcaccccctgggggtattttgactttaacagattccactgccacttttcaccacgtgactggcagcgactcatcaacaacaactggggattccggcccaagagactcagcttcaagctcttcaacatccaggtcaaggaggtcacgcagaatgaaggcaccaagaccatcgccaataacctcaccagcaccatccaggtgtttacggactcggagtaccagctgccgtacgttctcggctctgcccaccagggctgcctgcctccgttcccggcggacgtgttcacgattccccagtacggctacctaacactcaacaacggtagtcaggccgtgggacgctcctccttctactgcctggaatactttccttcgcagatgctgagaaccggcaacaacttccagtttacttacaccttcgaggacgtgcctttccacagcagctacgcccacagccagagcttggaccggctgatgaatcctctgattgaccagtacctgtactacttgtctcggattcaaacaacaggaggcacggcaaatacgcagactctgggcttcagccaaggtgggcctaatacaatggccaatcaggcaaagaactggctgccaggaccctgttaccgccaacaacgcgtctcaacgacaaccgggcaaaacaacaatagcaactttgcctggactgctgggaccaaataccatctgaatggaagaaattcattggctaatcctggcatcgctatggcaacacacaaagacgacgaggagcgtttttttcccagtaacgggatcctgatttttggcaaacaaaatgctgccagagacaatgcggattacagcgatgtcatgcccaccagcgaggaagaaatcaaaaccactaaccctgtggccacagaggaatacggtatcgtggcagataacttgcagcagcaaaacacggctcctcaaattggaactgtcaacagccagggggccttacccggtatggtctggcagaaccgggacgtgtacctgcagggtcccatctgggccaagattcctcacacggacggcaacttccacccgtctccgctgatgggcggctttggcctgaaacatcctccgcctcagatcctgatcaagaacacgcctgtacctgcggatcctccgaccaccttcaaccagtcaaagctgaactctttcatcacgcaatacagcaccggacaggtcagcgtggaaattgaatgggagctgcagaaggaaaacagcaagcgctggaaccccgagatccagtacacctccaactactacaaatctacaagtgtggactttgctgttaatacagaaggcgtgtactctgaaccccgccccattggcacccgttacctcacccgtaatctgtaa

SEQ ID NO: 3796 - DNA, 2217 bp, Artificial Sequence
  Description of Artificial Sequence: Synthetic polynucleotide
atggctgccgatggttatcttccagattggctcgaggacaacctctctgagggcattcgcgagtggtgggcgctgaaacctggagccccgaagcccaaagccaaccagcaaaagcaggacgacggccggggtctggtgcttcctggctacaagtacctcggacccttcaacggactcgacaagggggagcccgtcaacgcggcggacgcggcggccctcgagcacgacaaggcctacgaccagcagctgcaggcgggtgacaatccgtacctgcggtataaccacgccgacgccgagtttcaggagcgtctgcaagaagatacgtcttttgggggcaacctcgggcgagcagtcttccaggccaagaagcgggttctcgaacctctcggtctggttgaggaaggcgctaagacggctcctggaaagaagagaccggtagagccatcaccccagcgttctccagactcctctacgggcatcggcaagaagggccaacagcccgccagaaaaagactcaattttggtcagactggcgactcagagtcagttccagaccctcaacctctcggagaacctccagcagcgccctctggtgtgggacctaatacaatggctgcaggcggtggcgcaccaatggcagacaataacgaaggcgccgacggagtgggtagttcctcgggaaattggcattgcgattccacatggctgggcgacagagtcatcaccaccagcacccgaacctgggccctgcccacctacaacaaccacctctacaagcaaatctccaacgggacatcgggaggagccaccaacgacaacacctacttcggctacagcaccccctgggggtattttgactttaacagattccactgccacttttcaccacgtgactggcagcgactcatcaacaacaactggggattccggcccaagagactcagcttcaagctcttcaacatccaggtcaaggaggtcacgcagaatgaaggcaccaagaccatcgccaataacctcaccagcaccatccaggtgtttacggactcggagtaccagctgccgtacgttctcggctctgcccaccagggctgcctgcctccgttcccggcggacgtgttcacgattccccagtacggctacctaacactcaacaacggtagtcaggccgtgggacgctcctccttctactgcctggaatactttccttcgcagatgctgagaaccggcaacaacttccagtttacttacaccttcgaggacgtgcctttccacagcagctacgcccacagccagagcttggaccggccgatgaatcctctgattgaccagtacctgtactacttgtctcggattcaaacaacaggaggcacggcaaatacgcagactctgggcttcagccaaggtgggcctaatacaatggccaatcaggcaaagaactggctgccaggaccctgttaccgccaacaacgcgtctcaacgacaaccgggcaaaacaacaatagcaactttgcctggactgctgggaccaaataccatctgaatggaagaaattcattggctaatcctggcatcgctatggcaacacacaaagacgacgaggagcgtttttttcccagtaacgggatcctgatttttggcaaacaaaatgctgccagagacaatgcggattacagcgatgtcatgcccaccagcgaggaagaaatcaaaaccactaaccctgtggccacagaggaatacggtatcgtggcagataacttgcagcagcaaaacacggctcctcaaattggaactgtcaacagccagggggccttacccggtatggtctggcagaaccgggacgtgtacctgcagggtcccatctgggccaagattcctcacacggacggcaacttccacccgtctccgctgatgggcggctttggcctgaaacatcctccgcctcagatcctgatcaagaacacgcctgtacctgcggatcctccgaccaccttcaaccagtcaaagctgaactctttcatcacgcaatacagcaccggacaggtcagcgtggaaattgaatgggagctgcagaaggaaaacagcaagcgctggaaccccgagatccagtacacctccaactactacaaatctacaagtgtggactttgctgttaatacagaaggcgtgtactctgaaccccgccccattggcacccgttacctcacccgtaatctgtaa

SEQ ID NO: 3797 - DNA, 2217 bp, Artificial Sequence
  Description of Artificial Sequence: Synthetic polynucleotide
atggctgccgatggttatcttccagattggctcgaggacaacctctctgagggcattcgcgagtggtgggcgctgaaacctggagccccgaagcccaaagccaaccagcaaaagcaggacgacggccggggtctggtgcttcctggctacaagtacctcggacccttcaacggactcgacaagggggagcccgtcaacgcggcggacgcggcggccctcgagcacgacaaggcctacgaccagcagctgcaggcgggtgacaatccgtacctgcggtataaccacgccgacgccgagtttcaggagcgtctgcaagaagatacgtcttttgggggcaacctcgggcgagcagtcttccaggccaagaagcgggttctcgaacctctcggtctggttgaggaaggcgctaagacggctcctggaaagaagagaccggtagagccatcaccccagcgttctccagactcctctacgggcatcggcaagaagggccaacagcccgccagaaaaagactcaattttggtcagactggcgactcagagtcagttccagaccctcaacctctcggagaacctccagcagcgccctctggtgtgggacctaatacaatggctgcaggcggtggcgcaccaatggcagacaataacgaaggcgccgacggagtgggtagttcctcgggaaattggcattgcgattccacatggctgggcgacagagtcatcaccaccagcacccgaacctgggccctgcccacctacaacaaccacctctacaagcaaatctccaacgggacatcgggaggagccaccaacgacaacacctacttcggctacagcaccccctgggggtattttgactttaacagattccactgccacttttcaccacgtgactggcagcgactcatcaacaacaactggggattccggcccaagagactcagcctcaagctcttcaacatccaggtcaaggaggtcacgcagaatgaaggcaccaagaccatcgccaataacctcaccagcaccatccaggtgtttacggactcggagtaccagctgccgtacgttctcggctctgcccaccagggctgcctgcctccgttcccggcggacgtgttcacgattccccagtacggctacctaacactcaacaacggtagtcaggccgtgggacgctcctccttctactgcctggaatactttccttcgcagatgctgagaaccggcaacaacttccagtttacttacaccttcgaggacgtgcctttccacagcagctacgcccacagccagagcttggaccggctgatgaatcctctgattgaccagtacctgtactacttgtctcggattcaaacaacaggaggcacggcaaatacgcagactctgggcttcagccaaggtgggcctaatacaatggccaatcaggcaaagaactggctgccaggaccctgttaccgccaacaacgcgtctcaacgacaaccgggcaaaacaacaatagcaactttgcctggactgctgggaccaaataccatctgaatggaagaaattcattggctaatcctggcatcgctatggcaacacacaaagacgacgaggagcgtttttttcccagtaacgggatcctgatttttggcaaacaaaatgctgccagagacaatgcggattacagcgatgtcatgcccaccagcgaggaagaaatcaaaaccactaaccctgtggccacagaggaatacggtatcgtggcagataacttgcagcagcaaaacacggctcctcaaattggaactgtcaacagccagggggccttacccggtatggtctggcagaaccgggacgtgtacctgcagggtcccatctgggccaagattcctcacacggacggcaacttccacccgtctccgctgatgggcggctttggcctgaaacatcctccgcctcagatcctgatcaagaacacgcctgtacctgcggatcctccgaccaccttcaaccagtcaaagctgaactctttcatcacgcaatacagcaccggacaggtcagcgtggaaattgaatgggagctgcagaaggaaaacagcaagcgctggaaccccgagatccagtacacctccaactactacaaatctacaagtgtggactttgctgttaatacagaaggcgtgtactctgaaccccgccccattggcacccgttacctcacccgtaatctgtaa

SEQ ID NO: 3798 - DNA, 2217 bp, Artificial Sequence
  Description of Artificial Sequence: Synthetic polynucleotide
atggctgccgatggttatcttccagattggctcgaggacaacctctctgagggcattcgcgagtggtgggcgctgaaacctggagccccgaagcccaaagccaaccagcaaaagcaggacgacggccggggtctggtgcttcctggctacaagtacctcggacccttcaacggactcgacaagggggagcccgtcaacgcggcggacgcggcggccctcgagcacgacaaggcctacgaccagcagctgcaggcgggtgacaatccgtacctgcggtataaccacgccgacgccgagtttcaggagcgtctgcaagaagatacgtcttttgggggcaacctcgggcgagcagtcttccaggccaagaagcgggttctcgaacctctcggtctggttgaggaaggcgctaagacggctcctggaaagaagagaccggtagagccatcaccccagcgttctccagactcctctacgggcatcggcaagaagggccaacagcccgccagaaaaagactcaattttggtcagactggcgactcagagtcagttccagaccctcaacctctcggagaacctccagcagcgccctctggtgtgggacctaatacaatggctgcaggcggtggcgcaccaatggcagacaataacgaaggcgccgacggagtgggtagttcctcgggaaattggcattgcgattccacatggctgggcgacagagtcatcaccaccagcacccgaacctgggccctgcccacctacaacaaccacctctacaagcaaatctccaacgggacatcgggaggagccaccaacgacaacacctacttcggctacagcaccccctgggggtattttgactttaacagattccactgccacttttcaccacgtgactggcagcgactcatcaacaacaactggggattccggcccaagagactcagcttcaagctcttcaacatccaggtcaaggaggtcacgcagaatgaaggcaccaagaccatcgccaataacctcaccagcaccatccaggtgtttacggactcggagtaccagctgccgtacgttctcggctctgcccaccagggctgcctgcctccgttcccggcggacgtgttcacgattccccagtacggctacctaacactcaacaacggtagtcaggccgtgggacgctcctccttctactgcctggaatactttccttcgcagatgctgagaaccggcaacaacttccagtttacttacaccttcgaggacgtgcctttccacagcagctacgcccacagccagagcttggaccggctgatgaatcctctgattgaccagtacctgtactacttgtctcggattcaaacaacaggaggcacggcaaatacgcagactctgggcttcagccaaggtgggcctaatacaatggccaatcaggcaaagaactggctgccaggaccctgttaccgccaacaacgcgtctcaacgacaaccgggcaaaacaacaatagcaactttgcctggactgctgggaccaaataccatctgaatggaagaaattcattggctaatcctggcatcgctatggcaacacacaaagacgacgaggagcgtttttttcccagtaacgggatcctgatttttggcaaacaaaatgctgccagagacaatgcggattacagcgatgtcacgcccaccagcgaggaagaaatcaaaaccactaaccctgtggccacagaggaatacggtatcgtggcagataacttgcagcagcaaaacacggctcctcaaattggaactgtcaacagccagggggccttacccggtatggtctggcagaaccgggacgtgtacctgcagggtcccatctgggccaagattcctcacacggacggcaacttccacccgtctccgctgatgggcggctttggcctgaaacatcctccgcctcagatcctgatcaagaacacgcctgtacctgcggatcctccgaccaccttcaaccagtcaaagctgaactctttcatcacgcaatacagcaccggacaggtcagcgtggaaattgaatgggagctgcagaaggaaaacagcaagcgctggaaccccgagatccagtacacctccaactactacaaatctacaagtgtggactttgctgttaatacagaaggcgtgtactctgaaccccgccccattggcacccgttacctcacccgtaatctgtaa

SEQ ID NO: 3799 - DNA, 2217 bp, Artificial Sequence
  Description of Artificial Sequence: Synthetic polynucleotide
atggctgccgatggttatcttccagattggctcgaggacaacctctctgagggcattcgcgagtggtgggcgctgaaacctggagccccgaagcccaaagccaaccagcaaaagcaggacgacggccggggtctggtgcttcctggctacaagtacctcggacccttcaacggactcgacaagggggagcccgtcaacgcggcggacgcggcggccctcgagcacgacaaggcctacgaccagcagctgcaggcgggtgacaatccgtacctgcggtataaccacgccgacgccgagtttcaggagcgtctgcaagaagatacgtcttttgggggcaacctcgggcgagcagtcttccaggccaagaagcgggttctcgaacctctcggtctggttgaggaaggcgctaagacggctcctggaaagaagagaccggtagagccatcaccccagcgttctccagactcctctacgggcatcggcaagaagggccaacagcccgccagaaaaagactcaattttggtcagactggcgactcagagtcagttccagaccctcaacctctcggagaacctccagcagcgccctctggtgtgggacctaatacaatggctgcaggcggtggcgcaccaatggcagacaataacgaaggcgccgacggagtgggtagttcctcgggaaattggcattgcgattccacatggctgggcgacagagtcatcaccaccagcacccgaacctgggccctgcccacctacaacaaccacctctacaagcaaatctccaacgggacatcgggaggagccaccaacgacaacacctacttcggctacagcaccccctgggggtattttgactttaacagattccactgccacttttcaccacgtgactggcagcgactcatcaacaacaactggggattccggcccaagagactcagcttcaagctcttcaacatccaggtcaaggaggtcacgcagaatgaaggcaccaagaccatcgccaataacctcaccagcaccatccaggtgtttacggactcggagtaccagctgccgtacgttctcggctctgcccaccagggctgcctgcctccgttcccggcggacgtgttcacgattccccagtacggctacctaacactcaacaacggtagtcaggccgtgggacgctcctccttctactgcctggaatactttccttcgcagatgctgagaaccggcaacaacttccagtttacttacaccttcgaggacgtgcctttccacagcagctacgcccacagccagagcttggaccggctgatgaatcctctgattgaccagtacctgtactacttgtctcggattcaaacaacaggaggcacggcaaatacgcagactctgggcttcagccaaggtgggcctaatacaatggccaatcaggcaaagaactggctgccaggaccctgttaccgccaacaacgcgtctcaacgacaaccgggcaaaacaacaatagcaactttgcctggactgctgggaccaaataccatctgaatggaagaaattcattggctaatcctggcatcgctatggcaacacacaaagacgacgaggagcgtttttttcccagtaacgggatcctgatttttggcaaacaaaatgctgccagagacaatgcggattacagcgatgtcatgcccaccagcgaggaagaaatcaaaaccactaaccctgtggccacagaggaatacggtatcgtggcagataacttgcagcagcaaaacacggctcctcaaattggaactgtcaacagccagggggccttacccggtatggtccggcagaaccgggacgtgtacctgcagggtcccatctgggccaagattcctcacacggacggcaacttccacccgtctccgctgatgggcggctttggcctgaaacatcctccgcctcagatcctgatcaagaacacgcctgtacctgcggatcctccgaccaccttcaaccagtcaaagctgaactctttcatcacgcaatacagcaccggacaggtcagcgtggaaattgaatgggagctgcagaaggaaaacagcaagcgctggaaccccgagatccagtacacctccaactactacaaatctacaagtgtggactttgctgttaatacagaaggcgtgtactctgaaccccgccccattggcacccgttacctcacccgtaatctgtaa

SEQ ID NO: 3800 - DNA, 2217 bp, Artificial Sequence
  Description of Artificial Sequence: Synthetic polynucleotide
atggctgccgatggttatcttccagattggctcgaggacaacctctctgagggcattcgcgagtggtgggcgctgaaacctggagccccgaagcccaaagccaaccagcaaaagcaggacgacggccggggtctggtgcttcctggctacaagtacctcggacccttcaacggactcgacaagggggagcccgtcaacgcggcggacgcggcggccctcgagcacgacaaggcctacgaccagcagctgcaggcgggtgacaatccgtacctgcggtataaccacgccgacgccgagtttcaggagcgtctgcaagaagatacgtcttttgggggcaacctcgggcgagcagtcttccaggccaagaagcgggttctcgaacctctcggtctggttgaggaaggcgctaagacggctcctggaaagaagagaccggtagagccatcaccccagcgttctccagactcctctacggacatcggcaagaagggccaacagcccgccagaaaaagactcaattttggtcagactggcgactcagagtcagttccagaccctcaacctctcggagaacctccagcagcgccctctggtgtgggacctaatacaatggctgcaggcggtggcgcaccaatggcagacaataacgaaggcgccgacggagtgggtagttcctcgggaaattggcattgcgattccacatggctgggcgacagagtcatcaccaccagcacccgaacctgggccctgcccacctacaacaaccacctctacaagcaaatctccaacgggacatcgggaggagccaccaacgacaacacctacttcggctacagcaccccctgggggtattttgactttaacagattccactgccacttttcaccacgtgactggcagcgactcatcaacaacaactggggattccggcccaagagactcagcttcaagctcttcaacatccaggtcaaggaggtcacgcagaatgaaggcaccaagaccatcgccaataacctcaccagcaccatccaggtgtttacggactcggagtaccagctgccgtacgttctcggctctgcccaccagggctgcctgcctccgttcccggcggacgtgttcacgattccccagtacggctacctaacactcaacaacggtagtcaggccgtgggacgctcctccttctactgcctggaatactttccttcgcagatgctgagaaccggcaacaacttccagtttacttacaccttcgaggacgtgcctttccacagcagctacgcccacagccagagcttggaccggctgatgaatcctctgattgaccagtacctgtactacttgtctcggattcaaacaacaggaggcacggcaaatacgcagactctgggcttcagccaaggtgggcctaatacaatggccaatcaggcaaagaactggctgccaggaccctgttaccgccaacaacgcgtctcaacgacaaccgggcaaaacaacaatagcaactttgcctggactgctgggaccaaataccatctgaatggaagaaattcattggctaatcctggcatcgctatggcaacacacaaagacgacgaggagcgtttttttcccagtaacgggatcctgatttttggcaaacaaaatgctgccagagacaatgcggattacagcgatgtcatgcccaccagcgaggaagaaatcaaaaccactaaccctgtggccacagaggaatacggtatcgtggcagataacttgcagcagcaaaacacggctcctcaaattggaactgtcaacagccagggggccttacccggtatggtctggcagaaccgggacgtgtacctgcagggtcccatctgggccaagattcctcacacggacggcaacttccacccgtctccgctgatgggcggctttggcctgaaacatcctccgcctcagatcctgatcaagaacacgcctgtacctgcggatcctccgaccaccttcaaccagtcaaagctgaactctttcatcacgcaatacagcaccggacaggtcagcgtggaaattgaatgggagctgcagaaggaaaacagcaagcgctggaaccccgagatccagtacacctccaactactacaaatctacaagtgtggactttgctgttaatacagaaggcgtgtactctgaaccccgccccattggcacccgttacctcacccgtaatctgtaa

SEQ ID NO: 3801 - DNA, 2217 bp, Artificial Sequence
  Description of Artificial Sequence: Synthetic polynucleotide
atggctgccgatggttatcttccagattggctcgaggacaacctctctgagggcattcgcgagtggtgggcgctgaaacctggagccccgaagcccaaagccaaccagcaaaagcaggacgacggccggggtctggtgcttcctggctacaagtacctcggacccttcaacggactcgacaagggggagcccgtcaacgcggcggacgcggcggccctcgagcacgacaaggcctacgaccagcagctgcaggcgggtgacaatccgtacctgcggtataaccacgccgacgccgagtttcaggagcgtctgcaagaagatacgtcttttgggggcaacctcgggcgagcagtcttccaggccaagaagcgggttctcgaacctctcggtctggttgaggaaggcgctaagacggctcctggaaagaagagaccggtagagccatcaccccagcgttctccagactcctctacgggcatcggcaagaagggccaacagcccgccggaaaaagactcaattttggtcagactggcgactcagagtcagttccagaccctcaacctctcggagaacctccagcagcgccctctggtgtgggacctaatacaatggctgcaggcggtggcgcaccaatggcagacaataacgaaggcgccgacggagtgggtagttcctcgggaaattggcattgcgattccacatggctgggcgacagagtcatcaccaccagcacccgaacctgggccctgcccacctacaacaaccacctctacaagcaaatctccaacgggacatcgggaggagccaccaacgacaacacctacttcggctacagcaccccctgggggtattttgactttaacagattccactgccacttttcaccacgtgactggcagcgactcatcaacaacaactggggattccggcccaagagactcagcttcaagctcttcaacatccaggtcaaggaggtcacgcagaatgaaggcaccaagaccatcgccaataacctcaccagcaccatccaggtgtttacggactcggagtaccagctgccgtacgttctcggctctgcccaccagggctgcctgcctccgttcccggcggacgtgttcacgattccccagtacggctacctaacactcaacaacggtagtcaggccgtgggacgctcctccttctactgcctggaatactttccttcgcagatgctgagaaccggcaacaacttccagtttacttacaccttcgaggacgtgcctttccacagcagctacgcccacagccagagcttggaccggctgatgaatcctctgattgaccagtacctgtactacttgtctcggattcaaacaacaggaggcacggcaaatacgcagactctgggcttcagccaaggtgggcctaatacaatggccaatcaggcaaagaactggctgccaggaccctgttaccgccaacaacgcgtctcaacgacaaccgggcaaaacaacaatagcaactttgcctggactgctgggaccaaataccatctgaatggaagaaattcattggctaatcctggcatcgctatggcaacacacaaagacgacgaggagcgtttttttcccagtaacgggatcctgatttttggcaaacaaaatgctgccagagacaatgcggattacagcgatgtcatgcccaccagcgaggaagaaatcaaaaccactaaccctgtggccacagaggaatacggtatcgtggcagataacttgcagcagcaaaacacggctcctcaaattggaactgtcaacagccagggggccttacccggtatggtctggcagaaccgggacgtgtacctgcagggtcccatctgggccaagattcctcacacggacggcaacttccacccgtctccgctgatgggcggctttggcctgaaacatcctccgcctcagatcctgatcaagaacacgcctgtacctgcggatcctccgaccaccttcaaccagtcaaagctgaactctttcatcacgcaatacagcaccggacaggtcagcgtggaaattgaatgggagctgcagaaggaaaacagcaagcgctggaaccccgagatccagtacacctccaactactacaaatctacaagtgtggactttgctgttaatacagaaggcgtgtactctgaaccccgccccattggcacccgttacctcacccgtaatctgtaa

SEQ ID NO: 3802 - DNA, 2217 bp, Artificial Sequence
  Description of Artificial Sequence: Synthetic polynucleotide
atggctgccgatggttatcttccagattggctcgaggacaacctctctgagggcattcgcgagtggtgggcgctgaaacctggagccccgaagcccaaagccaaccagcaaaagcaggacgacggccggggtctggtgcttcctggctacaagtacctcggacccttcaacggactcgacaagggggagcccgtcaacgcggcggacgcggcggccctcgagcacgacaaggcctacgaccagcagctgcaggcgggtgacaatccgtacctgcggtataaccacgccgacgccgagtttcaggagcgtctgcaagaagatacgtcttttgggggcaacctcgggcgagcagtcttccaggccaagaagcgggttctcgaacctctcggtctggttgaggaaggcgctaagacggctcctggaaagaagagaccggtagagccatcaccccagcgttctccagactcctctacgggcatcggcaagaagggccaacagcccgccagaaaaagactcaattttggtcagactggcgactcagagtcagttccagaccctcaacctctcggagaacctccagcagcgccctctggtgtgggacctaatacaatggctgcaggcggtggcgcaccaatggcagacaataacgaaggcgccgacggagtgggtagttcctcgggaaattggcattgcgattccacatggctgggcgacagagtcatcaccaccagcacccgaacctgggccctgcccacctacaacaaccacctctacaagcaaatctccaacgggacatcgggaggagccaccaacgacaacacctacttcggctacagcaccccctgggggtattttgactttaacagattccactgccacttttcaccacgtgactggcagcgactcatcaacaacaactggggattccggcccaagagactcagcttcaagctcttcaacatccaggtcaaggaggtcacgcagaatgaaggcaccaagaccatcgccaataacctcaccagcaccatccaggtgtttacggactcggagtaccagctgccgtacgttctcggctctgcccaccagggctgcctgcctccgttcccggcggacgtgttcacgattccccagtacggctacctaacactcaacaacggtagtcaggccgtgggacgcccctccttctactgcctggaatactttccttcgcagatgctgagaaccggcaacaacttccagtttacttacaccttcgaggacgtgcctttccacagcagctacgcccacagccagagcttggaccggctgatgaatcctctgattgaccagtacctgtactacttgtctcggattcaaacaacaggaggcacggcaaatacgcagactctgggcttcagccaaggtgggcctaatacaatggccaatcaggcaaagaactggctgccaggaccctgttaccgccaacaacgcgtctcaacgacaaccgggcaaaacaacaatagcaactttgcctggactgctgggaccaaataccatctgaatggaagaaattcattggctaatcctggcatcgctatggcaacacacaaagacgacgaggagcgtttttttcccagtaacgggatcctgatttttggcaaacaaaatgctgccagagacaatgcggattacagcgatgtcatgcccaccagcgaggaagaaatcaaaaccactaaccctgtggccacagaggaatacggtatcgtggcagataacttgcagcagcaaaacacggctcctcaaattggaactgtcaacagccagggggccttacccggtatggtctggcagaaccgggacgtgtacctgcagggtcccatctgggccaagattcctcacacggacggcaacttccacccgtctccgctgatgggcggctttggcctgaaacatcctccgcctcagatcctgatcaagaacacgcctgtacctgcggatcctccgaccaccttcaaccagtcaaagctgaactctttcatcacgcaatacagcaccggacaggtcagcgtggaaattgaatgggagctgcagaaggaaaacagcaagcgctggaaccccgagatccagtacacctccaactactacaaatctacaagtgtggactttgctgttaatacagaaggcgtgtactctgaaccccgccccattggcacccgttacctcacccgtaatctgtaa

SEQ ID NO: 3803 - DNA, 2217 bp, Artificial Sequence
  Description of Artificial Sequence: Synthetic polynucleotide
atggctgccgatggttatcttccagattggctcgaggacaacctctctgagggcattcgcgagtggtgggcgctgaaacctggagccccgaagcccaaagccaaccagcaaaagcaggacgacggccggggtctggtgcttcctggctacaagtacctcggacccttcaacggactcgacaagggggagcccgtcaacgcggcggacgcggcggccctcgagcacgacaaggcctacgaccagcagctgcaggcgggtgacaatccgtacctgcggtataaccacgccgacgccgagtttcaggagcgtctgcaagaagatacgtcttttgggggcaacctcgggcgagcagtcttccaggccaagaagcgggttctcgaacctctcggtctggttgaggaaggcgctaagacggctcctggaaagaagagaccggtagagccatcaccccagcgttctccagactcctctacgggcatcggcaagaagggccaacagcccgccagaaaaagactcaattttggtcagactggcgactcagagtcagttccagaccctcaacctctcggagaacctccagcagcgccctctggtgtgggacctaatacaatggctgcaggcggtggcgcaccaatggcagacaataacgaaggcgccgacggagtgggtagttcctcgggaaattggcattgcgattccacatggctgggcgacagagtcatcaccaccagcacccgaacctgggccctgcccacctacaacaaccacctctacaagcaaatctccaacgggacatcgggaggagccaccaacgacaacacctacttcggctacagcaccccctgggggtattttgactttaacagattccactgccacttttcaccacgtgactggcagcgactcatcaacaacaactggggattccggcccaagagactcagcttcaagctcttcaacatccaggtcaaggcggtcacgcagaatgaaggcaccaagaccatcgccaataacctcaccagcaccatccaggtgtttacggactcggagtaccagctgccgtacgttctcggctctgcccaccagggctgcctgcctccgttcccggcggacgtgttcacgattccccagtacggctacctaacactcaacaacggtagtcaggccgtgggacgctcctccttctactgcctggaatactttccttcgcagatgctgagaaccggcaacaacttccagtttacttacaccttcgaggacgtgcctttccacagcagctacgcccacagccagagcttggaccggctgatgaatcctctgattgaccagtacctgtactacttgtctcggattcaaacaacaggaggcacggcaaatacgcagactctgggcttcagccaaggtgggcctaatacaatggccaatcaggcaaagaactggctgccaggaccctgttaccgccaacaacgcgtctcaacgacaaccgggcaaaacaacaatagcaactttgcctggactgctgggaccaaataccatctgaatggaagaaattcattggctaatcctggcatcgctatggcaacacacaaagacgacgaggagcgtttttttcccagtaacgggatcctgatttttggcaaacaaaatgctgccagagacaatgcggattacagcgatgtcatgcccaccagcgaggaagaaatcaaaaccactaaccctgtggccacagaggaatacggtatcgtggcagataacttgcagcagcaaaacacggctcctcaaattggaactgtcaacagccagggggccttacccggtatggtctggcagaaccgggacgtgtacctgcagggtcccatctgggccaagattcctcacacggacggcaacttccacccgtctccgctgatgggcggctttggcctgaaacatcctccgcctcagatcctgatcaagaacacgcctgtacctgcggatcctccgaccaccttcaaccagtcaaagctgaactctttcatcacgcaatacagcaccggacaggtcagcgtggaaattgaatgggagctgcagaaggaaaacagcaagcgctggaaccccgagatccagtacacctccaactactacaaatctacaagtgtggactttgctgttaatacagaaggcgtgtactctgaaccccgccccattggcacccgttacctcacccgtaatctgtaa

SEQ ID NO: 3804 - DNA, 2217 bp, Artificial Sequence
  Description of Artificial Sequence: Synthetic polynucleotide
atggctgccgatggttatcttccagattggctcgaggacaacctctctgagggcattcgcgagtggtgggcgctgaaacctggagccccgaagcccaaagccaaccagcaaaagcaggacgacggccggggtctggtgcttcctggctacaagtacctcggacccttcaacggactcgacaagggggagcccgtcaacgcggcggacgcggcggccctcgagcacgacaaggcctacgaccagcagctgcaggcgggtgacaatccgtacctgcggtataaccacgccgacgccgagtttcaggagcgtctgcaagaagatacgtcttttgggggcaacctcgggcgagcagtcttccaggccaagaagcgggttctcgaacctctcggtctggttgaggaaggcgctaagacggctcctggaaagaagagaccggtagagccatcaccccagcgttctccagactcctctacgggcatcggcaagaagggccaacagcccgccagaaaaagactcaattttggtcagactggcgactcagagtcagttccagaccctcaacctctcggagaacctccagcagcgccctctggtgtgggacctaatacaatggctgcaggcggtggcgcaccaatggcagacaataacgaaggcgccgacggagtgggtagttcctcgggaaattggcattgcgattccacatggctgggcgacagagtcatcaccaccagcacccgaacctgggccctgcccacctacaacaaccacctctacaagcaaatctccaacgggacatcgggaggagccaccaacgacaacacctacttcggctacagcaccccctgggggtattttgactttaacagattccactgccacttttcaccacgtgactggcagcgactcatcaacaacaactggggattccggcccaagagactcagcttcaagctcttcaacatccaggtcaaggaggtcacgcagaatgaaggcaccaagaccatcgccaataacctcaccagcaccatccaggtgtttacggactcggagtaccagctgccgtacgttctcggctctgcccaccagggctgcctgcctccgttcccggcggacgtgttcacgattccccagtacggctacctaacactcaacaacggtagtcaggccgtgggacgctcctccttctactgcctggaatactttccttcgcagatgctgagaaccggcaacaacttccagtttacttacaccttcgaggacgtgcctttccacagcagctacgcccacagccagagcttggaccggctgatgaatcctctgattgaccagtacctgtactacttgtctcggattcaaacaacaggaggcacggcaaatacgcagactctgggcttcagccaaggtgggcctaatacaatggccaatcaggcaaagaactggctgccaggaccctgttaccgccaacaacgcgtctcaacgacaaccgggcaaaacaacaatagcaactttgcctggactgctgggaccaaataccatctgaatggaagaaattcattggctaatcctggcatcgctatggcaacacacaaagacgacgaggagcgtttttttcccagtaacgggatcctgatttttggcaaacaaaatgctgccagagacaatgcggattacagcgatgtcatgcccaccagcgaggaagaaatcaaaaccactaaccctgtggccacagaggaatacggtatcgtggcagataacttgcagcagcaaaacacggctcctcaaattggaactgtcaacagccagggggccttacccggtatggtctggcagaaccgggacgtgtacctgcagggtcccatctgggccaagattcctcacacggacggcaacttccacccgtctccgctgatgggcggctttggcctgaaacatcctccgcctcagatcctgatcaagaacacgcctgtacctgcggatcctccgaccgccttcaaccagtcaaagctgaactctttcatcacgcaatacagcaccggacaggtcagcgtggaaattgaatgggagctgcagaaggaaaacagcaagcgctggaaccccgagatccagtacacctccaactactacaaatctacaagtgtggactttgctgttaatacagaaggcgtgtactctgaaccccgccccattggcacccgttacctcacccgtaatctgtaa

SEQ ID NO: 3805 - DNA, 2217 bp, Artificial Sequence
  Description of Artificial Sequence: Synthetic polynucleotide
atggctgccgatggttatcttccagattggctcgaggacaacctctctgagggcattcgcgagtggtgggcgctgaaacctggagccccgaagcccaaagccaaccagcaaaagcaggacgacggccggggtctggtgcttcctggctacaagtacctcggacccttcaacggactcgacaagggggagcccgtcaacgcggcggacgcggcggccctcgagcacgacaaggcctacgaccagcagctgcaggcgggtgacaatccgtacctgcggtataaccacgccgacgccgagtttcaggagcgtctgcaagaagatacgtcttttgggggcaacctcgggcgagcagtcttccaggccaagaagcgggttctcgaacctctcggtctggttgaggaaggcgctaagacggctcctggaaagaagagaccggtagagccatcaccccagcgttctccagactcctctacgggcatcggcaagaagggccaacagcccgccagaaaaagactcaattttggtcagactggcgactcagagtcagttccagaccctcaacctctcggagaacctccagcagcgccctctggtgtgggacctaatacaatggctgcaggcggtggcgcaccaatggcagacaataacgaaggcgccgacggagtgggtagttcctcgggaaattggcattgcgattccacatggctgggcgacagagtcatcaccaccagcacccgaacctgggccctgcccacctacaacaaccacctctacaagcaaatctccaacgggacatcgggaggagccaccaacgacaacacctacttcggctacagcaccccctgggggtattttgactttaacagattccgctgccacttttcaccacgtgactggcagcgactcatcaacaacaactggggattccggcccaagagactcagcttcaagctcttcaacatccaggtcaaggaggtcacgcagaatgaaggcaccaagaccatcgccaataacctcaccagcaccatccaggtgtttacggactcggagtaccagctgccgtacgttctcggctctgcccaccagggctgcctgcctccgttcccggcggacgtgttcacgattccccagtacggctacctaacactcaacaacggtagtcaggccgtgggacgctcctccttctactgcctggaatactttccttcgcagatgctgagaaccggcaacaacttccagtttacttacaccttcgaggacgtgcctttccacagcagctacgcccacagccagagcttggaccggctgatgaatcctctgattgaccagtacctgtactacttgtctcggattcaaacaacaggaggcacggcaaatacgcagactctgggcttcagccaaggtgggcctaatacaatggccaatcaggcaaagaactggctgccaggaccctgttaccgccaacaacgcgtctcaacgacaaccgggcaaaacaacaatagcaactttgcctggactgctgggaccaaataccatctgaatggaagaaattcattggctaatcctggcatcgctatggcaacacacaaagacgacgaggagcgtttttttcccagtaacgggatcctgatttttggcaaacaaaatgctgccagagacaatgcggattacagcgatgtcatgcccaccagcgaggaagaaatcaaaaccactaaccctgtggccacagaggaatacggtatcgtggcagataacttgcagcagcaaaacacggctcctcaaattggaactgtcaacagccagggggccttacccggtatggtctggcagaaccgggacgtgtacctgcagggtcccatctgggccaagattcctcacacggacggcaacttccacccgtctccgctgatgggcggctttggcctgaaacatcctccgcctcagatcctgatcaagaacacgcctgtacctgcggatcctccgaccaccttcaaccagtcaaagctgaactctttcatcacgcaatacagcaccggacaggtcagcgtggaaattgaatgggagctgcagaaggaaaacagcaagcgctggaaccccgagatccagtacacctccaactactacaaatctacaagtgtggactttgctgttaatacagaaggcgtgtactctgaaccccgccccattggcacccgttacctcacccgtaatctgtaa

SEQ ID NO: 3806 - DNA, 2217 bp, Artificial Sequence
  Description of Artificial Sequence: Synthetic polynucleotide
atggctgccgatggttatcttccagattggctcgaggacaacctctctgagggcattcgcgagtggtgggcgctgaaacctggagccccgaagcccaaagccaaccagcaaaagcaggacgacggccggggtctggtgcttcctggctacaagtacctcggacccttcaacggactcgacaagggggagcccgtcaacgcggcggacgcggcggccctcgagcacgacaaggcctacgaccagcagctgcaggcgggtgacaatccgtacctgcggtataaccacgccgacgccgagtttcaggagcgtctgcaagaagatacgtcttttgggggcaacctcgggcgagcagtcttccaggccaagaagcgggttctcgaacctctcggtctggttgaggaaggcgctaagacggctcctggaaagaagagaccggtagagccatcaccccagcgttctccagactcctctacgggcatcggcaagaagggccaacagcccgccagaaaaagactcaattttggtcagactggcgactcagagtcagttccagaccctcaacctctcggagaacctccagcagcgccctctggtgtgggacctaatacaatggctgcaggcggtggcgcaccaatggcagacaataacgaaggcgccgacggagtgggtagttcctcgggaaattggcattgcgattccacatggctgggcgacagagtcatcaccaccagcacccgaacctgggccctgcccacctacaacaaccacctctacaagcaaatctccaacgggacatcgggaggagccaccaacgacaacacctacttcggctacagcaccccctgggggtattttgactttaacagattccactgccacttttcaccacgtgactggcagcgactcatcaacaacaactggggattccggcccaagagactcagcttcaagctcttcaacatccaggtcaaggaggtcacgcagaatgaaggcaccaagaccatcgccaataacctcaccagcaccatccaggtgtttacggactcggagtaccagctgccgtacgttctcggctctgcccaccagggctgcctgcctccgttcccggcggacgtgttcacgattccccagtacggctacctaacactcaacaacggtagtcaggccgtgggacgctcctccttctactgcctggaatactttccttcgcagatgctgagaaccggcaacaacttccagtttacttacaccctcgaggacgtgcctttccacagcagctacgcccacagccagagcttggaccggctgatgaatcctctgattgaccagtacctgtactacttgtctcggattcaaacaacaggaggcacggcaaatacgcagactctgggcttcagccaaggtgggcctaatacaatggccaatcaggcaaagaactggctgccaggaccctgttaccgccaacaacgcgtctcaacgacaaccgggcaaaacaacaatagcaactttgcctggactgctgggaccaaataccatctgaatggaagaaattcattggctaatcctggcatcgctatggcaacacacaaagacgacgaggagcgtttttttcccagtaacgggatcctgatttttggcaaacaaaatgctgccagagacaatgcggattacagcgatgtcatgcccaccagcgaggaagaaatcaaaaccactaaccctgtggccacagaggaatacggtatcgtggcagataacttgcagcagcaaaacacggctcctcaaattggaactgtcaacagccagggggccttacccggtatggtctggcagaaccgggacgtgtacctgcagggtcccatctgggccaagattcctcacacggacggcaacttccacccgtctccgctgatgggcggctttggcctgaaacatcctccgcctcagatcctgatcaagaacacgcctgtacctgcggatcctccgaccaccttcaaccagtcaaagctgaactctttcatcacgcaatacagcaccggacaggtcagcgtggaaattgaatgggagctgcagaaggaaaacagcaagcgctggaaccccgagatccagtacacctccaactactacaaatctacaagtgtggactttgctgttaatacagaaggcgtgtactctgaaccccgccccattggcacccgttacctcacccgtaatctgtaa

SEQ ID NO: 3807 - DNA, 2217 bp, Artificial Sequence
  Description of Artificial Sequence: Synthetic polynucleotide
atggctgccgatggttatcttccagattggctcgaggacaacctctctgagggcattcgcgagtggtgggcgctgaaacctggagccccgaagcccaaagccaaccagcaaaagcaggacgacggccggggtctggtgcttcctggctacaagtacctcggacccttcaacggactcgacaagggggagcccgtcaacgcggcggacgcggcggccctcgagcacgacaaggcctacgaccagcagctgcaggcgggtgacaatccgtacctgcggtataaccacgccgacgccgagtttcaggagcgtctgcaagaagatacgtcttttgggggcaacctcgggcgagcagtcttccaggccaagaagcgggttctcgaacctctcggtctggttgaggaaggcgctaagacggctcctggaaagaagagaccggtagagccatcaccccagcgttctccagactcctctacgggcatcggcaagaagggccaacagcccgccagaaaaagactcaattttggtcagactggcgactcagagtcagttccagaccctcaacctctcggagaacctccagcagcgccctctggtgtgggacctaatacaatggctgcaggcggtggcgcaccaatggcagacaataacgaaggcgccgacggagtgggtagttcctcgggaaattggcattgcgattccacatggctgggcgacagagtcatcaccaccagcacccgaacctgggccctgcccacctacaacaaccacctctacaagcaaatctccaacgggacatcgggaggagccaccaacgacaacacctacttcggctacagcaccccctgggggtattttgactttaacagattccactgccacttttcaccacgtgactggcagcgactcatcaacaacaactggggattccggcccaagagactcagcttcaagctcttcaacatccaggtcaaggaggtcacgcagaatgaaggcaccaagaccatcgccaataacctcaccagcaccatccaggtgtttacggactcggagtaccagctgccgtacgttctcggctctgcccaccagggctgcctgcctccgttcccggcggacgtgttcacgattccccagtacggctacctaacactcaacaacggtagtcaggccgtgggacgctcctccttctactgcctggaatactttccttcgcagatgctgagaaccggcaacaacttccagtttacttacaccttcgaggacgtgcctttccacagcagctacgcccacagccagagcttggaccggctgatgaatcctctgattgaccagtacctgtactacttgtctcggattcaaacaacaggaggcacggcaaatacgcagactctgggcttcagccaaggtgggcctaatacaatggccaatcaggcaaagaactggctgccaggaccctgttaccgccaacaacgcgtctcaacgacaaccgggcaaaacaacaatagcaactttgcctggactgctgggaccaaataccatctgaatggaagaaattcattggctaatcctggcatcgctatggcaacacacaaagacgacgaggagcgtttttttcccagtaacgggatcctgatttttggcaaacaaaatgctgccagagacaatgcggattacagcgatgtcatgcccaccagcgaggaagaaatcaaaaccactaaccctgtggccacagaggaatacggtatcgtggcagataacttgcagcagcaaagcacggctcctcaaattggaactgtcaacagccagggggccttacccggtatggtctggcagaaccgggacgtgtacctgcagggtcccatctgggccaagattcctcacacggacggcaacttccacccgtctccgctgatgggcggctttggcctgaaacatcctccgcctcagatcctgatcaagaacacgcctgtacctgcggatcctccgaccaccttcaaccagtcaaagctgaactctttcatcacgcaatacagcaccggacaggtcagcgtggaaattgaatgggagctgcagaaggaaaacagcaagcgctggaaccccgagatccagtacacctccaactactacaaatctacaagtgtggactttgctgttaatacagaaggcgtgtactctgaaccccgccccattggcacccgttacctcacccgtaatctgtaa

SEQ ID NO: 3808 - DNA, 2217 bp, Artificial Sequence
  Description of Artificial Sequence: Synthetic polynucleotide
atggctgccgatggttatcttccagattggctcgaggacaacctctctgagggcattcgcgagtggtgggcgctgaaacctggagccccgaagcccaaagccaaccagcaaaagcaggacgacggccggggtctggtgcttcctggctacaagtacctcggacccttcaacggactcgacaagggggagcccgtcaacgcggcggacgcggcggccctcgagcacgacaaggcctacgaccagcagctgcaggcgggtgacaatccgtacctgcggtataaccacgccgacgccgagtttcaggagcgtctgcaagaagatacgtcttttgggggcaacctcgggcgagcagtcttccaggccaagaagcgggttctcgaacctctcggtctggttgaggaaggcgctaagacggctcctggaaagaagagacyggtagagccatcaccccagcgttctccagactcctctacgggcatcggcaagaagggccaacagcccgccagaaaaagactcaattttggtcagactggcgactcagagtcagttccagaccctcaacctctcggagaacctccagcagcgccctctggtgtgggacctaatacaatggctgcaggcggtggcgcaccaatggcagacaataacgaaggcgccgacggagtgggtagttcctcgggaaattggcattgcgattccacatggctgggcgacagagtcatcaccaccagcacccgaacctgggccctgcccacctacaacaaccacctctacaagcaaatctccaacgggacatcgggaggagccaccaacgacaacacctacttcggctacagcaccccctgggggtattttgactttaacagattccactgccacttttcaccacgtgactggcagcgactcatcaacaacaactggggattccggcccaagagactcagcttcaagctcttcaacatccaggtcaaggaggtcacgcagaatgaaggcaccaagaccatcgccaataacctcaccagcaccatccaggtgtttacggactcggagtaccagctgccgtacgttctcggctctgcccaccagggctgcctgcctccgttcccggcggacgtgttcacgattccccagtacggctacctaacactcaacaacggtagtcaggccgtgggacgctcctccttctactgcctggaatactttccttcgcagatgctgagaaccggcaacaacttccagtttacttacaccttcgaggacgtgcctttccacagcagctacgcccacagccagagcttggaccggctgatgaatcctctgattgaccagtacctgtactacttgtctcggattcaaacaacaggaggcacggcaaatacgcagactctgggcttcagccaaggtgggcctaatacaatggccaatcaggcaaagaactggctgccaggaccctgttaccgccaacaacgcgtctcaacgacaaccgggcaaaacaacaatagcaactttgcctggactgctgggaccaaataccatctgaatggaagaaattcattggctaatcctggcatcgctatggcaacacacaaagacgacgaggagcgtttttttcccagtaacgggatcctgatttttggcaaacaaaatgctgccagagacaatgcggattacagcgatgtcatgcccaccagcgaggaagaaatcaaaaccactaaccctgtggccacagaggaatacggtatcgtggcagataacttgcagcagcaaaacacggctcctcaaattggaactgtcagcagccagggggccttacccggtatggtctggcagaaccgggacgtgtacctgcagggtcccatctgggccaagattcctcacacggacggcaacttccacccgtctccgctgatgggcggctttggcctgaaacatcctccgcctcagatcctgatcaagaacacgcctgtacctgcggatcctccgaccaccttcaaccagtcaaagctgaactctttcatcacgcaatacagcaccggacaggtcagcgtggaaattgaatgggagctgcagaaggaaaacagcaagcgctggaaccccgagatccagtacacctccaactactacaaatctacaagtgtggactttgctgttaatacagaaggcgtgtactctgaaccccgccccattggcacccgttacctcacccgtaatctgtaa

SEQ ID NO: 3809 - DNA, 2217 bp, Artificial Sequence
  Description of Artificial Sequence: Synthetic polynucleotide
atggctgccgatggttatcttccagattggctcgaggacaacctctctgagggcattcgcgagtggtgggcgctgaaacctggagccccgaagcccaaagccaaccagcaaaagcaggacgacggccggggtctggtgcttcctggctacaagtacctcggacccttcaacggactcgacaagggggagcccgtcaacgcggcggacgcggcggccctcgagcacgacaaggcctacgaccagcagctgcaggcgggtgacaatccgtacctgcggtataaccacgccgacgccgagtttcaggagcgtctgcaagaagatacgtcttttgggggcaacctcgggcgagcagtcttccaggccaagaagcgggttctcgaacctctcggtctggttgaggaaggcgctaagacggctcctggaaagaagagaccggtagagccatcaccccagcgttctccagactcctctacgggcatcggcaagaagggccaacagcccgccagaaaaagactcaattttggtcagactggcgactcagagtcagttccagaccctcaacctctcggagaacctccagcagcgccctctggtgtgggacctaatacaatggctgcaggcggtggcgcaccaatggcagacaataacgaaggcgccgacggagtgggtagttcctcgggaaattggcattgcgattccacatggctgggcgacagagtcatcaccaccagcacccgaacctgggccctgcccacctacaacaaccacctctacaagcaaatctccaacgggacatcgggaggagccaccaacgacaacacctacttcggctacagcaccccctgggggtattttgactttaacagattccactgccacttttcaccacgtgactggcagcgactcatcaacaacaactggggattccggcccaagagactcagcttcaagctcttcaacatccaggtcaaggaggtcacgcagaatgaaggcaccaagaccatcgccaataacctcaccagcaccatccaggtgtttacggactcggagtaccagctgccgtacgttctcggctctgcccaccagggctgcctgcctccgttcccggcggacgtgttcacgattccccagtacggctacctaacactcaacaacggtagtcaggccgtgggacgctcctccttctactgcctggaatactttccttcgcagatgctgagaaccggcaacaacttccagtttacttacaccttcgaggacgtgcctttccacagcagctacgcccacagccagagcttggaccggctgatgaatcctctgattgaccagtacctgtactacttgtctcggattcaaacaacaggaggcacggcaaatacgcagactctgggcttcagccaaggtgggcctaatacaatggccaatcaggcaaagaactggctgccaggaccctgttaccgccaacaacgcgtctcaacgacaaccgggcaaaacaacaatagcaactttgcctggactgctgggaccaaataccatctgaatggaagaaattcattggctaatcctggcatcgctatggcaacacacaaagacgacgaggagcgtttttttcccagtaacgggatcctgatttttggcaaacaaagtgctgccagagacaatgcggattacagcgatgtcatgcccaccagcgaggaagaaatcaaaaccactaaccctgtggccacagaggaatacggtatcgtggcagataacttgcagcagcaaaacacggctcctcaaattggaactgtcaacagccagggggccttacccggtatggtctggcagaaccgggacgtgtacctgcagggtcccatctgggccaagattcctcacacggacggcaacttccacccgtctccgctgatgggcggctttggcctgaaacatcctccgcctcagatcctgatcaagaacacgcctgtacctgcggatcctccgaccaccttcaaccagtcaaagctgaactctttcatcacgcaatacagcaccggacaggtcagcgtggaaattgaatgggagctgcagaaggaaaacagcaagcgctggaaccccgagatccagtacacctccaactactacaaatctacaagtgtggactttgctgttaatacagaaggcgtgtactctgaaccccgccccattggcacccgttacctcacccgtaatctgtaa
